United States Patent Application Publication US 2020/0157537 A1 - sequence listing, part 3

SEQ ID NO: 4752 - DNA, 1390 bp, Homo sapiens
tggcttctttgaaactttccaaccaggtccccaagcccctgaggctcccttcctgttcctgtcccctggatttgctcctcactctccagccctctaaaccagcttcacgtgaacagtggggcttgtcatcacctcctatgacatccctccttttgccttcttctgccccaggcccaagaggccactgccagcctaagcgagctgccactgggcaccattatcagaatggtcatggccaagaggccctctccccagcccccacctccacccccgtcccatctccctgcacagcactccatgagctgactgctgtcttggagttttctgcccagttgaagcagagccttaaacaggaggatcagtggagctgaggcttggaaaggaaaggaatcctcttagacaagtgtggatccagcctcctggactagctaaattctgtagtcacttaagaatgtaattcctcggtatcccaggaggaagaatgtaattccttgctatccaaggaggaagaatgtaattcctcgctatcccaggagttgatgctgcaccagggcctcaccatctctgccagactctcccttggtctcgggagcctgaccaagggcagcccttttagcaagtgagacaagggacaggctcatttggggcctatttccagcgagtgcacctcttgccccccctccctttcactgcctgactgcagcgcaggcattccaggtgaccagctggaatcactcaggagccctcctctgactgccccaggtactgctctggccttctccagtcccctttacagtagaaggaactctgggaacattctgaatgcctgttttcatgcctgctaatttgaccaactgctctttaaagtggagttggactggctgacagatcctcttccgtcgctcctgattgctggcctcgttgtgagcagcagcagaggcgtctttcctggcacctcgaatgtctaggtactcactcagccaaaccccgcattgcgggctctcagtacggtaatgtgcccactgtcacccctcaggtggcgtggagctgggactggcagccacgtccctggacctggagtggtgcttccacctcccaatcttcccttcccaggaagatgcagcccctggggctcatgctcatgtgccctcacaaggttggagcctggcactggggcccatcaggctgggtgagtgcatcacccctgggctggtccaggtcagacgtccacccactgcatgttgggagccattcaaccataggctgagaaaggagctggcaaggaatgagatgcagttcggctctgtgcactggctcaggccccccaggttcttctgggcctgtgcagccaccaccactgcctggcccgttgcttctacccgcctcctcc

SEQ ID NO: 4753 - DNA, 1177 bp, Homo sapiens
ctgtaccacagccacccggtctgtctgcagggaagcctgtcagggtgcctagtgctgctcggccctccttcctcctaccctgcagcccctcatgcacccctcccctgaagagcagcccctctaggtcctggaggtggtaggatgcagctgtgactccccagccacctttgcatgccctgcatgtgcagcttggggtgaagagagtgaggaacagaagagcagtgttttggggagggtcctggagtggcttcccggtggggtgggggcctccagcctctggctccaccctttgcccactcctcattttctctctcaccccaatctaggccgaaatgagttgattgcacgctatattaaactgaggacggggaagactcggacgagaaaacaggtagagagacggtttatgctgggcctgccacccacacactctgtctcagctgccccggtcaaccccttgcccctaccctgcccacctcctcgaggctgcccctgacctggactgccaccctccttgcctcatcacactccccttaccccctcgattttacaccctcccacccccaagcagctccattcacccttcccacttctcttggagagatggccccactgtcctctctgaccacctactaccctgcccagggcctgtggttcagggaccacagataagcccacggggctgctgtggctgctacatggtccctgccctgagtggctcactcaccagccagggagccagatggtcagatggatgggtacagagcaaggtggcggggctgagagagggtgggtgcagggcaccctgggacaagcagccaacccagacaaggctaggggagtggggagagagagctgggaaggctccctggaggaggtgacactcgggatatatttttaagaaggaatgggagttcgcaaggcagagaaaagggagaagacccttccttccaggctgaggaagttggatatacaactaataatcatggtaaacccatacagagcttcctttaagttaatttatttcatcctctcagtaaccttactagataggtacagtaattgtcttttttactatgaggaaactgatgcatagggaagttaagtaacttcttcaagccccccaggcaggaaagagctgtgcctgtgggcagcctgatgtggtggagggagggtg

SEQ ID NO: 4754 - DNA, 1207 bp, Homo sapiens
tggtttttggtaaactagtacaactacttgggagtttgtcaatacctagtgaagttgcagatgcttagaccctatgtcgactttcatacatggacacaaggagacaggtgtacaaggatatgtgtcgtagcactgttcacaatagtaaaaatgtgggaacaacctaactgtgccccaagaatggaatgaatatagttgataagttgtctcttaaaaaaaaaaagcttttccgccatcttcccacgacgccaccatggtgtgcgtgaacgtcctggccgatgctctcaagagcatcaacaatgccgaaaagagaggcaaacgcccagtgcttattaggccgtgctccaaactcatcgtccggtttctcactgtgatgatgaagcatggttacattggcgaatttgaaatcattgatgatcgcagagctgggaaaattgttgcgaacctcacaggcaggctaaacaagtgtggagtgatcagccccagattcggtgtgcaactcaaagatctagaaaatggcagaataatctgcttccatcccaccagtttggtttcattgtactgacaacctcagctggcatcatggaccatgaagaagcaagacgaaaacacacaggagggaaaatcctgggattctttttctagggatgtaatacatatatttacaaataaaatgtctcatggaaaaaaaagaaaaaagacagggtcttgctctgtcacccaggctggagtgcagtggcacaatcatggctcactgcagcctagaactcctgggctcaagcgatcctcccacctcaacctccccagtagctgggactacagaggcatgccaccctaaccgcctaatttttaaattttttgtagagatgaggtttcactatgtttcccaagctggtctcaaactcctggactcaagtgatcctcccacctcagctctctagtagctggtactataggcatatgccaccacacgggctaattttattttattttattttatttatttatttactgtttatttattgagacagagtctcgctctgccacccaggctggagtgcagtggtgcaatctcggttcaccgcaagctctgccttctgggttgatgccattctcctgcctcagcctcccgagtaactgggactataggcgcccgccaccacacctggctaatgtttttttttcttttttgtatttttagtagaga

SEQ ID NO: 4755 - DNA, 1261 bp, Homo sapiens
ttttctaaggcaaactataataaaattacctcttttattgtacacttctgaacacacatctgaattttgtctaattttgtgtggtgtgatttttcagaatattgctttaagcttcttgtcctcttttcaggcaaattaaagcgaaatcaaaggaaacttttagaaaatgcgttgtatcactaagtaaagagtctatgatttttgtcagttagcacagaaactttaagggaagtaatttcttatgaaaaatactgagtaggccgggcacggtggctcaagcctgtaatcccagcactttgggaggccgaggcaggtggatcacctgaggtcaggagttcaagacccacctggcgaacatggtgaaactctgtttctaccaaaatacaaaaattagctgggcatggtggcaggctcctgtaatcccagctactggagaggctgaggctggagaatcacttgaactggggaggcagaggttgcagtgagccgagattgagcccactgcactccagcgtgggggacagagccagactctgtctaaaaaaaaaaaaaaaagatactgtctaaaagaaagagaaaaagagagaaagaaaaagaaaggaagaaagaaactggatgaacaatttaaggtatgattgtatttattatactaagcctcaactttgaagaggctgtgaatgtagtttatgtttagagtctaaaagggtgtaattgttcacattctattataatgaaaaactgacttgttttatgtttttatctggatgttttagaactgtagaattgaaaggaaccatagctgattttcttcacaggtatcaaagtgacgtgcggtgagctaatggaaaggttattgcaacagctgtgcttataaaggtcaatcagatttttcagtaaaagatgaagtcgaatcttacttagattggataaatctaaaatcacctgtttataagctgtttttaaaatgtataaagacatttcatacattattttacttttcatgcatgtttagcttcctttaatgcacattcctaattgctgttgatctttttgtatttaaaggagacaggactacatatgactagtttcatgtagactatgggaagagatttgaacagagaagcaggaaggaagggatgggaaaggagagagaacagctgataatgtggaaagactattgttctaaagtcaattctgagtcatttcttagaaaaatacaaatcacagattacccagatgtctaaggaaaactgctgcaacc

SEQ ID NO: 4756 - DNA, 1267 bp, Homo sapiens
aaacagctgtggggcttgggcccagcttaggagattgcccagatggcaagaggtcctgggctccttcttgaggggctgcctggcccgctccatcctactcccactaactacacctcagggcgggtgaggttccgacactgatcccagagatgccgtggatacgccagggtcccagggggaatctccccaagctcacactctctcccgcttatcgcctattctcacacctcttctcggtcccatcttctgcacccattgcccagtcttgctttctctttcccatattccttttctttttctcttgtgccaaactgacagaaaccgtcaccacactggtctttttctttaatgtctcattccccttgaggccagctgctatgccaggtggtgtctctgccaggctcctcaggcccagacagaggccagcccacaacctatgaccccctcccccaggacaccacctcccacccacagaccttccctttagctgttgacacaacttcccagctctgcaagtgtgccccctggatcaaggcgggtcccctcttgtttttttctttgctgccacgaggtggtccaagccttcagggtgggctcctatcaggctgggtgtgcgagtgtccatctgtccacatggatgtcgagggtggtttgtgtggagctgtgctcgtcagctgggtctgccctcttcccccttttctccttcttctctcctcatggactttttctgcaattgcagtcttaagcttcactctccaccacctggatggcatggcgcctgccaccaaacatcttcctggcctgcgctctgccctgccctgcctagcctctgctactcccacttcccaactccagggaatgcattacttttatttcaaaccctctgcctccttccttctttctcttcaaccccctccccaccttcaccttctcaaaaatggaaggaaaaaaaaactgtgaatggggaatgctgactgacaaaccaacacaactttcagaggcttcagtgtctgttctctggacatttcttttcacctcctgagcaccaaagtcgcagggccagttgcaggccgctgattgccatgttgatttttaacctgatattctttttaattgttttaaatttttcataggggagttttggacaaaacagtcactggggagatcactgccatttttacacacttgactttttaaaaatacaaccaaccaaccaccacaacttcttatacatttgggacatgagccagagtttaaaagggaacca

SEQ ID NO: 4757 - DNA, 1228 bp, Homo sapiens
tttgacaggagtatgtacagaaaattcaagttttgtttgagacttcataagcttggtgcatttttaagatgttttagctgttcaaatctgtttgtctcttgaaacagtgacacaaaggtgtaattctctatggtttgaaatggatcatacgaggcatgtaataccaagaattgttactttacaatgttcccttaagcaaaattgaatttgctttgaacttttagttatgcacagactgataataaacctctaaacctgcccagcggaagtgtgtttttttttaaatttaaatacagaaacaactggcaaaaattgaactaagatttacttttttttccatagctgggatataggctgcagctatagttgaacaagcagtctttaaaaactgctgtgaaacacaggccatcagggaaaacgaaatgctgcactattaaattagaggtttttgaaaaatccaactctcatcctgggcagaggttgcctagttggtatagaatgttaagtttcaagaaagtttacctttgctttaggtcataagttccttatttgattgctgtatatggatacatggctgttcgtgacattctttatgtgcaaatttgtgatttcaaaaatgtcctgccagtttaagggtacattgtagagccgaactttgagttactgtgcaagatttttttttcatgctgtcatttgtaatatgttttgtgagaatccttgggattaaagttttggttacaaattgttctttaacttgaaagcctgtttttccttgcaaactcaaatctgtgagcttggtaccaagtccaggtataacattcctattggaagccatacttatattttcttgtaaagtgcttttgaattaataaaatattagcataattgtgtatagtcagttgaacccactgttaccattgttcttatcccatgggaagcagttggttacacgattcttattttataagaaacagctgagaggcactatggattagtcttctgaagtgaaggaaatatagatgtcacctaagtgatagttaacccattttttttttttttaggcatagaagccagttcagggtccataatatttagtgaccaacattttaaagtatagcagcaacctggttcttaaacacaaagtaagttgcccattaacaaatggcttttatctttagcatgaaaactttccacaggtctaaaaattgcttccattttataatttgag

SEQ ID NO: 4758 - DNA, 1144 bp, Homo sapiens
tgaaacacaactgtgtccagccattttcctgtctccacattcttccagatgtgtgacagaggagggactctgctcaattccagttgtgggtccccttggagtttacatcacttgtttttcaattcttggttttctgttcccttctaccaaaacccagcataggactcagtgtacacttactttaaaacaaaaactcacatttcttagctgcaggtgatggcctcagtcattttaatacagcctggaatgagtttgcttattacccagtcactttcgtagtgaatgttcaaaccccaaagcaaatgtttgcatctccttgtccataaaggagaaagccaggttataggagaaagagagagaaaggcgcatgtctgtttgcacagagagaggcaattttgtctacctttcgagaatcagttataaacagaagggcctcttaggattttgagctctcctgacaatgaaggaaaagctctcttgagtatacaagttccacactcattacctttcagtggtgacccatcacccactacaatttgttgaaggaagggagtgtcagagatatgctttaaagttgtactttaggctgaaattctctctgtatttggacctgcagatgttgtgtacagaaccgatgcatggcagggtcaggaagctaggagagtgaaggcgcttgtggagacagctctgtagcaaatgaaacacggaagcctccgggaatgtgtttgtgtcaccagcagcaggcatttccctgtcctccccacccccagtctccacatccccagcagcctcttccagaagcatgtcagggagacggacaggtgctctccttctcgtgcaccacatccaagtccacccaccgtggacgcagtgtgactaaatgctggccttgaagagaaaccctcagccagcttgtctgttgtccaggtccctcagtgtctctggtttccctgccctgcataatttaagcattagtgccaaatacatctgtcatattcctctccctggagactgcgaaatgtccagactttttcagactagtggagggaaggaatgttacataactaagtggaggcctggaactgtcaggatttgacagggctggaccagagacccttccgcctctgcctagtgtgtctgtcag

SEQ ID NO: 4759 - DNA, 1212 bp, Homo sapiens
gtgctggggagtggagtgagcgctggggagtgggtaggagaggaagcttgagcaagacgcagattttgtagggccttgtaggcctttgaaaggactttgactttaactcactgtgagaggaatgaggagtgggctttgagcagagagtgacatgatctgacttctgttttctcagttcgctatggctgctgtgtgaggaagagacagggtggcgaggctggaagcagggagtccacggaagggaaatacaggctcctcatttatttatttctcttctttttctccaaagcaaagagattgttctgaagaccgtgctctaagggcatttgaaagactgccaggtagtgcgagcctgagatggtctggaggattctctctagccgtgactccgctgctctgaaggtcaactgagaagtcttgtgggacagagacttgagttaggaagccctcagtcacttgccttccacggtggccagccctgctgccatcattggctgaagcaccaccaggattcacggcacccaactgcttcagggtacttcgtagactctgcctcactacatgtcgaaagagttatttgagttctcttctgtttttttttaatttgttgttgttgttactgttttgatacctcggaaacacctccgttgacagttgttttggataggttgggtgtaccccatggctgcctctgaaggcagtgtctattttgagaggatggcttacctcttctttgtgaaaatactatctcatttcctggaaataaaatgtaaaacctgtcagttgctcagctgggctttggtgtatttaccttccttcccttcctgctcccagacagtctcacaagtaaacaccagcagctcatagattacaaccaagaaagtgactgtatcagatgatagacttcaagtgaatgtcagcctaagaggccaagctgcagatcgtggcaacagatgagctctgttaacctcctgactgtcgtgtttcctttttattacagaggtgggtcactgtttaccttgtttcaggggtgggagaaactcctttccttcagctggcatttgaatgtttccaaatctattttatctgacgtcatgaacacacaggcaatgattttatgacaacttgatgtgcttttttctttatttttcttttacattagaagttttctctcttttctccacctctcctttatttttaattttaatttta

SEQ ID NO: 4760 - DNA, 1210 bp, Homo sapiens
gtgttgatggtaaaatgcaaatgatgcaaatctagaaatcggagttgagccttagttaagcctgtaaatagtcaaaagtgaagcctaaattggagaggtgacagcccctaattttgtattcgtattaaatatgctttgtcacaagagaaaaacaaaacagtgtctaaaattagtactgattttattagccaggtgatattttgacctctaataaaatggggattattctatttttatccccaagagggtgatgatgtcttagaatgtcactgttaatcgctgttggactttatcacattttgaagtatcagtggtaagcgtttgtcagcatcttaacatatggaaaggtataggattctaggtgagagattacatctgaaaaactaaaattgaacatatttaactgcttacccagaatcctttgagagttccatgaaacatgtttttactcttcttacatacgtagcagaaatggaatgtcttggtttgaaattttgactagcttattccactatcccttacctttatttacttaaatattcacattttgttgagactgggaaacccttttactgttatttacacttagtacatcagttggtttctgcaagactagaaataagtcagttggcacgtaaggagtatggggaaattggatcttatattaacctttaggttcactggttctataccagtggttctcaaatgtggtccaaagatccatagaagtccccaagtccctcttagggcatccatgagatctttccttttccaactacatatttatgtaatagtgtgctttcttcatattcatataaatagattaaatacagatatagacatgaaaatccaagtagcttcctttaagccaggccactctcattattttttaagttgcagttatttttcataaaagagtaagtttttatgttgacatctaattattttaattttaaatgaaaacatttttgtcaagttataatttcatatgggataaatatcaatgatgtaagatacataaaaaaagtttcttagtgtccttagtaatttttaagctttaaaagttctcaagacagaaaatactagcatgaggactaccatgctagtaaagaagttacagaagaaaagcttggagttagcagaggttggttcatgaggctaagaaaagaagccatctccataaaagtgcaaggtgaagcagcagttgctg

SEQ ID NO: 4761 - DNA, 1130 bp, Homo sapiens
taaacagaatgaaattgcccagataaaaacccttgtccccatcaggcaccacttcattcttagttcttcacttagatttgctggtgaaagtgaatgcaaaccctaacttttgttgctgtggtcactgcagtgagcctcactcaacctgtcactatgaatgctcatcttttgactgagtatatcatattaatgtttgaattcaggtagaagtacagttgtcacttgaagggagtagatgtggaagggcgttcggggaggagtgggaagtggggaaagccaggctaaagaatgagggttatagctttagcaatgttgatgagccacatttcccacacagatctgtagcatttgctgttgacctcttttgagatgaactctcccataggccctgccaggcagcactgagacatggaggaaattcagacaaaaaatggctcaccctgatagggaaggagtgactatattttaaattaaacttgctttttccaacactgtgaggtttctgtaatatttagcttttatttggaagcgatagcgtatggcattttttatgctgtttggtttatattgtctactgcaggcttctttgtataagctttgcctgggctcaccctctcctggacactgttttaaagtgtcaccgctgtccatgctgccagaggctctgatgtgaagctgtactctcaagatccacgtttttaagtcggcatgattagtaatgactttttgtggcaatagaaaagcccattaactcaaaaaaaccaaggagagtaaaaaggaaaggaaactatgaatcgtgcctcatctttcattgaatcctatatttattattctagaaaaaaagaacttacaagatagagaagaactaatagagcatctactttacccctcaggctgtccagtggggataattattaataaacatttaatggaaaattcaaagatcttccaatttaatttttaaaaatagttttataccaaatattataaggatttattaagcagattaaggactttgtgaaataagtgcttaacttagctgagcacgcatatatcaaagtaataaaagaaactaacatcagagtctccactgagctacacatttgtgaaaggtgcccactgcagttaca

SEQ ID NO: 4762 - DNA, 1177 bp, Homo sapiens
caccacacccagctaatttaaaaacatttttgagacgggatctccctatgttgcccaggctggtctcaaatgaacttcatgtctcagcctcccaggtagctgggattatatgtttatttttatcactggtcatggtggatatcaattgctcatcacaaaacatccaaataaatcctttcctgtcttttgcatcttgccttgcaggtgtgagcgacgtctcctcaccacagtgctgtgtggtctatacctcagccagggagaggatgtgaaaccccccgccctgcacatgagtggtacaggccaacaggaacacctggctccagccacgttcacagacatgtcagccgtggagtagtgctgacacttttctctcagcttctcagggtttcagtccttttgggtttgttttatttaccttttttatggttttgtggctggacgttcacaaccaaggcagacagcatgggtgaccagcaactgtacaagaccaaccatgtggcccatggtagtgagaaccttttctaccaacagccaccacttggcgtccacagcgggctgaaccacaactatgggaatgcagttacagggggcggaatggatgcccctcaggcctcgccaatctccccccacttccctcaagatacacgggatggtctgggcttgcctgttggctccaaaaaccttggccaaatggatacctcgaggcagggagggtggggaagtcatgcagggcctggaaaccatgtccagctacgtggaaacctggccaactcaaacatgatgtggggggcaccagcccaggctgagcccactgatggctaccaatacacctactcccaggccagcgagatccggacccagaagcttaccagcggtgtcttacacaagctggactctttcacccaggtgtttgccaaccaaaacctgcgaattcaggtcaacaatatggcccaggtgctgcacactcagtcagcagtgatggatggagcccctgacagtgctctccgccagctgctgtctcagaagcccatggagcccccagcaccggctatcccttcccgctaccagcaggtgccccagcagcctcaccctggtttcactggtgggctgtccaaaccagctcttcaggtcgggcagcaccctacccaagggcacctgtattatgactaccagcagc

SEQ ID NO: 4763 - DNA, 1202 bp, Homo sapiens
cggcagatgcacagacaatgcatccctgattttaccaatagacttgactcccaacaatgcatactcttgaaggcaatccacaggttgaataaaccaagtccatgagcgctgggtctggaatctttctacaatcagggtcagaaggagggtgactgaaattaaaatattagcttggatctttgaaatcagagtcaggctgaaaaagtcccaatcttagttcaaaacctgtcctgcatgactgaagccctcctagggctgcacaaagtataatggaattattattattattatcattagatcctagtcttaccattctcagcacttatccccatagcaaaagaccattttttaatgtaatttattcttttggaataggttgaatgcattcacatggttccaaattcaaataaacagcaagaagtctccctcccaccctgtctgccacccacttggttttccttctctggaggcaacctgggttagtggtcagaagatgcatttaactgttttccagctgaggccttgtgagaactcctcggacaccaatttaaatctttatgtccagaactcctttctccaatccaggtagagccactcccctatcctatccccactcccacccttccccccttcagcctcaatcctaagcaggctctattaacaatgatgagccaccatttcctcgagctactaacaaatgcaaatgtttaaatactttgtggttctttttcctcttctacattaattgctaacatttatcgagggctttccgtgtgccacgcactgtgctaaatactaggcatgcatattcttatttaatctgccccaaatcttcatcattatccttatttacagatgcagacagaaatgaaagttcagagagattatgtaatttgcaccaatttgcatccaggccaacctgaatccaaaccctatctctttttactttttctttcctttttttttttttttttaaacagggtctcactcttgtcagcccagatggcatgcagtggcacagtctatggaggcaatcagggttagctgtcagctcactgtggcctcaacctcccaggcgcaagtgatcctcccacctcagcatccccagtagctgggactacaggtgtacgccactacccccagctaatttttgtatttttttgtagagatgaggttccaccattcttgcccagactggtttc

SEQ ID NO: 4764 - DNA, 1228 bp, Homo sapiens
gagtttcaccatgtaggccaggctagtctcaaactcctgacctcaagtgatccacaagcctgggcctcccaaagtgctgggattacaggcatgagcaactgcgcccagctcttgtgtaccttatgtgaggaagtcctgctcaatcaggatcggtcacgcaggccctgatcttgctactctggttccatgtcctatggaagaccaaagtttaccaagatagatttttcccttcatagtggcagatagtgttaacccctgcaccatctgtaactcagaaatccccaccatttcttcccctgggcttcagaatagaattgcctggtttctctgatgatcagcatggttccttaaaacccaaatcagcaaggaatgaacaattttgtttggcatggatgaaattagcactgtttggctcgttaggccccaggcaggcaggcaccttaattttttccttgcatattctagtcttcagaagcattgccttttgtcctactggtagtgacatagaccaataacagggcatctggggattttaatcctgaaaacagtgagtctgatactgcttgtgtttttcatcagtgtccaccccaagtgggtcttcctgctattctcttcacttagttgcccctcacttgccatctgagcaattggcaaggatgtgccaggcctaggttaaacttggaaacatgcttgaccattctattccctggtcctttaagatcagtttggctgcaattttggctccttggaccctcaagcatagctggtaaatcaagttagagatgtaactgccttaaaacatgccagcttaggctgggcacggtggctcacacctgtaatctcaacacttcaggaggctgaggcaggcagatcacttgaggtcaggagttcgagaccagcctgaccaacatggagaaattctgtccctactgaaaatacaaaattagccggatgtggtggtgcatgcctgtaatcccagctacttgggaggctgaggcaagagaattgcttgaacccagggaggcagaggttgcagtgagccgagatcacaccattgcactccaccttgggcaacaaaagcaaaactctgtctcaaaaaaaaaaaaaaaaaaagtgccagcgtatgaggtaattagattggttctctccagaggtaacctgccaagaagagatgctatagatgttactcctatactgtaaaacattgtgaaatcagattactttaaaa

SEQ ID NO: 4765 - DNA, 1401 bp, Homo sapiens
acacctgaggtagggagttcaagaccagcctgaccaacatggagaaaccccgtctctactaaaaatgcaaaaaattagctgggcgtggtggcgcctgcctgtaatcctagcaaatcaggaggctgaggcaggagaatcgcttgaacctgcgagggggaggttgcggtgaaccgagatcacaccattgcactccagcctgggcaacaagaatgaaactccgtttcaaaaaaaaaattggccgggcacagtggctcacgcctgtaatcccaacactttgggaggccgaagcgggcagatcacgaggtcaggagattgagaccattctggctaacgcggtgaaaccccgtctctaataagaatacaaaaaaaaaaatttatctgggtgtggtggcacgcgcctgatatcccagctactcaggaggctgaggcaggagaatggtgtgaactcgggaggcagagcttgcactgagccgagatcgcgccactgcactccagcctgggtgacagagcgagactccatctcaaaaaaataaataaataaattttttaaaaaattaaaaaagacttttcgccatcttttgtctttctgtggagctgtcgccatgaaggtcgagctgtgcagttttagcgggtacaagatctaccccggacacgggaggcgctacgccaggaccgacgggaaggttttccagtttcttaatgcgaaatgcgagttggcgttcctttccaagaggaatcctcggcagataaactggactgtcctctacagaaggaagcacaaaaaggggcagtcggaagaaattcaaaagaaaagaacccgccgagcagtcaaattccagagggccattactggtgcatctcttgctgatataacggccaagaggaatcagaaacctgaagttagaaagactcgacgagaacaagctatcagggctgctaaggaagcaaaaaaggctaagcaagcatctaaaaagactgcaatggctgctgctaaggctggagtgcaatggcacgatctcggctcaccgcaacctctgcctcctgggttcaagcggttctcctgcctcagcctcccaagtggctgggattacaggcatgtgccaccatgcctggctggttttgtatttttagtagaggtgtggtttcttcatgggcaggctggtctcaaactcccgacctcaggtgatctgcctgcctcggcctcccaaagtgctgggattgcaggcgtgcaccaccacgcccagcctgagatttatatatttaagatgtgataaaatagtagtaatcaaaacttacatgtgaagaataggcttctacttctacagaaaggtcatttttacctgccaacctgtgccaagttgcaaggatgcaactggacaaatcagagtcctctttagggaa

SEQ ID NO: 4766 - DNA, 1288 bp, Homo sapiens
ggtggggtgaggcattcctggtgagggtaaggtggaggggctgcctggttggctctaagcaaagcaggaaaggcaggttgggatgttgactgacatgtatacacagatctcaggtgcctggacactgcaatatacatacatacataaacataaaccggaaatccatatgagcttggaggtagaggagtgggtggtgttggatttggtggtgggtgggttctgattgttcaacctagtaggtctcttaagtaagaggtggctgtgggtggttgacctttaggaagttggagagactggtgtgtttttagcttggttcaaacatcccttagcttgggctgagggccccctcttctttctgtctcttattgttggccttccaggtgggagctgaatgccatgaccaccaacagcaatatcagtcgccccatcgtctcctcccatgggtaggaggaagtttctgccacctcccctcctgagcctgctgtcatcttcactgcccctgcccatctgtcacccacctgctcctttgacccctggacttggtatacctccatgtggagttgttgggcgagaggtgttctctgtgctgtgaattcagtggggagctgtagcggggtgggggctaggttcctccccccttgggccgagggccccttccccttggtgctctgtccccatccacctcctttcagctgctcctgggcctcagctctgcccagggccagccaggttctgctgggaagggaagggaatggggagaagggagaagcaagcagtgtctgagcctcaggagcttccccctccccctttgcctatcccctcccctctgcttgagccttgagccttgactgggagctgaaaggagttgcagctgttggcatgagacctccttctccccgtcttggggaggtggggaccagcagataaatcccacccttccttgagctgtcgctgtactctgaagttcagccagctcagattttataaaaattaattaaaatctccaaacgtgttgtgtgtttttgtggaatatggtggagaaggctggagtttgcagtgggggcagggtgccgaggacaagcaccctgaggttctggcttctcagccaagggtattaggaaaccaaatgccaccaaggcctggtccaagcttctcgggcgtggaacccagcaccctgcgactcgggcagaaggttgcgacaatgtctccagagcgggttatcctttgggcccggctccctggccctcgaccgcgcagttttctgcccattcgtcaccacgttgagacc

SEQ ID NO: 4767 - DNA, 1177 bp, Homo sapiens
agcgaggacgtggaggcctaacgaccccgaggtcactgagtcagtcggtggcgcagggggcggggcaggtcgtctgtctatctgtctggacgccgaggggcggggaagaatcgcgaagggcggagttttggaggctggagttttgtaaggttggttggagggggtttgttcatctttctggtagtgcgagaataagagatggcagagaccttaaccttcagccccaggataccctcaaagactcacctgcaatctgccggtgtggctgccgctcttgccggtactgcccctttaaatccatgatggctgccgctcgaggcaattgttttgacgggtctgggggggcggggcctgtttcctagtcacgcgacattagagctgcccgcggattggctctcacggcgttcaggtaggaaaggaggtgtgtatccagcttgggctccagttttctgcccgcctccttttacgttattgcggagcgacggcgccggacagtcaacgtcatctaggagcaccgagcagcttggctaaaagtaagggtgtcgtgctgatggccctgtgcgcactgacccgcgctctgcgctctctgaacctggcgcccccgaccgtcgccgcccctgccccgagtctgttccccgccgcccaggtaatccatcttacccgggaagaaggctgcttccattcgggctgccggagatggggtctgcgggcatgcgaggcgggagttgcgagtctggtcaggagtcatgcaggtccgtgaccttggataaggcacacttagcctcagctttttcctctacaagtgttgctttctcatagggcgaaattcttcagacgagatacttaaggtgaaagtgctttgcagatcaccggttgtgcaggtttcagtaataacgtttcgagtgcctatgataagccaggtataggtaatagacgtttcaaataaatgaactcctttcaaatactctataaggcagttactattcccattttatagatgaggaaaataaggagtccaaggtcacacaccaactatcagagctaaacagtctgtctttcagagcctgtgctcttaaccattatgatatgatgcctgcaaggatgagttactgctgatattagagaatgcagggcaagataccaagaacagtggcctcaggggaaggtatcctgaggt

SEQ ID NO: 4768 - DNA, 1209 bp, Homo sapiens
aaatcatactcctgtcttgatatcccatcaaatatcaatgtttacatttagcgtttggatgtctggcaggacattaaaaaattggcagagctgtcccacacatgcagaacatctatagcgttcttgcctcctcaaaggtaatcttcatggtgacaacaacaacaacaaaaaaaaaaaaaaaagaaagaaaaaaaacacctccagaaatttcttaaaatcccctagagggcgatactgtcccttagcctcagagccatcctgttcagcaatttcccctcccttcagcccctggctccagggtagtagactttgtctcttagagttgtgcagtgagtgttgggccctgctgggaggtggggaacctcagattcccataggtcttttgcaacccaaatgtctgatggggacaggcctgtcttcataggtggctgccacactcaacaatttggctgtgctctatggcaaaaggggcaagtacaaggaggcagagcctctgtgccagcgggcactggagattcgagaaaaggtacccatgccctctctcccttcttctcttgtcgctgtgacccttctctacatggctcctctggtctaaccctcctccttcactttttttttctcacccccatctctgctttgttctctcttccttcattccctttcctctgctttccacatgtgtgtgcctacatgcaaacacacgtgtgcttgtgcacacacatgttatcatagccatttatccactcctttgttccctttcaggtcctgggcacgaatcatccagatgtggcaaaacagctgaacaacctggccctcttgtgccaaaaccagggcaagtatgaggccgtggaacgctactaccagcgagcactggccatctacgaggggcagctggggccggacaaccctaatgtagcccggaccaagaacaacctggtatgggaggagggacaaagtaggtggaagaaacggagaggggggcacagaggtggggggagggggggcaggcggagaggccacttgggtcctagagtcaggaagcatcacagtctggcacactgctctcatcaactttgtgctcatgtctggggctgcctttgcggatgaaggatctgcttcattccagttatagaagttccacagcttcttgggagtgggctgggaatacccttgaccctacacctggagaaggaggtgtgagaaagatct

SEQ ID NO: 4769 - DNA, 1199 bp, Homo sapiens
tgggctgcagagcatttgcggatgagattcaaagcgtcccatctgtggccacctctgatgctggcaccgtcgaggggcatgagtgaagccatctttccagggtgctgtttgggtcatgatttaactttactaaacctcctgagtctgtattgggggaaggtggcctgcagtgtccccggctcctcagcctggcatcaaaacctcctgtgatctcaccctgcaggcccagactctcttttgctaggaagcctccctgtgcagccagcccttaggggtcccttcttccttcgtgctcaagtcactactgcctgcccaccccattcatttggcatttatgtgactgtaactgtgttctgtgtgcccctctagtcttcagacctcttgaggagaggctactgtgtctttgtatcctacagagcactcagcacagttgaaaagctcttcagggggctgggcgtggtggctcacgcctgtaatcctagcactttgggaggccgaggtgggcagatcacctgaggtcaggggttcgagaccagcctggccaacatggcgaaaccctgtctctactaaaaatacaaaaattagctgggtgtggtggctcatgcctataatcccagctactcgagaggctgaggcagaagaatcacttgaacccaggaggtggaggttgcagtgagctgagatcacaccaccacattccaacctgggtgacaagagcaaaaaaagaaaaagaaatctcaaaaagaaaaagaaaagtttttcaggggactcttgcaattgtggcatcatgatccttcacacctgcacttactggacgcctcctgtgtacacagcccctttcctcctgtgcacaaggtggcctgtgttaggacagaggctgcagctccccctgaccctgcctctcccctgtttgcatctacaggtacccagacagccattgtcttcatcaagcagccgtcctcccaggatgcactgcaggggcgccgggcgctgcttcgctgtgaggttgaggctccgggcccggtacatgtgtactggctgctcgatggggcccctgtccaggacacggagcggcgtttcgcccagggcagcagcctgagctttgcagctgtggaccggctgcaggactctggcaccttccagtgtgtggctcgggatgatgtcactggagaagaagcccgcagtgccaacgcctcctt

SEQ ID NO: 4770 - DNA, 1182 bp, Homo sapiens
ggtcagccccctggtgcagaacatcacctctcccggtaaccatgctgacacctggccccactaaccagttccttgtccttattcccagggatcacctgagttaatgctcttggttcttttggttcctgtctttatccctgaaggcctgtcacctcagtgttcctctctccttcctgccccaggcactgctccctgagactctggtatttgaatctttcccactaccccatccccaccctgttaacatttcccctgactccagctgaaacaaaccttggtgaggggaggactagggccccactacccctcaagcctttttgtacaattgatctttctccctcctctgccctgagctgtctgttctcccatctcccatggagacctgttcctgacctgtcttctttcagatgcggaaggcgtgagtgccctgggatggctgctggatcagtacttagaacagagagagacctctcggaaccccttgagtcgagcagcgtcctttgcttctcgagttcgtcgcctttgccacttgctggtgcatgtggaacctcctcctgggccttctcctgagccatccactcggccctgtaagtcccagctgtggccagtggagctgactctgcggacagtggtgtatctggctccctcctccctgggtcttactcttgctgctttgctaccggcctttccaggcccctgagacctactggcctttccaggagatcactacccaagaccggtgtactcacccagaggctgagatgaaaccccttccttctccctctgtctctacagtcagcaagaacagcaagggtcgggaccggagcccggcgccttcgccagtgcttccaagcagcagcctgaggaacataacccagtgctggctgagcgtggtgcaggagcaggtgggcagaagcaagcagaagtctgcagaggggaggggctgctccttttatgtcatttcttgcctttctcctcaggtcagcagattcctggctgcagcttggagggccccagactttgtgcctcgttactgtaaactctatgagcacttgcagagagcaggctccgagctgtttgggcctcgggcagccttcatgctggctctgcgcagtggcttctctggcgccttgctgcagcagtccttcctcactgctgctcacgtgagtcccaccagctccc

SEQ ID NO: 4771 - DNA, 1204 bp, Homo sapiens
aatacaaaaaattagctgggcatggcagcaggcgcatgtattcctagctacttgggaggctgaggcaggagaatggtgtgaacccgggaggtggagcttgcagtgagctgagatggcgccaccgcactctagcctgggcgacagagcgagactccgtctcaaaaaaaaagaaaattagggaatggtgtattctggggaagcaggtttttcaggataggcagtgggtgaggcctagcccataagggattcctttaagtccttagagtccttttggaaagcaaaggctttaagttatggctgctgtgaagttcattgtcacagaaaaattgggttctctttaaaacccatccaaattgagaccttgacacaacagcagaagctctcaattgtgaggaaactgttgtgggtacagataagtcttcacaaagtcctgactttctgttgctgctcctggacagcactctgctctgtgtgtgttgctgacatgtacattctccctagccttgacctctcagaggcctgtgcaccctgaccataagagatacagactgcagacttttttttttcctcccaccagcaccactgggagtctgagtgcgattcagaagatgacgcgggtacgagtggtggacaacagtgccctggggaacagcccataccatcgggctcctcgctgcatccatgtctataagaagaatggagtgggcaaggtgggcgaccagatactactggccatcaagggacagaagaaaaaggcgctcattgtggggcactgcatgcctggcccccgaatgacccccagattcgactccaacaacgtggtcctcattgaggacaacgggaaccctgtggggacacgaattaagacacccatccccaccagcctgcgcaagcgggaaggcgagtattccaaggtgctggccattgctcagaactttgtgtgagttgagcccaggcctctggttgcaggactcgtgaatggagcagttctgagaaccacccttttgctaagggagcttgggagccacatggctgctcccttcacactgggtaacagtgtagtatcctgtgagagaataaatgtattcatttatgtgtttttccagagctttctgggatgtgggaaaataaattacactgaagcagttgaaaggtggcttacccgagtctggccacacggggtagcattctttacatggagcag

SEQ ID NO: 4772 - DNA, 1181 bp, Homo sapiens
agaaaagagcgagggctgggtaggggtcgcgtactcacccccaggcgcagactcggctccggctcggagccccgggttggggcggggcggggctgggggagggggagggggagtcgctgggcggctcgagctccgggctcctgcggcggccgcggcagtgtatgggggagggggagcggggggagggagggggagggggcggagccccgcaggtcccgccccgcacgccggcgcacgcaaggtgcgcgcgcactctcagatcgcgtccgccgggctgggcctggcgcgcaggcgctaggaagaggccgcgtggggcgaaggcggcgcttggctggtggggcccgcggcgggattttcccgggcggcgagagcggtatggtggggggcaggggtgggcgttaagtcctcattccctccttctcctcttcctttctctgcagtaggggaggcccactccccggggtgagtgaggagaggccagagtgggaggcagagcgtcagtgggaggggtcccgacggggaggggggggtcccgacggggaggggggtcccgacggggaggggaggccccttacccggatcctcctcccttccgctctccgtgggctgcttctgcgacccccaagtccgtggccggcgctcacctgctttccccgggttgcggcgtcgacttggggagggcgggctgcgttcagccgtcgctggtcactccggagcgtctcctccggcttctccgctttccgcgctcccctcccctttcccaacttaggtctggagatgagttagccagacgcctctgtggtgtgaggattgagtttttgctttcactctgtcaacgctgatgagtgcgccctcccccaggccagggggttccctggtttcttatttcaccagagactgcatctaccagtgattaagactggaaagatgaagggagagactgagactctttctatatatcacccacacaaatagatcataaaggcacaacgggcaccaacctggtcatttaatttctggttcctggaggggacaaaaaggaagtattgctttccacagccgacgataaatgaactttgccaccgtaagagacggacgggactgaatttataaagaggttaaaagggcatatgacagacacctcaggctacttgggaaactctgggagtttgggagataat

SEQ ID NO: 4773 - DNA, 1261 bp, Homo sapiens
agagcaaaatcttgaaagtcattcgcaaaaacattgttaagaagtgccttgagctcttctctgagctggcagaagacaaggagaattacaagaaattctatgaggcattctctaaaaatctcaaggtaaaaaggcaaataatgcttattccctttaccactttcttagtaataacaataaattattccattcacattgaaagtgaagttattgtagttaagctggattgtttttcctcttcccacccttcaagcttggaatccacgaagactccactaaccgccgccgcctgtctgagctgctgcgctatcatacctcccagtctggagatgagatgacatctctgtcagagtatgtttctcgcatgaaggagacacagaagtccatctattacatcactggtgcgttgactctgattgaagcctttttggaggagtggggagcacaattagggcttcctgggaactggcagtatgaggcattttagtcactgagttcatttaattaccctacaggtgagagcaaagagcaggtggccaactcagcttttgtggagcgagtgcggaaacggggcttcgaggtggtatatatgaccgagcccattgacgagtactgtgtgcagcagctcaaggaatttgatgggaagagcctggtctcagttaccaaggagggtctggagctgcctgaggatgaggaggagaagaagaagatggaagagagcaaggcaaagtttgagaacctctgcaagctcatgaaagaaatcttagataagaaggttgagaaggtaagccattctggggctaggatatattttgtaacatcttcgaggtgggctccctcacaagcatgtttctatacaattagtggtttgaggcagcctatttactgtttcatgccttcttgcctcttgttctcttctctagtcaggtttaaggctattttaataaaatttggcacagattaggcattgcttcagttaacttctgagagtagataaaataccatcattttcttttttttttctttttttgagatggggtctcgctctgtcacccaggctggagtgcagtggcacgatctctgctcattgcaagctccgcctcctgggttcacgccattctcctgccttagcctcctgagtagctgccactacaggcgcccgccaccacaccccggctaattttttgtatttttagtagagatggggtttcatcgcgttagccaggatggtctccatctcctgaccttgtgattcgcccac

SEQ ID NO: 4774 - DNA, 1176 bp, Homo sapiens
gctctgcgtgccaggcaacagtgggcagacaaagggctccctggctactgggaagatacagaaccatcctgtgaaaatcatttcagcactggagaccttctttgctattacttctttcattaacaatgacctctaatttaaattgggccctgctggtttgttgatgaattgagcaactgagaacgtggcgggcactaaactgacagttccttccttcatggagcctgcttcatgtggaggaaacaggaaataaagcaaaagaagagggtcaggcttggtggctcatgcctataatcctggcattttaggaggctgaggttggagaatcgcttgaggccagaagtgcaagaccagcctgcgcaaacagcaagaccctgtctacaaaaaaaaaaaaaagtaatctttatgcctcagcctcccaggtagctgagactacccacaccttggtcccagctacttgggaggctgaggtgggaaaatcactttgcccaggaattcaaggccgcagtgagctatgattgcaccactgcactccaggcaacagagtgagaccctgtcttaaaaaaaagaagggagaaagtgtcagatggtgatgaggtctgggggggaaatagagaatggggatcaggagtgtggatggtgatattccctcaccaagaggtgacatgtgagcagggagctgggaggtgagggtgtgacccgtgtggaaatcagggaaaagcattccagcctgagggaacagccaatgcagaggccgtgaggtggccagtgccactgagcagtgagctgggataggggcaggtgaggaggctggagagcggggtcagacaaacaatatgcttattaaaacaagttgtacagcacctgcctcaagcctgagctgaagctgaaaattggcacttcaaagcaggaggaagcagagatggaggaaagccctccttccctaccagaatgagtccacctcagacagccagactttggacctctgcctttgttcctagatctctgttgctagatgaaggaaagggcctcaggggatccatcttcaaatcaagggctccctggctaccaaattctgtctagtaaaaattattcgagcagcgtgggcccgcctggcatcattttctgcagtttctcattctaattaaggcactgatgatttgctggtaaggcact

SEQ ID NO: 4775 - DNA, 2245 bp, Homo sapiens
tgtgttgtccaggctggagtgcagtggtgtgatctaggttcactgcaacctctgcctcctgggttcaagcgattctcccacctcagcctctggagtagctgggactacaggcgtgtgccaccttgcctagctaatttttgtatttttaatagagatggcgtttcaccatcttggcaaggctggtcgtgaactcctaacctcaagtgatccatccacctcagcctcccaaagtgttgggattacaggtgtgagccaccatgcccagcctaaaaatcccttcttttagctattttgaaataaacatgattctgtgattaccatgctatgtaatagatcaccagaacctattcttccgtctaactgaaactttgtacctttgaccaacatctcccctttccctatctaccctttaccccagtatcctctggtagccaccattgtactctctacttctatgagattaacatttctagattccatatacaagttaacatcatatgatatttggctttctgtgcctggcttatcatagttagcagaatgtcctctgtgtccatctgttgttgcaaataacaggatttcctgttttttaaagactgaatagtattccgttttatgtgtataccatattttaaaaatccgtgtcttggctgttgtggataatgctgtaaagaacgtggaagtgcagacatctctttgacatactgatttcaattcctttggatatgtatagccagaagtggaatggctggattgaatgataattctgttttcagttttttgaggaacctccatactgttttccataatggctgtactaatttacaataccaccaacagtgaacaggggttctcttttctccacatcccttgccaacacatactgtttttcatttttttaaataaccagtctaacaggtgtaaggtaataccttattgtggttttgatttgcatttctctgatgattagagatgttaagcatttttttcatgtacctgttgaccacttgtatgtcgtcttttgagaaatgtctattcaggtcctttccccattttaaaaatagggttacttgttttttattgagtagtttgaatttttttgtttgtttgtatattttggatattaaccccttatccaggccgggagtggtggctcacacctgtaatcccagcactttgtaaggtcttgttctttttttttttttttttttttttgagacagagcctccttctgtcgccaggctggagtgcagtggtgcgatctgtgctcactgcaacctctacctcctgggttcaagctattctgctgcctcagcctcccgagtagctgggactacaggcgcccgctaccatgcccggctaatttttatatttttagtagagacgggatttcactgtgttggccagaatggtattgatctcttgatctcatgatagacccacctcagcctcccaaagtgctgggattacaggcatgagccgccatgcctggcctactctatgccttttgattggggaatgtaatccatttacagagtaattattgataggtgaggacttaaccagtgccaattgttttctgtttatagatcctttgttctattcctcctctcttgcttgtgtgtgtgtgtatgttgtgtgtgtgtgtgtgtgtgtgtgtgtgtgtgtgtcttaatggctttctgtagtggtatgctttggattttatctttttatctcttgtctgtctgttacagacttttgctttgtggttaacttgaggcttacataaaacagcttatataacggtattttaagttgataacaacttaattttaattgcatacacaaactatacacttttacacccctttctcccatattttgtatttctgatgttatacttaaaatttttatataatatttattcccttaacaaattgttgcacttcagttgttaatagttttgccttttaacctttatactagagatataattgatttactcactgccattagagtattagaatgtttggatatgacaatgtatataccatgccctggcctggataaggggttaatatccaaaatatacaaaaaaagttttatactttaataaattttcatgttattaattagtgttctcttccttcagcttgaagaactccttttagcatttcctgtaatgcaggtctagtggtgataaagttagctattgattgaaaaagtctttatcatccatttggttttgaaatacagggttgct

SEQ ID NO: 4776 - DNA, 1166 bp, Homo sapiens
taactttagttacaaatacatttcctttcaaatacttacttagctcacaatccttaggctgggtctgcatggagccactggcttggatgttttgatccaaaccttttatctttctttctttttttttttttttttttttttttggcaactgtttattcaccaagaaagaaaatgttttgaaaggcaaataaacatttttatggttagacttttctatgcaatgtaaggcttgatttagtgaacgcatcttcctctattctgaataagaaatctaggagagaaacatgaatggcttaatgttaaacatgtattacttagtaatagttttgtgtgtttggacatctctcataagtttgctgtgaaggttaaatgagataatatatagaagacatgaagcataggataataaattctataaatgttagcataaaaaacgagtgtcagcttcctgttaaatacgggtagtacacatgcttcaaactctgaaaactccactaaataacaaaataattttaagtgtataaacttacaagatgtagaaaatgggagaggactaaatagcaggtgagaactgtcaaaaaaaaaaaaatctgaaagcttaaagtgggtagacaggcttaatagacctgaggaaaatgaaactttggaacatggaaaagtttgggattgaaggttcctctgaagaaagaagtcttgtgtagactaaaaacaggaagattggtaaaaggcataattttatcccagtaccctatccaaaccatgtaggccattagctacccctgtgccattctggcaaaatagtataactttactttgtggaaaggtgaaataaaatgatctccagtattagaaatcctagacacaagtccaccagcattcatttaatagacatttcaggaaaacaaacaaaacaaaaaacagacaatagaaattttcaaaatagtccaagaacatttttcaaatgtaaaggacaagaacatacaggttgaagtattgttatgagtatttagaaaaatatttcaagatagaccttcaaagaagcatcacgaattttcagaacttgaagtataaaaagaacaatagtaaaagtttctcagactaggggaaaagtcacacaaaggcttaggaatcataatgtaatcgacttgtcaacagcaacattttaa

SEQ ID NO: 4777 - DNA, 1150 bp, Homo sapiens
atactaaaaatggcttttgagaaaaatacttcctctgcttgtattttgcgatgaagatgtgatacatctttaaatgaaaatataccaaaatttagtaggcatgtttttctaataaatttatatatttgtaaagaaaacaacagaaatctttatgcaatttgtgaattttgtatattagggaggaaaagcttcctatatttttatatttacctttaattagtttgtatctcaagtaccctcttgaggtaggaaatgctctgtgatggtaaataaaattggagcagacagaaaagatatagcaaatgaagaaatattttaaggaaacctatttgaaaaaaaaagcaaagaccatttgataaaagcctgagttgtcaccattatgtcttaagctgttagtcttaaagattattgttaaaaaattcagaagaaaagagagacaagtgctcttctctctatctatgcttaatgcctttatgtaagttacttagttgtttgcgtgtgcctgtgcaagtgtgtttgtgtgtggttgtgtggacattatgtgatttactatataaggaggtcagagatggactgtggccaggcttccacattcctgaagcacacagatctcaggaaaggttatttttgcacttcatatttgtttactttctcctaactcacaagttaaaatcataacttaatttcattaacttttatcatttaactctctcatgtttgttgtaacctgaggtatccaaatgctacagaaaaatttatgacccaaatacaaatctcaatttgactgggacagaatgaggaatggagatttttgtatttatctttgggactttatgccttactttttaggctatagaatagttaagaaattttaaacaaaatttagtatcttttggtctttcacaccattcatatgttaagtggcagaatagccttagtgctacctccacttttttctccagtatttgcatcacagaaataatccctctgtttaacatgtttgttcagagccaagggtttattgtgaagaactgtcatcctgcctttgctagctggtaccttctagtaatcaaaattaatatgaagaaactaggttgtgacagactagattatatttagtaggggaaaaattgggctcaagaaccattca

SEQ ID NO: 4778 - DNA, 1099 bp, Homo sapiens
tttgaaagacataatctgtgtaatatggagaaatctattaagatttttcaggtttcatatgtcaataaaatattgcttgaagtctatgcaagctacttctgttctagggaaactgtcagcaagatactaacttttccaaaaaccagtggtaagatttaatattcacttcccttccccacattgttttctcttggaaaaggtatactaaggttttgtgtcaggtggtggtcattgaaaagtcttatataatgtaagtaatgttcatgaacttgtctgaatgttattattttaattattcaggacgttttctgtataaggttatgagctctatcttccttatgtaggccgtttagcttaactgtattaaggtaaaaggtctgtatctaatttaaaacttaaaaccaaaaaatttttccaaaatacagttagtacttgtaaggaggccatgagtaggcgatgcatataatttagtgctggaaaaataattccatatatgctttaattgaaaggatattgagcttatgacccttgcatataaaagacaacattataaactccattacatcttctgtatctcaaacattatgtcagtcattcatctgcatgtgaacatcacccacgaaattatagagttcagcttcatctagcatttgttatagtacataagaatatatagtgcagtattctaatgttacattagatctcaaataatcatggctgcagtcaagaggatagcacacaatatggtactttaaattatttcccattgaaaagcaaaaattaatgactaacagatattaaagttaaatttctgaatagaaagaacccaaggcttgtcattttaatttttattgttaatgtttgttttttttttttttttttttttttttttttttttttttgctagtgatccaggatgctcttgcgtagtgattcttaaatttgggactgtgtgagaatcaagtttctaaaccctcttcaacctactgaattagaatccatgggcacggggctaggaaatttctaatttttaaaatctccctagctgattctgatatattctaaaatttgagaacaaccagtcttgggaaaatattac

SEQ ID NO: 4779 - DNA, 1128 bp, Homo sapiens
ttaaggttgcccttggttttggtgtaagaatgtgagtttagtggttcagttccatttttgccttccacatgaaggtgccattagggtctttatgaaaatgtgcaacacaatttattcttaagccccaagggtcatcttatctttgattatctggcctagcttggagatgaccagggaaaggagggaatgtatagatccccaaatatggaaaagctcttcccccctccttactcttttttctaggcatgaactcaacagaatccaactcttctgcctctgttagaccaaaggtactgagtagcatccaggaagggacagtccctgacaacacaagctcagcaagggggaaggaagacgtgaacaagaccctcccaaaccttcaggtagtcaaccaccagcaaggcccccaccacagacacatcctgaagctgctgccgtccatggaggccactgggggcgagaagtccagcacgcccatcaagggccccaagaggggacatcctagacagaacctacacaagcattttgacatcaatgagcatttgccctggatgattgtgcttttcctgctgctggtgcttgtggtgattgtggtgtgcagtatccggaaaagctcgaggactctgaaaaaggggccccggcaggatcccagtgccattgtggaaaaggcagggctgaagaaatccatgactccaacccagaaccgggagaaatggatctactactgcaatggccatggtgagccttctctcttctctccttgctcacagatctctctaccactttttccctagtccctgttttctgaaggaatgggaatgcgtagtttgtggaatctcctttgtagaccaaacactacttgatctagtcgtgttatagaaaaagagattgaccgtctcattagaagtaatgcattcagagagaataatctctcttcctccttttcccctggtacctttaaaacagaagaatgttgtggaatcagagacctgattgactcctagggactttgtttgaccttgtcatttaacaaatgagaaatttgagtttagagaggtttggcaacattgatccaaacaagaggctagttgtttttgaggacagatgggacgagactcctgactgttg

SEQ ID NO: 4780 - DNA, 1235 bp, Homo sapiens
aggcaaaggtcaggcagtgaaaccaaagcatcacagccagtagatcaagctgtagggtgggatccaagtcttcgtttctctcgttctactgtgttgcagcatgctgtcaagaggatgcagtcctggtcggatctttaacaggaatgatgatggtggtgctggaattgttggccctttttctgctctgctcctatgtaacatcttcttggtttttgttcctttccctccccttctgtttctttcagcttggattccttagcaccaccacagctcagccagaacagaaggcctcgaatctcattggcacataccgccatgttgaccgtgccaccggccaggtgctaacctgtgacaagtgtccagcaggaacctatgtctctgagcattgtaccaacacaagcctgcgcgtctgcagcagttgccctgtggggacctttaccaggcatgagaatggcatagagaaatgccatgactgtagtcagccatgcccatggccaatgattgagaaattaccttgtgctgccttgactgaccgagaatgcacttgcccacctggcatgttccagtctaacgctacctgtgccccccatacggtgtgtcctgtgggttggggtgtgcggaagaaagggacagagactgaggatgtgcggtgtaagcagtgtgctcggggtaccttctcagatgtgccttctagtgtgatgaaatgcaaagcatacacagactgtctgagtcagaacctggtggtgatcaagccggggaccaaggagacagacaacgtctgtggcacactcccgtccttctccagctccacctcaccttcccctggcacagccatctttccacgccctgagcacatggaaacccatgaagtcccttcctccacttatgttcccaaaggtaacttaacctcatgaattatttatttgaggaaggctttgagcccagtggaggtaccaagagtgggcttataccaaagatgttttctccatttcgtgtattccaaagtcaccccttggagagaggccttcatatggtggctaattaaatctggcttttttggacttaatagaaacatgtagactcagaatttttctgttaggggagatcagatatctaaaaactaggtcacatcaagctataaaatatgaaccaagagaaacaaggacagcgtgtgaccttatgtaagttacttaacctcttcaggcctcagtttcaaacttgtcaaacaaatgaat

SEQ ID NO: 4781 - DNA, 1152 bp, Homo sapiens
ttagtagtagaagatgactggattttcatgtgcttttgtattctgcctgcggtgatagcctgtgttgtgtgacctttggaaaactccattgtgcacttatgggaaaacaagagtaaaaagacaaataatgactaagtattatcacaagaataattttgacttcacagacccctgaagggtcttgggaacctccaagagtcctgggattactctttaaaaccttgatctagggcaacaggcaaaaggcagcatatgtgggttcagattctggtaggtgggtagatattgggaggccttgtgattgtttcgtgatagtagtgcagtagaaacagtgaggatagagggagatgttggaggtttcaagagagaggagaagttatgaaatgctctattttattgaatatataaatatcaataaaatgaatatgaaataaaatctaaaacagcatattttagctactactaagaaagaaaaaattgccaaatataatccatatcattaattgaaaatgcatgttaattccacagatgttaaaatgtaaaaaaaaaaattgtctcatttcatggacacatctttaaaaaaaaatgcctcaggacttaaacaaatatgatagctctccaggaaagtgggaggttgaacggactagagaagcgtagtttggtggttggacagcattaaaggcccacttcatattcatagtcatatatttaattcaagtacttcccgaaagtttttttctgtaattgtcacttgtttatgcaaataccagcagacactggaaagcttcttgcttcagcataccactaattaaatcatctttaaaatttttttaaatttagtaatttaagttttttaaaatgtagtaatgaggaaaagataccactgtgactcttagaatatgatatcaataaaaataaggagaaattcaaattttaggttgccatatggatatggtttgtttggccccagcaagctatggttttagatatggtttgtttggccccatgaagccttatgttgaaatctgatccccattgttggagatgggcctcatggaaggtgtctggatcctgagggcagatccatcataaatagcttggtgccattctcataggaatgagttctcacttgtagttcccatgagaactgtt

SEQ ID NO: 4782 - DNA, 1224 bp, Homo sapiens
gctaatttttgtatatctagtagaggcggggtttcactatgttggccaggctggtcttgaactcctgacctcatgatccgcctgccttggcctcccaaagtgctgggattacaggcttgagccaccacgcctggccccttcaggcttcttttgtggctaaatctgctctcctgaatgaagttaaggttatctgtcatctggaagctttacactatttcctaaggccatgattccaccgtttcttttcattccacagagcattttttaggggttgggggacagagaagaaaagatcacttctaactctgggcttccattctcaggtaaccacctgctgttccaacaagtgcccatggttgaaattgacgggatgaagttggtacagacccgaagcattctccactacatagcagacaagcacaatctctttggcaagaacctcaaggagagaaccctgtactgtggcccctctcgagtgttgtcacttgtcagcttactgatgccttagctgattagcaacctctgtagcacaccacatttactttatgtcttacatagttagtgagatcagggaacaaaaacccaagaaggtcacgaagaccagttggaacttcagtagagagagtctgagtaaaacaaaagaataggattcagatattgaatattatatctagggtgtcattgtttcagatttcaacatttttaaatgctttgatactgctttttccctttcttgcacattcactattgttaagtattaggaatgaggagctgctgtgacattcaaggcctgggagagtgagcattagattataatttgaaatcaaagcctggtccttgcaccccttagatgtatgaccctgggcaacgtgggtataagaatagtacatttctcatagtgtcatgtgatttaatgagataatggatagagagtgtttagcaccatgcctggtacactctaagcactcaataagtggtattcactatttttataaagttgaagtttgacccatacgaagagaccaaaacatggatgctggggtaaaagtggaggagtaggatgccaggagagagagcactcatgactgtcaagctgtctgatctgtgacagatttttctgagttacaactagaattgaccttatatctttgctcttaagagacaggtataggtaaatgcttctagggacttaagttgcagcatctttaaaaaaaaaaaaaaaag

SEQ ID NO: 4783 - DNA, 1125 bp, Homo sapiens
aatccacacattatagtttctcccatattcttttcaacttgtggttttactagctattgatcatcatcattgttagggattacaaaatggcaattctttcaatttccatcatttcacctatgtttatgaactgtgattctcttctaagagagtacttgtcactcattaactatttaattactttaaaatatgcttcatataggaaaggcgaggtaaatgcttgattataaattttcacaataatgcgttgttgccctagcaacctccaaagatgcaaatgtgagttgttgggttatgcgttttgtgtttgttctttgtttttattttttgcctatgacaacttgccacatggtgttttacaattttctaaatgagttgacatcattttcatatgcaaattctgatttctgacttgtctttagaaattggaagatgtggtgatcctgagctcattttcacagggcagcaattgttggatctgaataaggactgccccacctcgccctcttgtttcagggtgtgtttgctaactgttaagaggaaagtgaaaaacattcatggtcccctgaacctgctcaacttcacttgtgtctgtcatttttctaacccccataggcttctgagtttgtaattcttgatttatttcataggttttgaatggatgtcttatatatgtatgcaatataaccctttgtcaaatcttctctcttcattctaccctgcccctcctactcacctatgagtcaacatttttagttacagtaataaaaactcaaccctaaataagttaaacaaaaaaagaacatgagtcatctgacccacctaccccagtccaatcacaggaacaggctgatcaggtagagtaatgagcccactcctcagaccagactggatgaagctagattggtctctctcccagggtgaccacatggtttacaaggtggtggggaggggccctccccgtctctttgccagctaagtttgtgctcacatagatctgagacagtcgggagggaccagctggcagccaccagacaagtccatgattctcaatatcccacgattgggttgaacctaaagttgaagcacacacatctgagtaactaggtcactaaaacctactga

SEQ ID NO: 4784 - DNA, 1445 bp, Homo sapiens
ggagcaggaggacaaaggacaagaggaagaaaagacaagagaaggactgaactgggggagtgagggaagaatgcgagagtgagactcagagagtaaaggggagggaaaaaaaagaagagagaaagggcgaggaagggggcgaccgcaggagggagacagacctggagtccactcggaggcctggagccgcacaaagcgccaggtcagcggtcccggctgggtgagaccagcaggcggctctagcgcgcgggagctgggcgaggctccgggacgacctcaccaatggagactgcagtatttagcatgccccacccatctgcaaggcattctggatagtgtcaaaacagccggaaatcaagtccgtttatctcaaactttagcattttgggaataaatgatatttgctatgctggttaaattagattttagttaaatttcctgctgaagctctagtacgataagcaacttgacctaagtgtaaagttgagacttccttcaggtttatatagcttgtgcgccgcttgggtacctcggatgtgagggcgatctggctgcgacatctgtcaccccattgatcgccagggttgattcggctgatctggctggctaggcgggtgtccccttcctccctcaccgctccatgtgcgtccctcccgaagctgcgcgctcggtcgaagaggacgaccatccccgatagaggaggaccggtcttcggtcaagggtatacgagtagctgcgctcccctgctagaacctccaaacaagctctcaaggtccatttgtaggagaacgtagggtagtcaagcttccaagactccagacacatccaaatgaggcgctgcatgtggcagtctgcctttcttttgacccattacccatctaagttagatgcttttttaaatgttttttaatttttaaatttttaatttttttcattatttattttttatttttgagacggatctcggctcactgtaacctccacctcccgggttcaagcgattctcctgactcagcctcccgagtagctgggattacaggcgcgcgccaccatgcccggctaatttttctatttttagtaaagacggggtttcgccatgttgaccagggtggtcttgaactcctgacgtcaggtgatcctcctgcctcgtgctgggattgcaggcgtgagccaccgctcccggcccttagatgctttttaatcagcaagtacgcaatgctttcctgacaggaatgtcaagtccgtcaggaaatccacataagggtgttaagcaggcaaagtaccacatacagattaaaatcaaaagcactgtcaacgcttatttaatttatacagtagaccctaacttttctaattttgtgtatacatatatatacatgtatacatgtatacaaacatacatattttcttctttctttcttcatctcagtgggacatcttgagat

SEQ ID NO: 4785 - DNA, 1217 bp, Homo sapiens
ttttattccctagagaccctgaaatatggcgtctggcctgcttgaaagtttggggcagaagctgtattaaacttgttccgtacacgtcctggagagagatgtttttagaacggcctcgtgttcggtttgatggtaagttggattctgtagaactcagcagaaatactgatctataatgctgatttttataaatacgccgtttaaattttctgtgatgaatgtgagtactgtaagcatgtttaaaggaaaccacagtaaatataatgctgggaatatctgaatattataatttttaactttttaaaattattttcataggcgtgtatatcagtaaaaccacatatattcgtcaaggggaacagtctcttgatggtttctatagagcctggcaccaagtggaatattacaggtacaactgtagtacactgagtgagtggaaaattctctctctccatgtattagttaaatggacatctgttctttgttgcttttgattgacccgcaaaatggccctcagtatttttatctagtactcaatgtaggaattgcactaaaaaaaaaaataggctaatataaattacagaatttcttctggcctcttttagatttcttcttgtcttttgccctgggtgtatttacttgccttttcaaatagcttgtgcttttattccaccttattgcttgccaaatattattgtcatttagaaaaaaatagacatgttaaccgttgtgtgtggctctcactttgtttgaaattgttgctttgggaaaaacacagaactttaataaaacaatatttgacttttattcagtgagtaaaacttaaaagttcaacagtttcccctgaggaagataaaatatctttggttctttgttgctggactaacaggtagtcagtaatatttgttttaatgttttagcagttctttagcccgtggtatttcagtgttggtttcatagctatgaataggcataggtactaatagataaggacatattttatactttgtgtggggggtgtgttttggtcttccttttcttattacataggtacataagattctttcctgatggccatgtgatgatgttgacaacccctgaagagcctcagtccattgttccacgtttaagaactaggaataccaggtagcatttgttttttaaatggctttccatccagtctatgttttatatggttccttgcaggttaaagtaat

SEQ ID NO: 4786 - DNA, 1201 bp, Homo sapiens
tccctgaagcctagagaagaaagggcttccagaaggatggagtggtcaacttgccaaatcccacagagaggtaaggtaaggacagagaatggaccattggctttggcaagatataggtaggtcactgatgacctcagtaggagctgtttagtagagggatgccatggaaagcctcgtaagagtggactgaggatgtgaataaatcaactacagtcaactcttttgagatggagtccagtttcatgcctagactgaaattcaagattcataatgaagaattcacttttatcaagcattgacaggagttagacacatctcaaaccatattttaaaatacagccagattacaatgttacctgattctgagactgcctgtaacttgattcataatagtgacagacagcacttggactaggacactagagctgctgagaaggaaaattgcacccagcttctttgcttcctgcaaagatgcaccaggatcagagaagaaaagaccaagttctataattacctggcaggggagataccatgaacacaaagatggttttcccagggtgagtctcatccattgccctccggatgtgctgacccctgcgatttccccaaatgtgggaaagtcgactgcataatttgtgttaatgggggactgtgtccacgctttccgccggaaaaaaaaaagaagaaaagaaaaaaaaaaagaaaagacaagacaagaccaagttctgagagtgcttgaagaagcggtactaggagaagactgcactgccctaaaacctttgaccagagattctgggaaggcttggacagtgacaggcatgctggaccctgcagctgttgacaagggagaaatcttaattatattgggtgaaattctcctatagagaaaagaagataaaactatatgtttttgaccagaaatgcccaagagagctctgctaccctcaagaatctattcttcctgaaaatgtgaagataatggcttagatctggaaaccaaagatagtctcagatgtggctgtgaattttagtgggtgggcaatgtggggtggagtggggatagagggctgttgtggaaaaggcagcccagcctgctcagaggtgtgtatatagacccacattgctggcaagcaactcatctcactaccacacaatgtttttttgttttttgtttttgttttttttaagacagagtccactc

SEQ ID NO: 4787 - DNA, 1104 bp, Homo sapiens
cagtcagtttaactttttaacagatcttatttttttattttgagtgccactattaatgtaaaaaggggggggctctacagcagtcgtgatgaaacttaaatatatattctttgtcctcgagattttaggaagggtgtagggtgagtaggccatttttaatttctgaagtgctaagtgtttttatacagcaaacaaaaagtcaattttgctttccaccagtgcgagagaggatgtatacttttcaagagagatgattgcctatttaccgtttgacagagtcccgtagatgagcaatggggaactggttgccagggtctaaatttggattgatttatgcactgttatctgttttgacacagatttccttgtaaaatgtgcctagtttaccaaaattaacaaagggggggaaaggaccttagaactttttaaggtaaaatcaaatatagctacagcataagagaatcgagaaatttgatagaggtaacttgtttaatgtaaatctaatagtacttgtaatttctttctgcttagaatctaaagatgtgtttagaacctcttgtttaaaaataatagactgcttatcataaaatcacatctcacacatttgaggcagtggtcaaacaggtaaagcctatgatgtgtgtcattttaaagtgtcggaatttagcctctgaataccttctccattgggggaaagatattcttggaaccactcatgacatatcttagaaggtcattgacaatgtataaactaattgttggtttgatatttatgtaaatatcagtttaccatgctttaattttgcacattcgtactatagggagcctattggttctctattagtcttgtgggttttctgtttgaaaaggagtcatggcatctgtttacatttaccttatcaaacctagaatgtgtatatttataaatgtatgtcttcattgctaggtactaatttgcagatgtctttacatatttcaatacagaaactataacattcaatagtgtgctgtcaaagtgtgcttagctcacctggatatacctacattgttaaatgtctaaacagtaatcattaaaacatttttgattacctgtgcctgcatttt

SEQ ID NO: 4788 - DNA, 1147 bp, Homo sapiens
gcctggtttgttgaaaaaagactccagagcttggagctagcagaacttaattggatacttttgttattcttgcctagcaaaatataattctgattctctctgctataatagttctgtttattcttaatcttttaaaaatcattatctctgatatttattagaaggaaataaaatgcaatattgataaaaatgactaatgtgctgttttttacgataactctaaaatatttgaatcattcattgctaatcataaaacgtattagacaatccaaaaacctccaagattgagtgctctatgttgactgtgatggtaaccttattttcatgcctacttgcttaaagtttgtctccttttcactgctatcctgcctactatcgatactttgggtaaattttaagtgaaaagtaaaagaaaatttgtgaccacacgggaaaataagcatgtaaaatagtgatttgtgctcagattgcattattttgtgaaacaaataaataagtggaaacaattggcactttgcaggtggctcagcgagcagcccagctgcaggaggccttgctgcactgtgggaggttccaggatgccctggagtccctgctcagctggatggtggacactgaggagcttgtggccaatcagaagcccccgtcggctgagttcaaagtggtaaaggcccagatacaagaacaaaaggtaagttagtcatgcttttgtattgcgtttcatattaaatcttaataacaagagaaaaaatgcaaattgtgactcttttaattaataggataacctagttaaccggttgttgctgctgtagacattattttgttagtcattcgacaaatatttattgaacatctaccatgggccaggccttgttccagttgctgggaatatatccttgaataaaaaagatgaacatttctcattgagttcaaagccaagtgggaagggtgtgccaggattgaaagacaataagtaaagtaaataaatgaatggtgataagttagcaagtgatgaataaagcagggatcggggagaggcatcaggaagcaatagagcaaagatgagggacctaaagtgctggaatggagggagggagggggtgtgtgtaattttaaatagggtcatgaagggaggtcactgacaaga

SEQ ID NO: 4789 - DNA, 1198 bp, Homo sapiens
tctctaaaaatttttagtagtaattatttaccaaacttaaaaacatttctataaatataaagcttttctttatatttaagacaaaatataaaggctagaatttggttccttctctgtaacactaaatattttagtgtgaaattgaatttttttattactatagtcttttcaatctataatttgtgtttttaatttcttgatatgtcacttctgttcctccctgcttgcattttttaaaaactagacattgtggcttgagaatttatcaatcatctttccgaaatgaccacattgtgcttttagtttgtatgtttaagtggtcaagcaaggctctaggaggtagtcactgagctggaccttaaacacatctgcaggagctcacaaaatgggagcaaaagaggcattccagaaagaagagtagttaagcagatgtgggggcagggcaagaggagacagcaccttgttgccagagattctacacaaaggtgtgatggacactgatgctctattaagaagcttttgtggtgtgtgtggtagagaataattaaggcttctgataagacaggaaagggatatttcatcatgactgttaagaaaaggtaactgggttgtttaatgttttaattgataattgtcactgatcgtatttctacttgttaaataattaaaaatcatcttaaaattcatactttgactttaatttagacacaaggagatgtaatcgctgtgtaacatcagagaaagctatatggattatcgtcagaagtaaatgtttctaacattgacaaagatgcttatcttttcattacatcattcactcattaattcattcaatcacaaaatattgagtacccaccatgtgccagcaactgttctaagcacttggaatataccagtaagcaaaacaaagcccttacccctctgtggagcacatattggtggagaggaggggattgtacaatgttagtaagcaaggcaataaaactgcatatctgatggtgatacgtgtaacgacggaaaataaagaagggaagggaataaatagtgcagggacagggagttggggggaggcttgctatttttaatagggttgtcagaaaagatctcactgataggtaaacttgagcaaagacctgaagaaggtgagggaatgaggatgaaaatacatatcgggaagagagttccaggtggaggaggt

SEQ ID NO: 4790 - DNA, 1334 bp, Homo sapiens
acattgtgcaatgcattaagaaacccatccagctgtcatggtatgttacaaggttttcagcagactttgctcctaatggctctctgaaagtgacagacttaaatattgctctgcagtgcttttcagaatgtagagtgagacctctggtggaaaaattattgccctgtggactcctttaattttttttacattagacgaagcttctcctgtttgtaaaggaatgctataagaaatttcaaacacaggttttgcggaattttaaatgctggaaaacataaatgaaatgcctaaatatattgttacagattttaatactgtggatcaaggaaagatagcaagcattcttttcctgaaattggtcatgtagcttttctgcgaaatagtattgaatctgaatactttcacaaaataatactgaaaggtaaaccctaaatcttgccagactgcattagtattttggcattgaaacttgtgcaatatctgtgtaatgtagaatgtggggtgtgcatgcagatgtctggtactggagtaagctgaaggtatgtgcagtatttaagaaaatgtacattctaattaattcacttataaaaccatttacatattgtgtatatgtttttattttcaaatgataaactctagacatatattttgcaaaatgagcttgggtttaaaaagtgctttgtgccaaaaatatcatacctaatttttatagtgctttactatcagaatttatattgtttattatatcttttaaaagcagtaagcagttttcatctgacagcgtagataaaagaggagtataggaatttgaatgctagagcatctcccaggtgagccttattgcagatctttttgatatagtcacccataagcatggtgagctcctgctctcataaggtcagccaaagccccttaagaaggtacacagcacatctgcagtcattcaggaggtcctgtgaagtgtggtgatgcatctaacaccttttgctgctcactgagaacccagctttgaacttacaagattacactaaccatttttaaagtgcacaaaaatattattattagtcttaactaaaattacatattttataatgccctgcaactctaaaccatccttttgtttacacatttttgtatggtattttaagattatcaatcacttcaacatttctataaccttgtttgtatagcactttctcaagagctgtcagtcccacatacagaatcatttcttttacaaaatgatttaatatgtaatcatgtgtcaggacataaattttgtcacttgggacagtagctttccagctaagataattgcgtgaactctgttaaaa

SEQ ID NO: 4791 - DNA, 1225 bp, Homo sapiens
aggcaacgcgctgagggactaggcagagccgtggaaccgccgccaggtcgctgtcggtccacgccgcccgtcgcgctgcccgcccgctcggcgtcggccgccgccatgggagtgcacgtggaaaccatctccccaggagactggcgcaccttcccgaagcgcagccagacctgcgtgatgcactacaccgggatgcttgaagatggaaagaaatttgattcctcccgggacagaaacaagccctttaagtttatgctaggcaagcaggaggtgatccgaggctgggaagaaggggttgtccagatgagtgtgggtcagagagccaaactgactatatctccagattatgcctatggtgccactgggcacccaggcatcatcccaccacatgccactctcgtcttcgatgtggagcttctaaaactggaatgacaggaatggcctcctcccttagctccctgttcttggatctgccatggagggatctggtgcctccagacgtgtgcacataaatccatatggagcttttcctgatgttccactccactttgtatagacatctgccccaactgaatgtgttctgtcactcagctttgcttccgacacctctgtttcctcttcccctttctcctggtatgtgcgtttacctaaactatatgccataaacgtcaagttattcattttactttttcattttggggtgaagattcagtttcagtcttttgaatataggtttccaattaagtacatggtcaagtgttaacagcacaagtgataagttaacgttaggataggaattggtgttgagggggttgcaagaatattttattttaattttttggatgaaatttttatctattatatattaaacattcttgctgctgcgctgcaaaaccatagcagatttgaggcactgttgaggactgaattattctccaagttgagagatgtccttgggttaaattaaaagccctacctaaaactgaggtggggatggggagaggctttgcctccaccattcccaccccaccctccccttaaaccctctgcctttgaaagcaggtcatgttcactgcgatgctggacactacaggtatctgtccctgggccagcagggacctctgaagccttctttgtggccttatttttttttttttttttttcatcctgtggtttttctaacggactttcaggaattttgtaatctcataactttccaagctcc

SEQ ID NO: 4792 - DNA, 1213 bp, Homo sapiens
ttttacgtgtttccatgtatctcactttgtgctgtattaaaaaaacctccattttgaaaatctacgttgtacagaagcacatgtctttaatgtcttcagacaaaaaagccttacattaatttaatgtttgcactctgaggtgcaacttaacagggagggcctgagaaaagaatgggagggggctattaattatttttagcaaaatgttgcctttgtcttgtgcaaacatgtagaatatgctctttaatttagtaaaatatttttttaaaaggtagagatgctttgttattgtaatcataaacttcctgaaattcttgtaatttttttcccatacttatcagaagtgtgtttaccaacttatttttgtttgaaagtgtgattttttttttccttcccaacctctcttgcaaaaaaagaaatgggtttctgctaatgaattgagcagacatctaatattttatatgccttttgagctgtgtaacttaatatttggatacttgacaatttgttttattatgtaattgataaaatggtgatgtgtattaatgttagttcaaccatatatttatactgtctggggatgtgtggttatagttctgtgggagaaataattttgtcagtgttcaccagcttgtaaaaacttagtgcgagagctgaaacatctaaataaataatgacatgcatttatcatcattgagattggtttgcttaaaattaacttattttgtagaagacaaaatgaattgcacttcacttaatgtgtgtcctcatctttttacaaataaatgaaggattataaatgatgtcagcattttagtaaacttttagacaaaatttgttagggtcattcatgaaaactttaatactaaaagcactttccattatatactttttaaaggtctagataattttgaaccaatttattattgtgtactgaggagaaataatgtatagtagaggacagccttggtttgtaaagctcagttccactagttcatggttttgtgcaacttctgagcctcagttttctcctttgcaaattaataattacatacctttatagattttgaaattaatttaaatattagtatttggtacatgaaggcttaatgttaagtttcctttaatgatccacaataatccctttgatcacgttaatctaaatctagatgtctttgtctaattttttttgaatagcagttataaatgtaaa

SEQ ID NO: 4793 - DNA, 1103 bp, Homo sapiens
taactggataaacaaactgttgtccattcatacagtggaatgttatttagcaataaaaagaaatgatcagtgaagccatgaaaagacatagaggaaacttgaaagcatattgcaggctgaaagaagccaacctgaaaaatctacatatatgtatgatttcaactatacgacattctggaaaaagaaaaactatggtgacagtaaaaagatccgggttgtcaggggctctgggggacagagggagggacaggtaggtagagcacaggggatttggggggcagtagaagtattctgtatgatactgtaatggtatatatatgtcattatatatttttcaagccccatgtaccacaccaagagtgaaccttaatgtaaataatggactttaatattgatatattaatattggttcatcagttgaaacaaatgtaccacagtaacacaagatgtaaataagaggggaagctggatgtgtaggggtggggaagagggcaatatggaaactcttcgtactttctgatcagtttttctgtaaacctaaaactgctgtaaaaaaaaaataaagtaactttttaaaaaattgcctacttattcaaacatttcaattatcttggtgtctctttctattggctgattttatctcgattgtagattatattttcctgatgctttgcctgtctagtgcttgttcctcagtgcttgaaaaagtcacttcatgtattttaaccagttttacagttgtttgcagaaggaagagggtaagttctcctctcatggtctcagttgacattaaaatagaagttttcagccccggctgtacatttgaatttcttgggaacttagatcagtgctgaatgaggtccagacctagggaactttttaaaagttgtgcaagtgattaacagggttagggtatccctgagtaactgtgctagaaagagtgggaactgaaatttggcctgtcctccttggagtctagttgcatctgcctgtagaaggagcatgtttttgaaatttatactttaaagctgccatatggattagcaggatcctagattctaatgtggacccattaccttccagtaaggaaaccagagtgtcag

SEQ ID NO: 4794 - DNA, 1233 bp, Homo sapiens
acatggaggaacgttcaatgcatattactaagtgaaagaagccaatctgaaaaggctatatgctgtatgattccaactatatgacattctggaaacagcaaaactatagggatagttaaaacatcagtggttgccaggggttagggagaaggagggatgatgaggcagaacccggaggatttttagggcaatgaaactactccatgtgatactattattatgtgaatatgttatacatttgtcaaaacccatataatgtacaacaccaagattgaaccctaatgtaaaccatggactttgggtgataatgatgggtcagtgtaggttcgttgattgtaaccaatgttccagtttggtgggggatctcaatagtggagaaagctgtaccttgtgtggagccaccgggtatatgggagcgctatacttttgctcaattttgctgtggacctaaaagtgctcttgaaaatgaagtttattttaaataaaagaaaggaattatgaattaatatgagaattgcaaaaaggatataattgtgggggaattatagaaatcagctacgtaattccatggagtagctctgctgaaagtctaacgatatgctatgtccaaaggactgaagcaactatctggggtatgctatgggggccaacacagaagacatggaaaaaaatcttaaattttaccacatcctgttctatcaatgacctttccaccaactgcttattttggttttactctgcttcatctctattgcttctgaacttccttttcatttcataacagaaactctgagcctttgccgcctcactaaatttcattttaaaacctattctttcttagaaatgataatacagaaaccactttttacaaatacaacatttaaagaaaatcacagtcacctaaataatctgtttctgtatcagagaaggcagtggacctacagacggtctgttcagtcagctgaggatttaggactgaggaactgttaattcccacagcagctctactgactattcgatagtcccaggacctgaagtctttcagagtctgcttcatgcactataaatatataaaatgagaaaataaaattaattattgtgttttaagaatatttatagcactgtaagtttaggctattatattaattatctatctctgggtaacaagataccataaacttgctgcctcagaggcacataaatttattatctcacagattctcgaggtcagga

SEQ ID NO: 4795 - DNA, 1105 bp, Homo sapiens
gaccaaccttggcaacacagcaagatcctgtctctacaagaaataaaaatctagctggatgtggtggtgtgcacctgtggtcctagctacttgggaggctgaggtgggaggatcacctgagtcatggagcttgaggctgcagtgagctatgattgtaccactgcactccaccctgggtgacagagggagaccctgtctctggaaaaaaaacctaaacaactgatttaaaaaatgggcaaagaatttgaatagatacttctccaatgatataaaaatagctaacaagcacatgaaaagatgctcaacatccactaatcatcagagaaataaaatcaaagccacaatgagatatcacctcacatccactaggatggctactatcaaaaaacagaagatgacaactgttggtgagtatgtggagaaatgggcaatcttgtgcactgttgaagggactgtaaaatgatgcgatcacgatagaaaacagttcctcaaaaaattaaaattagaactactgccaggtgtggtggtgcgagcatgtagtctcagctactcgggaggctgaggcgggaggatcgcttgagcccaggagttctggactgtagtgctctacgctgattgggtctccacactaagttcagcatcaatatggtgacctcccaggagtgggggattaccaggttgcctaagaaggcgtgagccagcccaggtcagccaaaactcctgtgctgatcaatagtgggatctgtgcctgtgaaaagccactgcactccagcctgggaaacatagcgagatcctgtctctaaaaaaaaaaaactaagaaaaaaaaaaaaaaaacccacagagacctacaactaccacatgatgctgcaattccacttctgggtatacactcaaaaaaattgaaagcaggggccaggtgtggtgggtcatgcctgtaattccagcattttgggaggccgaggcaggtggtcaggagttcgagaccagcctagccaacatggtgaaaccccatctctactaaaaatacaaaaagtagctgggattactggtgggtgcctgtaatcccagctacttgggaggctgaggcacaagaatagctggaacc

SEQ ID NO: 4796 - DNA, 1102 bp, Homo sapiens
tctcaggttggtgggattaataattctaggtttctttatcccaaaaggcttgctttgtacactggttttgtcatttggagagttgacagggatatgtctttgctttctttaaaggctgactgtgctgtcctgattgttgctgctggtgttggtgaatttgaagctggtatctccaagaatgggcagacccgagagcatgcccttctggcttacacactgggtgtgaaacaactaattgtcggtgttaacaaaatggattccactgagccaccctacagccagaagagatatgaggaaattgttaaggaagtcagcacttacattaagaaaattggctacaaccccgacacagtagcatttgtgccaatttctggttggaatggtgacaacatgctggagccaagtgctaacgtaagtggctttcaagaccattgttaaaaagctctgggaatggcgatttcatgcttacacaaattggcatgcttgtgtttcagatgccttggttcaagggatggaaagtcacccgtaaggatggcaatgccagtggaaccacgctgcttgaggctctggactgcatcctaccaccaactcgtccaactgacaagcccttgcgcctgcctctccaggatgtctacaaaattggtggtaagttggctgtaaacaaagttgaatttgagttgatagagtactgtctgccttcataggtatttagtatgctgtaaatatttttaggtattggtactgttcctgttggccgagtggagactggtgttctcaaacccggtatggtggtcacctttgctccagtcaacgttacaacggaagtaaaatctgtcgaaatgcaccatgaagctttgagtgaagctcttcctggggacaatgtgggcttcaatgtcaagaatgtgtctgtcaaggatgttcgtcgtggcaacgttgctggtgacagcaaaaatgacccaccaatggaagcagctggcttcactgctcaggtaacaatttaaagtaacattaacttattgcagaggctaaagtcatttgagactttggatttgcactgaatgcaaatcttttttccaaggtgattatcctgaaccatccaggc

SEQ ID NO: 4797 - DNA, 1188 bp, Homo sapiens
aaccggtgcctagagaaggtggcgcggggtaaactgggaaagtgatgtcgtgtactggctccgcctttttcccgagggtgggggagaaccgtatataagtgcagtagtcgccgtgaacgttctttttcgcaacgggtttgccgccagaacacaggtaagtgccgtgtgtggttcccgcgggcctggcctctttacgggttatggcccttgcgtgccttgaattacttccacgcccctggctgcagtacgtgattcttgatcccgagcttcgggttggaagtgggtgggagagttcgaggccttgcgcttaaggagccccttcgcctcgtgcttgagttgaggcctggcttgggcgctggggccgccgcgtgcgaatctggtggcaccttcgcgcctgtctcgctgctttcgataagtctctagccatttaaaatttttgatgacctgctgcgacgctttttttctggcaagatagtcttgtaaatgcgggccaagatctgcacactggtatttcggtttttggggccgcgggcggcgacggggcccgtgcgtcccagcgcacatgttcggcgaggcggggcctgcgagcgcggccaccgagaatcggacgggggtagtctcaagctggccggcctgctctggtgcctggcctcgcgccgccgtgtatcgccccgccctgggcggcaaggctggcccggtcggcaccagttgcgtgagcggaaagatggccgcttcccggccctgctgcagggagctcaaaatggaggacgcggcgctcgggagagcgggcgggtgagtcacccacacaaaggaaaagggcctttccgtcctcagccgtcgcttcatgtgactccacggagtaccgggcgccgtccaggcacctcgattagttctcgagcttttggagtacgtcgtctttaggttggggggaggggttttatgcgatggagtttccccacactgagtgggtggagactgaagttaggccagcttggcacttgatgtaattctccttggaatttgccctttttgagtttggatcttggttcattctcaagcctcagacagtggttcaaagtttttttcttccatttcaggtgtcgtgaaaactacccctaaaagccaaaatgggaaaggaaaagactcatatcaacattgtcgtcattggacacgtagattcgggcaagt

SEQ ID NO: 4798 - DNA, 1128 bp, Homo sapiens
gccgggcctaatgttaatgttaaaatgctacttaactattgaaatgcaagtttttcaccagctgaatataaaatcccattgcaataagacattttatttagacataaaatttcacaagaacacaacctggagcagaatagctgtctattgaaagaagcagccaggcgctgtggctcatacttgaaatcccagcactttgggaggccgaggcaggcagatcacttgaggtcaggagctcgagagcagcctggccaacatggtgagacaccggctctactaaaaatacaaaactagcccagcatgatggtggatgcctgtagtccccgctactcaggaggctaaggcatgcttgaacccgggaggcagaggctgcagtgagctgagatcatcccactgccctcaagcctgggccacagagtgagactctgtctcaaaaaaaaaaaaaaaaaagaaggaaagaatgaagctgtttaaatgtgtatcacaataataaacgtctatgaaaatgtttctacaggtatgctggtatcctcctgggcatcacaaatacatttgccactattccaggaatggttgggcccgtcattgctaaaagtctgacccctgatgtaagtagataatttacttgtaaactggaaaggttttggagctgcacatctgtgtcaaagttcagtgtattttaattaagtttaaaattctaaatgttcttatgaaattctttttagcaacaaaaagctaaatgccttaatggatgggaaagtatattttcaaagaacagtttttggattttagacaaaacaattgaactaagtcaaatgaagacactgtagctgaaaccacacaagtagttaaaagttgtgatattggccgggtgcagtggctcatgcctgtaatcccagcactttgggaggccgaggcaggtggatcacgaggtcaggagttcaataccagcctcaccaacatggtgaaaccccgtctctactaaaaatacaaaaattagccggtgtggtggcaggtgcctgtagtcccagctactcaggaggctgaggcacaagaatcgctcaaacccaggaggcggaggttgcagtaagccaacatcaccactgcactccagtctggcaacagagc

SEQ ID NO: 4799 - DNA, 1146 bp, Homo sapiens
tacatttgattactttaaaattatatcactctttttttttacattcactttagggaaggcttgcatattttgaactctttttttctttggcatttaatcatccttagcatttctcaggcagtcttgggttaatatggaaataacctttgtatacgttcttaatcttatttttaaaaatttttgcattttatgttgacaaatatattattgtgccacactttctatattaaaactagattaaatatattttacatatatttatttaaaatttttccagcacctatcaaaatacttttttgtgttccaattaaggtagtcttaatgcaaacttacaacttttgaactggaatattaaatttatacacttagatcttagaatttatggttaagttcttttttgttttttatttttaggaacagcatatgccatatatgagctggctgtggcttcatttcccaagaagcaggagtgacttcagtcatcccagcaatcgcttggttcagtttcattcagctctctatggaccagtaatctgataaataaccgagctcttctttggggatcaatatttattgacttgtagtaactgccaccaataaagcagtctttaccatgctttgtctgattttatcactttatgccaataatttcaacttttggtcagccttgtaaatcttaggtaaggatcaaagaaatgattcttttgccactaaacttgtgaaagcaacattattgtgatgttattttagtgaaattttacttctaacagctcaaaattagtctcaacttctgtctcaacttgccgtttgaatgcatattgctttttccccctacccactccagtatatcttggaatatgctagaacccgggggtagtggaagcagattatctttggctcctggggtctatatttctttttttttttttttttctcagctatgtgagagtatgcttaaatattggatatatcccacagcttagaattaggctttagtagaatggctttgtaagatatttcagtatttgtttttttctacactccgagtgggttcaggtaggtttctctcatcaggaaccaaccaaagcaggacagttcctgggctccccagctatcatctaatggacccacaactgtttaacctaa

SEQ ID NO: 4800 - DNA, 1118 bp, Homo sapiens
cacttcttttgagtatacttttttattagttttggaagcacattcatattctaatcattcaaaattaaatcaacaaagataaaaagaattctaaaatgaactgcaaacagaaggaaaagaacccaactattattgtaagtgaataacaaccacaatgaaccagtaaagaaaatagctaaataaccactagacaataagactttgactaattagggaaatattaggaaaacaatttgactcaaattagggaaattaaactgaactaaactaaaaatctgtacctatatcttatctctgtccactaaacgacctaaaagtgatgatgatctagtagtaataagtatacctagctgccgaaattttggtttataaataccatttcccactataaaggattagacctccttggaaaaatggctcattccatgcctggggcagaaaaggtccaaggtgagcccagaatttattgttatgctgcaaaataagtagtgtaaaaaaaactgaaggggatgcaggagaaagattaacgagattcccactgaccaaatttggttcactttgaatatcaaatgaaatgtgttcaataataaattataactttttgtaaaaaatagtttattagctagatagattagataagtatctcttatagaaaaatgcagattgataaatatacgtggagtaatagagttggagaattattattttgcaattagcattttaaatatttcaagaatcatgaatcagtattaaatctaggggagcaaaatttgatggagattaggatatctgcataatttcattgtctacccatagattgcttattagttgcaaagcaaaaatagtagctattcagtgaggaaactagagaacattctgaccttgtgatcaaaattaacatcaccaataaagggtaggtagatgccgtgtgcctccaaatgggatattctgtaaagatcaaaatattttttacacagtatacctagaggtgggaatacattacttgaactgattatgaagagacatcagacaaaaccaaacaggaatattctataaaataattatccagggccgggtgcggtgcctcatgcctgttatcccaacactttgggaggccg

SEQ ID NO: 4801 - DNA, 1154 bp, Homo sapiens
taagacattgtatacaaggtgtagatactgatagattctggaaatgttagatgaaaagaaagccattccagggataaggagcagcgtgaggtaggaagttttaattaagggtaatataaattggagaagtcacagtagagatacagtgctataaatctgagttggggccacatcgtgggtggctttgaatatgaatctaaaatataagctctgagagcaaggggctgttgaaagtatattaacatgagaataacatgttttacactatgccttaaaaatgttaatttgactgcagtgtctaatttaattgacagagaagagacaaaaagcataaatagcagattgactgctacagttgaccaactaagagttgatgagggcttaatttatgaaagtgagaaagggacagatgcccagacatacttgaggatagagttcacagcccttgaccactaattgggtttataaggaggaggaaagggaaagaataatgaaaaaccaagattcccattactgtaagaatgatatgttgttaaagaaaaatagaaaaaggaacaaggatatctggggagtcactattaagtttagacgtggaattttaggtgttggtagaatgctcaggagaagggttaggacaaattgcaggaattttggaattcatttacacagataaaccacaagtatgtgaagcaaaaggtacagtgtcaagatgcgttaagaacaaaattttaggaaatacatttaaaaataaaagaaagagttggaagacaagaaatgtattagctgtttgaagactgaggaatggaagaagcacagcagatacctaagcaaagactgggagatgagacttgggtttggtgtaatgatatagtgaggccacactgaaagctctacatagagtggaggggtcagggttaaatgtgtgtgcataaattattggagtaagccaatggagaagaaagcaagccttcagcttcaacttttaccttaaaatatggttttacgaacaaatttttaaggaaaaaaattatcatggttctaatcttacatgttaacatttccttgttatgtagggatcagacttgttataacataattccactttataattcaatgaagaagaaagttttgtctgattctgaggtatgtaatat

SEQ ID NO: 4802 - DNA, 1177 bp, Homo sapiens
tatagtgggtagctttattttatgattgaaagatatttaaagcagcagttggaattttgcctttctctctgtaaggtttttggtaaattatgaaattcagcatagatgttaagtgttcttaaattttttaataacaaactatcagttcttaattcttaattattctggagatttactttacatcaaagacgcaaaacaaaatattttatacttggatgaatttttttattgttgctcaaagattttgaaaattaaaatgataaactgaaacctactatatttgtcttttacataataggtgaagtattacagacacttagcacctgatcacttgctgcaaatatgtcatcgactaggacctcttcttgaacaagaaattcctcaaagtgttcctggagtacaaactttattaggagctggaagacagtctttactacgcacaaataaaagtatgaaaattttctcataggatttagacattatttatctcacttttgtttttgtgttctttgtatgcataaaaatacatgtgtttaataggctgcaagcatgttgtgtggaaaggatctgctctggctgcgttgcactgtggaagaccacctgagtcaccagttaactatggtagcccacccagcattggtgagttgtttgagttcactagtagttaatagcctcttggtaaagagcttttgaaaatgaaaaggttttttagttactgtggtattagagaacttcatattatgtacatctgcattcaaaaagaaaaaaatagattttttttcttagtagtagttttaatagtgaaaaagtcatgtataatgagggattgtgcacattgcaccttatgtaggccaattagctcattggaattttatttttacgaaagttccatattaaggtatatattattaggtcgagttagtagaatcaatatataattcagattagttataatggtaggagacaaaagtagttatctttttaagagcacagtacttttttttttttttctttttttggctaaagtttcaaagagggagtactgatgcaagtatgtcttcttgagatgcctcctaggttcatgcctttcacatctgctactaccaggcccttgccttacccggattaatacagcatcatccaaactaatcttcttgcctatggtgtcttctatctc

SEQ ID NO: 4803 - DNA, 1192 bp, Homo sapiens
gacaggcatgtgctggtggaggtcaaagaaacaggaacacaagtgaaatcgaggtgagtgtcaggtaaggaccaaagcaccacgcctacctcatctttgcccacagaacacccattcttcccgtgtcctgtttcccaggacgtatccggggcggataagaaatcacccgtggggaggcggtgaactcctccgcaggggccgatgcccgggacaggggcggggaaggctaatgaggcgacttgtgcggggaggggccaaggaggagcccaggtgtcccgctcccgctcgacggcgcgcgcctgcgcgagcccagttggcgtcgcacccttgagcgcagcatccctacgccagcgagtcccaatactagggagggagggagggaggaggggcggccggccccccgcccccgcgcgcggccacgtgacgccggctgaggagattggaggggcggctgcgcgaggctgcagactggtgcagcgcactgtgctggcggctgggcctcctccacctcctcgtctttctcccgggaaccttgacgacgccttccgcttggccctgccttctgccgcatccccgccgccgcggcgccttgaggagcaggagaagacgcagccgggccgccgccgttagaggggttcccggccgccgctcgccccgtcggccgccaccgcctccggggtcagccctctctctgggtctccgctttctcctgccgccagcgcccgctcatcgccgcgatggggctcctggactcggagccgggtagtgtcctaaacgtagtgtccacggcactcaacgacacggtagagttctaccgctggacctggtccatcgcaggtaaagccgctgacttccccatcctcgctcggtcccccgcggggggtcaccggcccctggtctcgcagctcccgggcccggccccacaggcccccgcgccctgcggctttcggatgctgcggatcagcggaggggccggcgcgggcactgcggttgagcactggttaatctgatccgaatgttaaggcctcccctcccccgacactcgcagggttttcttctgagctccctccatctctcatcagctctcggatgcgggagctgacatatcagatggagcctgtgcagccaggagctcctcgcaggagccgccccaccctgtgctcccacatctcccgagctcgcctccctcttc

SEQ ID NO: 4804 - DNA, 1401 bp, Homo sapiens
ttataactgaagttgtatgttccttgagggcaaagatgtctgccatcttcataagttagatgttagctgagtcttaaatcatttttaaatacatggattttaatatatatctaattattatatttatataatttgtaatgtcttctatttattagcttattatcatctgagaatataaagtttcctaataaatatattttgtataggaatttacctaagactggctttatttaagaaaaagtaaagagataaagaaggccttgaaggctcatatgtatgtttattagtagctctgttatatttctctcatagaaagattgagttatatctcatgataggtaatgcttaaggccaagcttcgtgtttaaaattctttattatctctaatagtttataaaataatttcccaactgtaagaacaagagagaaataaatgtattatatttagaatacatcaaaatacatctactgatgtgacagtacatttaactaaaaaattgcaaaacagatttgtgttttttaatttcagactttatatgaacactatagtggtggtgaaagtcataattcttcatcctccaagacttttgaaaaaaaaaggggaaaaaaatgatttgcagttattcgtaatgtcagataccacctataaaatatattggactgttatactcttgaatccctgtggaaatctacatttgaagacaacatcactctgaagtgttatcagcaaaaaaaattcagtagattatctttaaaagaaaactgtaaaaatagcaaccacttatggcactgtatatattgtagacttgttttctctgttttatgctcttgtgtaatctacttgacatcattttactcttggaatagtgggtggatagcaagtatattctaaaaaactttgtaaataaagttttgtggctaaaatgacactaacatttcaaagttgtaaggttgttttctttaagcaaatgtattgttggcatggcagcaaaattcttaattagtaaaaagtagattagggaagatgtgagactagaccttagtaaatgaactttgaaaaacaaatcctgaagggtttgaattccaaaatagacttcctaattatttccggcaccgataacagtctataattttaggactgaacttggctctttcagatattcataacgtctgttgtttttggtatttagaatatcatgctggattctgtgttgtaagctgtatagggcatgccctcactgtatgacttgctaggtaatggataattgtaaatgtggccccagagtctcttgactgaatctgatagcttaaagtatcctcacatagcatccttttctcaatttttaaaaaaagattttaagagattttattttttatagcagttttaagttcacagcaaaa

SEQ ID NO: 4805 - DNA, 1162 bp, Homo sapiens
attttaatttgacatttattatgtaaaggaactgcagtgttcctgtggttctgcttttattttagacattaaggttgaaaaatgatctttggatcctaaagtcagctggagtagagggaagaagtcagtttctttcattatcacttggggactttttatccagatggctgtaagagccttccaggtgcatgtacctctattgcaaagcaaaataaacggaacatttaattattggagttcccactgttaagtctagctgctgctgtaacatccattgtgggaggaagtgcttgtcccaggtacctatgcaaggcttcaggccaaaggcctctagcaatagcactgtcctccatgggacaccctctgcctcactgcacaatatcaactgccagaaccttactcttgtcattttctctccatgtcagaaaaaattcccgtacttaaaaaaaaatcaatcattcctaattccccaggtaaatggtgaaggcattctccttgtaaaataatttcaaatcacagggtcaagttcaaatccgtggactaccatttctaatttcactcccgtctgtataaccactgtaaccaggttgctgtgtatgtttccagacctttacctacgcatatacatatatttatatatgcccctggaagtatatacaaaaactattgtgttttcctttttcttttcttttcttttttaagacagagtcttgctgtgtcgcccaggctggaatgcagtggcaccatctcggctcactgcaagccccgcctcctgggttcacaccattctcctgcctcagcctcccaagtagctgggactacaggcacccgccaccatgcctggctaattttttgtatttttagtagagacggggtttcaccatgttagccaggccggtctcgatctcctgaccttgtgatcctcccgcctctgcctcccaaaatgctgggattacaggcgtgagccactgcacccgggcacgtttttcttttttttaacataaataatgtcatataccatagtgtccttctgcaatttatttttcaccccattatgtcttctcagtacatatagatgtatctcattctttaaacctatattccataatgtatttcatgatttatttcgtcattctattaaaattattttaaatttttcttt

SEQ ID NO: 4806 - DNA, 1218 bp, Homo sapiens
tctgaatattgaaaaagatactgatttaaaaattaggtcaaaggggttgaatcactaggtatcatgcagagacatagcattttgagtttgagtataatttaatagaaaattaaattctatccacaaaattaatagcatgtgtaaaggcactgagatgggagggagcaagtcttgaacagtggacaattgcctaggttttgcttagctgggacagaagtgtgaataagattgaaggaatgggtctattttatgaaggctttatatggctaacagcttgcatttcatgtctaagaaaatgaatatcacaattatagcagtaataagagcacttcttatacgctaagttaacactgagctaaagagctttccagggattatcaaatgtacttttctgagcttccagcagggaacatgctccacctgctttttcctgtgtaaaattaattggctcttggagaaggtgaaggtagtgaaaataggttgttgacatagtccaggtataaaataggcatgaattaaagaccattctgaaaaatgcacatttgtagactttattaaactgctccaaatgaaatcgcacaagtacaaacttgtgtaattaggaagatgatggtgctgttgacagtaatgaaggaaaacaaggaaattcagaaaataatagcagtgcttgacagactttacagcatttcttggagtgatattctgacaacagaggtactgtgaaatggaaagtgaggagaggtgtagtaacagtttatggtttatcagtattttggagggtgcctatgttttgtagagattttttacaataattaagcaataccttattttggttcttattctattacgtgcttcagaatctgcaaaaatatctagagttaattctctcttacagaattaacacctcagcaaagttattttgttctttcatgatgagcattattaatattgttgttttgttaccatcttaaccttaaaacatgagaggggatggacattgaagggttgtaggagctgggggaaggtctgctgtaggctgtaccccatttttctctgtaaagtatcttgatatcctcaacattaattctagtttactttgtccatcaagggagttaacccttgtgcaaggctactttctgtcaccattctttcacagattttggaaactgatgtgcacagatacatgcatggtctgtgtccagggtgaaccctttttta

SEQ ID NO: 4807 - DNA, 1189 bp, Homo sapiens
cagaagacccagaaaggttgtggcttcaattccctttgcaactgtgccactcttacaatttgatcttgggcatgactttcaccacctactctactgcagctgcaggaaaggatgatttcctcaaatgctgatataagcccttgacttttataatgcacattgattgtggctgacctgagccattaattgtctttatttcaaggcatccaaagcaattagtaaaatccagtcattctacaatattaataattacctttgccatcatactatatgaataacccctcacattccacctgtacctctgcctaaccaatctcatgtgagaatcttagcaattgcattccactggttatcaccactccatctctttcagcaatggggtcttcattgccatcttactgatgagttcttcagttcccaaatcctatcctaatggtctgctttctagggataactctaatactatctgtctttcccagggttcccctgaaaggataacattaaacatagacttgaatgaaagtaatgtatttggaaatgagttgtcaagtagtagaagtgatgaataaggacagtgacgggggagagagagagagagagagagagagagagagagagagagagagcgagcgagccaatacaagaatgtatcatcaaaccattgctgtgaacaactggttccaaatcacagcagacattctgaaaagtcttatgaaatgtgtatcaatactgtctaccctagggtgaaaagcagaaggcatttattcatcggttcctccccacactggtcaagggttagcccacagaagttaagtcccttacacttccgatgtgcaagctttgagtgctgaatgggttccctcaagtatcagagaaaccccagggagtggaaagcaagaggttcacatgcaggcttaaggcaggcacacttttgacttaatctgtgaagctagtcaagcctgagcgaaactggtcccagcagcagtgacaagagtaaaagacgaggccatgaacatgtgaatgtgacatataagacagtccaatggagcacacagaaaagtagagtatcaaccatcaaaattggaactaataaaggaccatcggttagaaaatgactctatatggcctatttatgcttaagactacagattgtgactggaaaaatacttgtttctggctaaaagatatt

SEQ ID NO: 4808 - DNA, 1956 bp, Homo sapiens
ctgggattacaggcatgaccgctcccagccctaaagtggcaaatttgacagctaaatcaattgtaaaaattctgtaacaggtttattgggagattttgaagatcatgaagaaataaataaggttcataactagagatttgtggtattttgggatgcctatattgtcatcctgatcctctgatcattactactactaaaacttaatctagtacaaataattctgtattaaagttatgtgaattatgcgaagtaaactctggatttaaactgttacaaatggctaaatgcctacttgttaactaagtaatttgatttaaactctaatctctgtctcttttttaataggtatgacgattactactattatggtccacctcatatgccccctccaacaagaggtcgagggcgtggaggtagaggtggttatggatatcctccagattattatggatatgaagattattatgattattatggttatgattaccataactatcgtggtggatatgaagatccatactatggttatgaagattttcaagttggagctagaggaaggggtggtagaggagcaaggggtgctgctccatccagaggtcgtggggctgctcctccccgcggtagagccggttattcacagagaggaggtcctggatcagcaagaggcgttcgaggtgcgagaggaggtgcccaacaacaaagaggccgcggggtacgtggtgcgaggggtggccgcggtggaaatgtaggaggaaagcgcaaagctgatgggtacaaccagccagattccaagcggcgccagaccaataatcagaactggggctcccaacccattgctcagcaaccgctccaaggtggtgatcattctggtaactatggttacaaatctgaaaaccaggagttttatcaggatacttttgggcaacagtggaagtagaaacagtagggcctctgtaaaattggagactgataggttgatcagaaactcaccctaaatctgaacgggtgccgctataatttgtgacatctggcaagatttccctttatgtatatattttaacaatccgcttggacacgaacaaagccacacttctaactgcttctggcgaactgattttatttttaatttttttcaataaagatattcttagatactgaaagaaatagttaatgagtttgcatttgtgcttgagaaaatttggctcaagtccatttggctgtagtgtcaacgatgtttccagtagtgtttagatttggtgtcttcaaaggtagttgattaaaaccaagtgtgtctttaatatcttgtatcagaataactttgtatgttaccaacttaaattgctagaataaggtaaattgatacacaactgctatttttaatttagaactttgacctaatttgggttttcaaaaccattttggctacttgtattctttatgctgttgtttatttcaataaaaaattcacacctaaatgtatacttactaaaattgtgtttacaattcgtttttcacaaaatttcctgcaaatttggttcaaattgtatagcatgtcaaggccaattaaagggttttgtgccttgttaattcttgtgtggaatatgtctgcacattacacaacactgatttattgcagttttctgcttctggtttaaagtgctattttacaacagacttcatgttcccatcaaaaataaaaagataatacatgtagtaagtttaagttggtaagtattttagagttcttaattgtgatgaatgaactgtataaaaggacaaattcaggtagtctcaaagggtttgcaggtcacactgacaagtccactttcagttgcctaaagtttatcctaactaacctaaaactcagattgagtatattgccctcttgactgttttgcacaccatgggactagaaagcagcaaagaaactctagtgtgaaaacaatgggaataggt

SEQ ID NO: 4809 - DNA, 1148 bp, Homo sapiens
ggggaaaaagtacagttggatttagaaataaaagctgtttttttaggcttaaatatttgaagcctgaaatttcttattacaacttttgataagaggaagggaagatggaaaaatagatttaggtgctggttaacagaacggcagagatcttgctgatcttgggatcagttttccttgtatgagaataactggttgatgggatgaacttaagtaaaagttaagtttttgaggaactggcagtttttgaatttaagctgctgcagatctgatttctaattaatcaagtaaaggatttaataaccttttatttgcattaaattggttcatgaacttgtccaatgggtcttgttaatataatctgttcctcataattcccttgtatgggaattaaggtaaactactttttaaaggatgatttgctcttgtgtatcttttataattaactgttctagttgtataagtaatttaaaaacatgatgcactttttcccctttcagtataataatcatgaaattcgttctggaaaacatattggtgtctgcatctcagttgccaacaataggctttttgtgggctctattcctaagagtaaaaccaaggaacagattcttgaagaatttagcaaagtaacaggtaagttggatttatttggaatgaggtgcagcttttaataatgaagattaatagcatatttctgtgcgtcatgcattgttctaaatacatttattgactcatcgaatcctcactacaacttttgaagtgtaggtaaccccatttttcagataagaagaacaggcattcagggatttgggaaataacttgccaaacgttgtacaagttagtagggaatacagctagggtttgaattcattctgcaaaatcattgttcttcctatgttttggaagatcgtatttctttgtgtgttctttctctaggtgttagttgatgttcttagtagaattgtttgaataatgatttgatgttcttgaaattacaggagtagtaagtattgccgtagcagagtgtttttttttttttttttttttggagacagtcttgctttgttgcccaggctggagtgtgctggtgtgatcttggctccctgcagcctctgcctcccagattcaagggattctcttgcctcagc

SEQ ID NO: 4810 - DNA, 1143 bp, Homo sapiens
tgtatttttagtagagatggcgttttgccatgttggccaggctggtctcgaactcctgaccccaagtgatttgcccgcctcagcctcccaaagtactgggattacaggcgtgagccaccgtgcccagccaagccatggccattatcattttaaggctgccttctgctgttctgctttcgtaggggttgaaagcagcccatttatgactgatgctttcttttcaggtagggtgacattgagcaccttaccacccagttgcccccatgacagtattctaagaatgataaaatagattttgcttggatgagcttgtaattattttttgactttgtaaattatttacatgtcttttcccattagaatatgtatatatttttcctttttccctaacatttagaactgtgccccattatgtagtaggtgttggataaataacctgacttgctgaccagtgctctctaatattcttatgtaactcatggaccatttgctgttttaatagcctccatttacaattctgtgctacttactgccctgtgattaaggtaaattagtaggtgatgatgctttcttcccttacctacctaggggttgtttggaaatagacatgttgatttaaagaccatgaagaagggcaggcaggtgtgtttatgtatttgtgtggtatgttgctggaattggagcccaaggctggtgatgctgcaattccatgacaatcttaaataacggaaatatcctgatgaaatgctaataatgtctatgtacaagcattggaatagatgaaatctgtttgcacgttacgattttttttgtttgtttgtttgtttttgagatggagtctcgctctgttgcccaggctggagtgcagtggcacgatctcggctcattgcaagctccacctcctgggttcacgccattctcctgactcagcctccgagtagctgggactacaggcgcctgccaccacacccggctaatttttttgtatttttagtagagacggggtttcaccgtgttagccaggatggtctctatctcctgacctcgtgatccgcctgtctcagcctcccaaagtgctgggattacagacgtgagccacagtgcccggcccacaagttattttaatagctctgatggttctga

SEQ ID NO: 4811 - DNA, 1374 bp, Homo sapiens
ccaaactaaaggagtaaacctgttgatttacaggaataggaactgttgcatcgtttgaaatttacttttttttgttagatacacgaaaaaacttccagaacatctgggagaatatttaatggaaaatcgcttggttaaaacctgacacttttaacaggtatgtgttgttttagtactttatgattgagcatagcatttaatccacacctagactaaatcaaattttttttgtcagtgaacagcgttctgagtgtggacgagtagccagtgaagataatgaatgtcgaatgtgactgactagcagcttcattttgaagtaggttgtatggcttaaaagttctgtagtatttgtactataatacttgccttttagcattaccttggtttgtagtcagtgtcacagaagtgcagtttaatgtattatgtgtacatatacaaggtctgattggtctaatcaatgatgaaacctatcccgaagctgataacctgaagaaaaataagtacggattcggcttctgagattaagaccagtaattcagaggtggagtaaattttgttgccgtgattttataacagttgtgttataaaatcctgggttttttttttttctgccaacagtgagggtcgctgtctgcccattgatagaggccagattgtcttggaagttccaaagttgcaacgatttctgtaagtggagtttttctgtttgcttagagatcagtgaatattgtgtccttggtcttatctgtgatgatcttatcccgaacctgaacttctgttgaaaaaaaaaaacttttacggatctggcttctgagatggaccgttataaggacaatatttttttttaatacttttaatgcttttacatatgttgtaatgtttgtagtcttgtaagaatctcgtgtttttccttttctagggctagtgccacgaggtttacttgactgttgtgtgaaaagctgataagaaaaccatccagaaaaaagctcttcgttttacaaacatgaaaataaaacatgtaattttggattatgttcctttttgttattacttttaaataggtcctgaaataacatggggagcattaaatggaaaatccactaaccagccttgtaatcaaattactgtgagtgaatgtttcgggtttgtgcagggtacaatgtaagggtttttggatcagtgtaagagtggagagacaggaattagaagtaattgttactaagcaaatcatggaatatttagttttgatgtaactataattttgaaagcctggatgcttaagttgagaaatgggggaatgagatacagaaaataaggagcacaatagaataataatagcagtttattaagtatggtcatgagggaaggttactg

SEQ ID NO: 4812 - DNA, 1374 bp, Homo sapiens; identical to SEQ ID NO: 4811

SEQ ID NO: 4813 - DNA, 1374 bp, Homo sapiens; identical to SEQ ID NO: 4811

SEQ ID NO: 4814 - DNA, 1193 bp, Homo sapiens
aacagtaatccaaagttttagaaaaaagaaattcctgcagtaactagaaaaagttgtcagtcttctctgatttaaatgtatattaagtactattaattatgggtccaggtcaatcatgataaatatcagtaaagtttaaaagaaaatcttgttcagtaactcactttactaaatctctgtactcatgataaatatcagtaaagtttaaaagaaaatcttgttcagtaactcactttactaaatcttaatgcttagccagatcttaaactggagagtggttgaatgaacccactctgtggtcaaatgtttgatatttggccaggtacagtggctcacacctataatcctagcactttgggaggccgaggtgggcggatcacctgaggtcaggagtttgagaccagcctggccaacatggtgaaacccatctctactaaaaatacaaaaattagccaagtatggtggtgcatgcctgtagtcccagttcaggaggctgaggtgggaggatcacttgaacccaggtggcggaggttgcagtgagccaagattgcaccattgcactctaccttgggcaacagagtgggactctgcctcaaaaaaaaaaaaaaaaaaaagtttgatatttgctgttgacttaatgtagtttgatgctccagattaaaagctgtgtttactacttagctgtttccctgtatgagtagttgcaacattaaatgcctgtagaccccaggcatgtaaattaatgacttggatagagaaaggacagtggggaacaagagagctcttaccctaattcaccaactgctacctatctgcttattactgccatatgggaatgctggccggtgtttgctgagtcttttgatttttcagtgagaactaggtccagttgcttgtgtatagtgtctcaattttgaaatattggcaattaattcaaaatatctgggggaaaagaccctaaaagactgtatgagccaaataaaacatgcctggggaatttattcttagatattttgagcattctctagtttgccagttgtacatgaaaaacaactctctgatagtgagttttgattctttaattctaccgtggtctctgtgctttcatcattattcacatacctgcaagttgtacagttatgaatgcatttggaaacaggtgtacaaatggtcagcgtggctagggaagggaa

SEQ ID NO: 4815 - DNA, 1208 bp, Homo sapiens
tcaagagaaactgtaacttcaaataatatttaattgttaaaagggaaaaaagaaagtatgatctcaaccaaataggaaaaattcaaacaaaaccctgttttcttagggatgcttcagaaatacacaatggataacatcattttatttcacgctttttaatttgccaaattaaactttgcatgtttaaccaaaagtaaaagaaaaagttaaatttaaaaatctcttaaaccgttcaaatcattgaagggtttaaataaaacagacttgattaaatgtttgtgctatgtaaaaagataattaggtgttattgttttgttatatagtcgtgtgttgcttaacaatgggatacattcatagaaatgtgtccataggtggttttgttattatgggacatcatagagtgtacttacacaaacctagatgataaaaccgactacacggacctaggccataaacttgtgcatcatgtaaaataccaaatactgtatttgtgcaattgtgacacagtggtatttgtatcttaacatgtctaaacataggaagggtacagtaaaaatatggtattaaatataaaagatgctatacctgtatttaccatgaatggagcttgcaggactggaagttgctctgggtgagtgagtggtgagtgcatgtgaaggcctaggacattacactactgtagacattataaacatggtacacttaggttacaatgggtttataaaaaaatatttttccttgtatcataacttcagaataaaataataaaaattaaaaaatatttttcttgcctggacatggtggctcacgcctgtaattccagcactttgagaggctgaggcaggagaatcacttgagcccaggagtgttagggctgcaatgaactaggataacactgctgtacaggatcacactgctgtactccagcctgggtgacacagcaagaccctgtctctttttttttttttttttttttttttttgagacagagtttcactcttgttgcccaggctggagtgcaatggcacagcctcagctcccacctccgccccccaggttcaagcgattctcctgcctcagcctcccaagtagctgggattataggtgcccgccaccatgcctggctagagaccctgtctctaaaaaataaatatttttctttcttcaatgataaattaaccttagctgactgtaacatttttatttta

SEQ ID NO: 4816 - DNA, 1155 bp, Homo sapiens
tagtgacagcagatatctcttcaagttccataggtttttcatgagatggcttcgaacatctaataggttaaaaagtgaaggcatatgcatagaagacagactatctaaattacatcttatctgttggtgcaggtgctttagcgtagaccctgacagaatgtcatgttctgtggctctcatgaaagctaggtgagataaaaagtgttcatcgtatgtcagagtaggtagaatatgggtagagtgatttttcttacttgttacaaggtgaatttgaggggagggaaagagaatgaggaagagagagactgaatacagaatagcatgttagttgggaaaaaaagaaaatgtgtttacttaaatagaagtatggaactaaagagattgcctgagaactgggacccgatatagggaccatgaaagatgacttacttgtgtctttgtaagccaaaaatagcattagaactacctatctcattaggcctattatataacatacctactttgtgtgatttgttcttttcagctaagatgtgatacagtggtgagtgaaatcagtactggtcaaaggactgtaaatttcaaaataaacagagagctcttaacaaaggtaagaataagttaatatccagccattgtgctttcattctgtctgcttcagccacagtggtcttcctccagtttttaaattctttatgcctcctctggcctcaaaacctttgcacatactgatccataacttggagagtaccaccccaagttaacacctactcatcctttaaatcttgatatttctttggcagtagctttctgaccccttcatttatatgctctcatagcactgtatagtcatataccacataatgacatttcatacacaacgtgtatagatgatggtcccataagacaataccatatttttactgtacctttctgtgtttagatatatttaagtatacagacactattatgatacagttgcatacaatattcagtacagtgacatgctgtacaggtttgtagcctaggagcaataggctgtagcatacagcctaggcgtatagtagactgtatcatctaggtttgtataagcacttgggaggctgaggcaggaggatcacttgagcccggaagttcaagaccagccctggcagcata

SEQ ID NO: 4817 - DNA, 1174 bp, Homo sapiens
agcaggtagaatcatgttatgtagagtcttgctaactggctattttttattgttactttacatacaggcatggtccattacatgaatttgagaagtttggttgaagaatggaaactaccatgttaacttgccataaatgatgtacctacaatacaagtagagcaaatgaaagattaaaggttacatttttttaaccttttttttttttttgaaaaaagagattattgtggtatttggtttttattgcatcattgctcagcagaaatgctatgaatttagtttttttttttttttttttttgagatggagtctcactctgttgcccaggctggagtgcagtggcacaatcttggctcactgcaacctccgcctcctgggttcaggtgattctcctgcctcggccttgtgagtagtagctgggactacaggcgcgcgccaccacaccggttaatttttgtattttttagtagagatggtgtttcaccatattggacaggctggtcttgaactcctgacctcatgatctgcccgcctcagcctcccaaattgctgggattacaggtgtgagccaccatgcccagccaactttttcatctttcaaaactgaaactcattaaagactaccccccaagcctctggcaattactgatctaatttctatctcagtgtcagaaaggaacattaaaattttaaggaaatatagatttttaaactcaaatttgaactgccctcagtttagagaaattatagattttgaaggatgaaatggcagagaagatgaagtcacagtttgggaagagaatcacagatttttgttgcaagtgaaatacgtacttgaagttttggttgttgcttttggaaagcaaatcttgtaaactctttaagcatagtgctttcaagagtgtgtgattgtgataaaagggatgtataacacacagcatatccaaaaatttagaagacatatttgaatcctagaactatcctgaattttctgttaattggccagagtctagataacctggtgttgtgggagggacctggtgggaagtaattgattcgtgggggctatttccccccatgctgttctcatgatagtgagttcttatgtgatctgatgcttttataaggggcttccccctttgcttgacactcattctcttgcctgctgccatgt

SEQ ID NO: 4818 - DNA, 1231 bp, Homo sapiens
caagaccctgtcaaaaaaaaaaaaaaaaaaaaggaagaaagagagagagagagagagaaagacagaagaaagaaagaaaagaaagaaaaggaaagaaagagaaagaaggagggagggagggaagaagggagagagggaaggaaagaaggaaagaggaaggaaggaaggaaggaaaatttaaaatatttattgtgacagaaataaaaatttgaaattgaaaaatataagcacatttaagacaatctcccagaaagtaaaatttaaggatggagaatttgaaaagaaggaaaagagaaagaagatctgtccaggaggcccaatatttcaaataggaatttcagacagagaaaacagagtaaatgaagagaggaaattaacaaaaaaataatttatgcaaatacatcagaactgaaaaacgtgagtctgcaggttgaagtagctcactgagtgctcagcacatgtgtgaaatgagtcctacatcaagaaatgtaataataaaaagagatgatcattaacacctttttaaaattgcttcttggctttttgcctaagatcaagtacagtgtctcttcttatcagtttaatatctgatacgtcctttgtctgaggacaatatattaaatggatttttggagcagggagatggaataggagcatgctccatccactccacacatagacctggtattgcagtacctccaggatctgtgctctctcaccccacatgctataaactaaaaaaaagaggctgggcgtggtggcttatgcttgtaatcccagcactctgggaggctgaggtgggttgatcacttgaggtcaggagtttgagaccagcctaaccaacatggagaaacccagtctctagttaaaatataaaaattagctgggtgtgatggcatgcccctgtaatcccagctactcagggaggttgaggcaggagaatagtttgaacttgggaggcggaggttgcagtgagctgagatcatgccactgcactccagcgtgggtgacagaatgagacttcgtctcaaaagaaagaaaagaaaggaaggaaggaaggaaggaaggaaggaagaaaaaaaattaaaatattattatttatttatttttgcagtttaaaacttatgcattgtttatttctggaattttcttttaatattttgggaccttagttgaccatgagtaacacaaaccacagaatgcaaaacagtggataagggagggactactg

SEQ ID NO: 4819 - DNA, 1149 bp, Homo sapiens
gcgtcatatgagaagaaagaaatccccaccacctcaacctctgctgagattgtgtgctaggaacagccttccctccgtttcccctcagtcaaacttgagccagcctctggatcgatgtgatcttattgcatgtttccatggggtgtacctatactttaagccaatcctgctgcattcactgctaagttaaataaaaagccaagaagattttgcactgtgcagatcctttgctatctgacttgcatctcttcccccacctgtcagctagccacctgcttgtttgtgttgggatattttttagcacctgaagcaccatctgaaaggggcaccattttcttcttccctttgatctcacatatgctccctaaaaatccttaagttgtcaatctgatccccagtgtgaggttaatgagcaaaattggtctttggggccctttttgtccaagccccactgaaaggcctcttcagaaaactattatctttaaagccctactttaactccttaattccagcatacagctaaaactggatgtatattctggcaagtaaaggctgaggactcctctttaatcctcagatctagataactcatgacattttatttgaccaacatagcacatgatgagatatcaaggtaattaaaatagcatgcttgaaaaaaaaatacgtaatctgtttcacctgtaactgtttaagccaataaacttttcaaaatttatgtaatgtggggcttttatgtagcactttacgttttcatgctgcttattgttttattctactgaaaaaaatgaatttcaagattctcaacttttttaatttcaaaaattgtttattgttttgactataggaatacaaaatttcctattttgggagaataagaactctttttgtcatttttggctatgaataaactttctggtcttttgagaccacccatttttatagatcagaatcagaaaacaggtaaacctcactcacacatttggactcatttgaacaaaaatctaggccaaaatactgaaaagcctatgtgtttttttaattggaagtatatgtaaggttaatgcatttagtgaacgtgactaacaaagactaatgtgcacattaacagatgtactttttaaggttttatgggaggctgtgcattgc

SEQ ID NO: 4820 - DNA, 1124 bp, Homo sapiens
catccttgagtaattatttcaaagggattaagtgggaaataaacttcctaagtccttgaatatctgaaaatatctttatttcactctcagatttgaaaaataatatgattggtatattaatgagttcacagattttttttccttttgtctttttaagatctgttctgttgtcttctcatatctgtgttgttgataagcatctgatgcctttctagttctttcataggtaattgtttccccctctaaggattttattgttatccttgatttaaaaaattttttttcacttctctttttgttcctatagatatccttgatattttgaagttacactatgatttttttttttaggtgtgggcttgtttttaagtttctccattttattttgtgagtctgttcattttgagttttatcttttgttaatttaggaaaggcttctctattatttagttaaatgttgcttcctccccatattctgcattctctccttttggaacttctttagtaaaataatggttcttctgaatcttattcctgatgccactttaactttgatttcatactttccagtgctctattcttttgtactgcatcttgagagactttgactagccagtccactatttccatcttcatctgtgtttattctgctttttaatccatacattcatacatttttattgccaagatctatatacccctttttcataactgctcttcctctgaaactgtctgttcttgtttcatgaatgccatattttcttacatctctgagtctctgaagtatatttagcttgacagtttgctgtgattctgttattaactctgcttcttcaggtgtacattcttacatttgttgagtctatgttgtcttccataatcttggcattactcgaatatttgatgttcaaggaaatgttggagggaagatggtactgtatccacctctgatagtgctcttctccacacattgtagtgagagttaggagaggtgagaggactttgagggcagtagtggggatgcttccttgtccttctgggcatcactagcactgggggcactgccttccttctcatgcccaacctcctccatttactgctttcacctagaagatatcctagtg

SEQ ID NO: 4821 - DNA, 1222 bp, Homo sapiens
tatctttttaggataaattcttagaagtgaaatcgctgggtcaaagtatatttattctaggtgctgttaatgcccaactgcccatcaaaaaggtaatgttgtacctaagtaaagttgtgagtggatttttcactaccctcaccaacatggatgttgtccagtcaccctaatctttactagttttatggctttatatatatgtttacatttatatataatgcatttctttgaagactgagtttgaaaatcattgtgtaagttaacgcctgtgtgtgtgtgcacgtgcacacacttatgtgttttccttcaattagactgaagtcttctggggacctgagcctaaataatttcaggtggatcacttgagatcaggagttcgagaccaccctggccaacatggcaaaaccctttctgtactaaaaatacaaaaaattagctgggtgtggtggcaggcgcctgtaatcccagctactcgggaggctgaggcaggagaatcgcttgaacttgggaggtggaggttgcctggattgcaccactgcactccagcctgggtgatggagtgagactctgtctcaaaaacaacaacaacaaaaaaaaaaaaaaaaaaaaagaggagatctaggcaggaagttaattgctggagttactagcacctggaaggtcattgaagccacgagactggatgggacccctagagagtaagtatatatagacaggaggcccaaggactgagcctgtggattacctaatgttacagctggggagaggaggaaaagccagcaaaagaatgtgggaaagagtggccggaaagttaggaaggaaataggtatgtgtttatctgtgtgttagtgtgtatgtgtgggtgtgtgtgtgttttactgaaagctgagcaaagttaaggagaaaggattcacatttcaaatcctggatcaagttagtccaggagtgagaactgacatttgagcttagcaatgtggaaaacaccaagaccttgataagagcaattgtagtggggtggccgaaggaaagcctgactggagtggcttcaagatagagaaggagggaggccgaggcaggagaattgcttgaacccaggaggcagagtttgcagtgagatgaggtcacgccattgcactctagcctgggcaacaagagcgaaactccatctcaaaaaaaaaaaaaaaaaaaaaaaaagagagagagagaaggaggagagaaagtg

SEQ ID NO: 4822 - DNA, 1195 bp, Homo sapiens
aggacatatttctctaaattttttccttgcatttaaaaaatacagtgatgctcaacttcgttaacaaaaaatgaaatacaaagtaaacaaaaatgagcatcccccactttagctcttaaagataaaacaaaaacgtaaaaacagtagttatatccatgttggtggccacatagcaaaatgggtactctcatacaatgttggtaggaatataaattggttcaaattgaacatctcaaacctgaaaatctgaaatgctccaaaatccagaaatttttgagtgccaacatgacgctcaaaggaaatgcttattggagaattgtagattttggattttgggatttgatatgttcaaagtataatacaaatattccccaaccccccaaaattcaaaatcggaaacacttctgattctaagcatttcaaattaaaggatactcaaccgtataatctatttagagggcaatttgtcagtaatgatcaaaattttatgtgtaacacatgtcatgtgcatttcctctgttgactttagaaaaagaggaatgttgatagctgttttataataatgttattagcaatagtgatcgtggtagtggcaggaatactgctggttgtgctgcttgcagtagtggtactggtggtacggctggcagtgctggtggtactgctgctgctgctggtggtggtactgctgctggtggtggtactattggcagtgctgatactgtaccactgatagcactggtactggtggtactggtggtgctggtgatttgagcattcactgccttctactatgtgatgaagcttaacaaagtcacatccaagtctgctttgtacccagaacagtgccagagggcagtgtgggtcaaagcacctcttttgattctctcataacatagacagaaagatgagctttccaggaggaaagatttttaccattgcccctcataaggtggaaatagctggtgtccatccaagcccctgctcacacactcagaaggcacttcctaggaactccttccccgcctttgcttctaagtcccagaccagcagtgagattctgccctttgaaatatttataacattcaattcactataaaacactttgtaaatgtaagtgctgtaagtggcccaaattatatcagcagctttttgagaaatgggaaaaggaaaaggaatttaagggaatgggatc

SEQ ID NO: 4823 - DNA, 1186 bp, Homo sapiens
ttgcgccctctggtggcaggcccccagtcaccctctcccagccccgggcaaccacggatctgttttgcttgttcataaaggtcatgtaaatggaatcatacagtatgcggccttctgtgtgtggcttcttaaacttagcataatgtttttgagattcctccgtgtcgttacatggaggaatggttcacgcctctttattgctgaggagtattccattgtgtggatctaccacaatttgtttatccaaacctatggtttttaattttcttggtgcaaatgcttttccacatcatcgatatttccttattggcaatataagctttggtatgatctatttctagaggcatcagatttctttcatttcactcatgtattcaacacgtatttagtggttgccatgaagcccataacttgcagacaacttgagagtagtgtttttaaaacctgggcagaccccttgttgctgagaactaaactagcagtggttctccacctggctgcacattagaccctcctggggaactataaacaaacgaaaaaggaaaaaaaacaaaacttaaaaaaaaaaaaaacctgaagaccaggcctggggtgatggactgtcccagtttgccctgggctaaagggtttcccggaatgtgggactttcagtactaaaatagggatgctggatacccatccccaaggccacataaatcagagtccctagaacggttgtggctgtgcacagggctggtttgaaagcttccccaggtgattctaatgtgcacccaagggttgagaaccagcgagcctgctagaacctcaggcctgtaatcctccctgtgcctggaggtaaaagtgagacaaaaggtccaccagggctggttggagctaaggtgaagagaagggggataagcaaactggccgcatccagtattcctctattttttttttttttaactcatttctctttttaaaagatcaggaatctgatatactggagtatcggcagccaggactgtgagatccagaagggtgtgaactaggtgagggagaagcaatgaacaggcagtgtaatgctctgagcccacgcacctgcaagcctgacccagcacttgagctcagcagaaccaacgcggagcttctgtgtttaacctcctgagtgcttgcaggctcttggatgacacaatgtcacctatcacac

SEQ ID NO: 4824 - DNA, 1802 bp, Homo sapiens
gaatgaccatcctctgtgggtcatcatttccctctatgcaaagtcagtgcaggtattgcagccttgataatgggtactgaccactttgaaatggagattaggtgttgccacacttaacttatgtctcagtagctcctcacagcaagaagcatcaatcatcttagtgaaatatgcctatagggcagttctgttccagggaagcattgtctctgtgggtcacattaaggccttgataggaaggtaaagatttagtgtgaatgattccaagtggatgatggggagacaccactgtagggaaagcagattttcctgtctatcccttttcctttttttcagtgtccatcctcctggaaggggcactcagaaagacatctacctccttcttagtagagttctgaaaattctcttttacttagtaataaaaggtaggttcatatgcaggaataagacacaggagatgtaaaagttagcaaaagagatcacagaagagctagctaaggatgctggtttaatcgctgcctccccatttcaaaatgtcttttgttgacaggattctatcttggacattaaagtaccgatatttaaaggacctggagagatgcctgaaatccgatcctacatggaagagttcccattcccatactatatcattcttcgagatgtaaacgcacttcctgagacactcagcgatgccctcagacagtggtttgagttggtgacagcctctgaccacccatagaacagaaagaagagtccaaagtgagacttaactgtggtcagaaggtcacattgcttacccaggtgctcccttttggacaactacaaaaaattttattgtaatatttttattttacaacgtgatcttacagcctacagaatgctctctggctcccggctttgcctgggctgaggtttttataccaaacctggaagcagcagcaggtgcctgaactcgtaactagagaagagttatccttcttccctgccttggaagccctggcctgggaggaggtcataccccaccgttggagcccagctgcctgttttcttttgcaggggatctgggcacctgtgccttgaggagatgctgccaggagcatgggactctgacagtcctttgtataaaggactaaagggagctgcccttttgaccctgttctaagctctgccttgccaagcccatagtgtgtgcccaaaagctgtcaagtggccaagacagctcgtttctggagagtatgagggtgtgttttcttattgtgaaaggaactaccttctcttagagggtaggaagaatgtggtgtgtgtgtgttctcataaagcaactggacattataggtgcccaggtcatctataaaaacgatccttgggctgtgtaaaaatgaagtggcttttcagtatcctctttcacacttgctgcttcgggagactatgcaatgatgggaaggtgattgcccctttatttcattcagtgccatggtccctgttgttgtagtaatttatttgtttagttcatttttttttttcttaacagtcaaggggaagagtgattcctcacactgctttcaagctggactgagccagtctcattctgggaaagaaacgctgtgtccagaactcagcagctccatctattttttccagtcgaaagaaactgatctttaggcagtttttacttggccagaaagcagtgctgaatacttgaaactgtgtgctctgttctacttaatgttctgtcagaatgttcttttgtaggcagtatgtcatgatgtaatcatctatctccttgtctgtttccaagttac

SEQ ID NO: 4825 - DNA, 1202 bp, Homo sapiens
tatttttttgtgcattcccatcctcagatatatcttcatagtatatattttctcttacaaaattaaactttctgattgagagtcactactactttttctttttacttctgctcagcaggctagtattcttctcaggttattttcctgtataaaatagtttttttcaacatttcacagttattactatgtctgactgtgttctctccagagcctgttctgcccttactcaaggactttttccaaaatactgtccttctagtatacttcatttaggtttttgtcttggcaaagtgacaaatgaccacatgccagaggcttctacaaagtcaagtcatatgttaaatctgatgtcaagctgtgaaactgcataactattagcaccaaagaggagaagaatgtcagaagtctcctgtacttccagcggatttaagataatgagctagaaaaagaattcagtatgtgtttaaattgttttcctgtggcaagaatgaaatctccttttaaaattgcttttgtgcctaattgttcacttcctttttcttttttctaagggattttgcttgcccaaagaatttatggaagattcagctggagagggagcaactgagttccatgactatgagggaggtggaattggagaaggcgagggcatgaaggatgtgagtgaccagatcggaaatgaagaacaggtacgttttcacataggtatacagttgacagaagatcactctctttcttttcaacatgtaagttacacataaaaatggtttttactaggttaataatttttaatctgtgatctacagagccctagatatattggtgcttcggcagtgggtgtaaataaaaagcctaaaatccacaggaaggaacctggcaactccatcattggttttggctataattatggaggaaatgatttttactttttttttttaaatgggcagatatttactgatgattttctagagtatttttgatagtatttttaagcataaaaggcctggctatcttaagtgataattgcattaaacaataatgccaaaatttgctgttaataggttttactgttgtatatctttaaggcatagagtgttttaaaaaatctgtatccttttttggttggaatcaagcaaccttctgaactattcagatgctgtgaactaagattgttacattgcttggattttttaaatgcctgt

SEQ ID NO: 4826 - DNA, 1100 bp, Homo sapiens
tttctcatggtggacatacaattttactgtttcattgcataacatggtagcatctgtgacttgaatgagcagcactttgcaacttcaaaacagatgcagtgaactgtggctgtatatgcatgctcattgtgtgaaggctagcctaacagaacaggaggtatcaaactagctgctatgtgcaaacagcgtccattttttcatattagaggtggaacctcaagaatgactttattcttgtatctcatctcaaaatattaataatttttttcccaaaagatggtatataccaagttaaagacagggtattataaatttagagtgattggtggtatattacggaaatacggaacctttagggatagttccgtgtaagggctttgatgccagcatccttggatcagtactgaactcagttccatccgtaaaatatgtaaaggtaagtggcagctgctctatttaatgaaagcagttttaccggattttgttagactaaaatttgattgtgatacattgaacaaaatggaactcatttttttttaaggagtaaagatttttaattctgtgattgtgtgtatgtgtgttgaaactgtaaagcttttatgactctaatattaatctcttaaatgaaattaaaaggcaaaagaacatgattgagcttaaatgatcatttcttcctgcagtgattcttggattgttttctcatgtatttgaaaaaaaaaaaatgaagaaaaataatggaaaatggaagtaattactccagctaaaaaaagcttggacttagatttctttttatgataccaaatgagaaataaaccaggcaaatcagaaggaagttaaagaagcaaatataaattcaacaagtgtcctaattatcctggatattggaatatttgattttccttacaatcccgttctagaatgcctgccgcctttcaacactttcaagagaatttcaacacttacagagtatttatattgttaacagtaattttgctaccaaaaccttcagaataactttaataataaaatgacactgaaataatagactatacaaactctatattttttcagttggtgttaaaataagtcacattttgata

SEQ ID NO: 4827 - DNA, 1174 bp, Homo sapiens
tgttggcttatcaattcctgtttgagttcctcttgagactgcaatttcttattagatactcttaactctttatgctactatctcctttatttaactggccaaagtgaattttttttaatcagacaattccttattaagactcatttattacatgcaattaaatgatttgtatgtagtactctatcttccttaacagacagtaaaccacttgtgggtagagacattttataaaatttatcttgagattcccagcaattagtctagctgtggttggttgacaatatatgtttggatgaatgaaaacgaatcctatttttttaatgtcctaacaaagagcttatgaaattgcaaggttggttttactatcatagtggatgacaaagtgttaggacttccagtaacatacctgtattttaataagggctgtctggaacaaatcctttgaggtacaggaaaagccataaaagtaggcatttgtcagtattgaatttcatggggaggcattttgggagtctttcaacatctctgaaatgattatatatctttgtttaaggacagcagggtgtaggggcagcaacagaaggaactgtctgagggacagaaggactcctctgcaggagctgattgagtgaaaaccatgactgggacctcactgcccagaactgcatttacttcattccaaatagttttagataagcactgattatccaggaaaaccagaaatagtcttggtaaaaccaatcaaatgctgagttatttgagataatatcactgtgggaaactttactccgaatcagtgtattgcttttaaaatattggtgtctctaataatccactcttacatactttctattttggtattactgattaaatgccaagagacatcaaatgaatgcttttttttctatgacataaattaaaggggatattgttatattatagctgagacctcactataggaaaagcaaatgagatggatcattgaaatgagcttgagatgagtgtttgcttcccccagattttaccttccaagatatttgggtcattagaattcttgatctcccctttttaatcacaagctgtacacttgtactttctttccccccccccactttctggtattactaagcctccctcttctcttcctggttacaccaaaccagggccatgaaac

SEQ ID NO: 4828 - DNA, 1175 bp, Homo sapiens
agtctcccatgggagaaaagtggaactttgaattgcggatttgaaaacacagcagcaatattctcttctgttgtttaaggtattttctgtgaagattctcactgtactgactgtgcattcagccaaacacagtaaaacaaaaccagcagccacttttaattagtcattgatacttcctttttatgtcttttttctaactacttcaaactgccacccctatagagggcaaacaaaaggaataggttggctgataaaagcttctttgtttttcctttttttttttacaaaaataatactttgtaaactatccaatttatattactccactgatccttcaaatttatggtaaaattgttaagttggaagaaggatgccattcaaagcaagaggttactcttggttacttgagcagtggctgctattggaactggtattggggatgaactattcacttctgttcttaaaagggtaaaaggagctgggcagggtggctcatgactgtaatcccagcactttgggaggccaaggcgggcagatcacaaggtcaggagatcaagaccatcctggctaacacagtgaaaccccgtctctactaaaaataaaaaaaatagctaggcgtggtggcacgtgcctgtagtcccagctactcgggaggctgaggcaggagaatcacttgaacccaggaggcagtggttacagtgagccaagatcgtgccactgcactccagcctgggcaacataatgagacttcatctcaaaacaacaacaacaacaaagtgtaaaaggctttgaacagttgtacatttgactgcccactacactttcaaagtgagatacacatgaaatccaagcaatttgtaacatatgagatatgaagagaatctgaaactttcatgtataccttgcatttgcctcgttttctgatgctaaactcattgaagaggttgtgagaaatattttattgggcaaccttaaaatataagttatgtgatgattatatattatttttctttcttgtattaaaatacttttattctagtagtagggtagcagtaggcttgaaagttttagtgctcaatgtactacatgaactattttttaaacactactttaaaaaggcttttaaaggtacatcaattataatgaaacattatccaatatgttttgggtaccaa

SEQ ID NO: 4829 - DNA, 1198 bp, Homo sapiens
ttgtttccctgactctgtgtgagtgtgtgtgtgtgtattgagtgctcattctattattttactttagttcaagtaaagcaagcttcagattaaatgtcctttggtatctctttatttagtaagcattacattgtacacttcatgagtggtagcatttcatttatattacgttagtggtaacaaccaaaaaaaaagcacccttttctattccagtcttatttttttcatctgtatgctgaatatgtatgtttgaatatatatttatatccatttatatatacatttatatatttatatatatatatcatttctatagaatttcctacatgggaatttatgtatatgacttatataaagagatatatatataaatatatataaagacatataaagtcattatatagatgggttttatatatatataaaagtcattattaaatacctataaatatatatataaaatatatataaaaatatatttaaaatacctatatatatataacccatctatataatgactttatctgtatatccttctgtatattgttatttgtgtgtatttgtatgtgtgtgtcttgtgtctgtatcttgtttttttttgtgtgtgtgtgtgttgctcaatcttgctgtctgtctgtgtatattagagtttcatgcatctgtgcaacaaatatattctagggaaaatactctaataggtctgtggctccatggactagtactaggcaaaatgataacatcatataccaagcacactaacagaaacctgggaattgggggagagaatgcttgagaaaattgaggaagaggtcaagggaaaaggagaaatctgcaatttgggagtgaaatggaatcctgagattaaaaaaaaagtgtgaagtttctatggtagaatcgctgaagaatatttaagaaagaagaatgtatttttttaacttttattttaagttcaggagtagatgtgcaggtctgttacataggcaaacttgtgtcatgagggtttgttgtacagattatttcatcacccaggtattaagcccggtgctcattagttattttttctgattctctccctcttcccaccctccatcctcccataggctccagtgtgtgttgttcccctctatgtgtccatgtgttctcatcatttagctctcatgcataagtgagagcatgtggtatttagttttctgttcct

SEQ ID NO: 4830 - DNA, 1138 bp, Homo sapiens
ttaatttatttttaaataatagttttaaaaacctaagatttaaaccaatatttatcctagtgtatacgaggaaaactgagcttaaagtgctgtgtaaaagactaatgatttaaatttgaaaagattttgaattctgataacacttctataattaggactttacgatgatagattaaagaattgtgacaggacaacaattttccaactactgtaatgtctatgaaaataaatattgatattcagccagtttaagcagtcattaatagatgatataacttgtgtacatgcatcatcccaactgccagtcaacaaaaataataatgcatcagttcagtcagtgctgtcttagatgctgaagataaatggtatataaatagaaagcaaaatatgtgtactttggctttgatttgaaataaagacttgatagtttaggagagaatgattttcttcatttaaaaaaagttactgaatacctagtttaataggcattggagagatactaatggagaagaaggacaaaaatacttgttctgatggagctcataatctagtgttggggcataggaagaccactaaatgagtaaatagtgtaatgtgtggtgataaatgctgtgggaaagagtggaatataggataggaatacagaaggccagaggcagttgtgattttaaatagagtggtcaggaaggcccaagtaagtaatatttgtgcaaagaactgaaggagatgagagaccatgctttgcagaagtctgaaggcaagaacatgtctggtgtgtttgagaaactatagggaagcagcaaaggctcatgtggaatgagaaagggaaagagaactaagagatggatcaagaggtaatggagagctagtttgtgttctgccttgtaagtggttataaagacttttggttttactctgagattggaagctgttgaaaagttttgagcagaggagtgataagagtcctctggctgctaggttgaggctagacttataggaagactaggcaaggggaaaagcaggaaggcagttagggaactattgtaataacccaaaaatgagcagctgtggctagagtggtggcagtagaggtggtgagaagtggtcaggtttcccatctgaagaaagtattttcaag

SEQ ID NO: 4831 - DNA, 1163 bp, Homo sapiens
caggctggagtgcagtagcgctatttcggctcactgcaagcttcgcctcccaggttcttgccattctcctacctcagccttctgagtagctgggactacaggcacccgccaccatgaccagctaaatttttgtatttttagtagagacggggtttcaccgtgttagccaggatggtctcgatctcctgacctggtgatctgccctccttggcctcccaaagtgctgggattacaggtgtgagccaccgtgcccggccttaatctctgctttagtcctttttaaaagaatgtcttatcttaattttgaacaatcaaatttaggcatattacatttgggcattactccataagaaacatctttaattccatagcccttaacttgttttaaccatgaaaaagccattctttctctcctatctcccacaccacccacaactgaatattgtgagagaaaatcatacattcatttttactaagatgattgactttaaattgttgatcataatctcaaatggccatcagctctagaatgtttgcttttctgctctccaaaatgacttaatgacttacttcagaacttctcttttttttttttttttttttggagaaagagtgtcactctgtctcccagtgcaatggcagtctcggctcactgcaacgtctggctcctcccgggttcaagcgattttcctgctttggcctcccgagtagctgggattataggtgcctgccatctcgtccagctaatttttgtattttttagtagagatggggtttcgccatgttggccaggctggtcttaaactcctgacctcaggtgatccacccagctcggtctcccaaagtgctgggattacaggtgtgaaccaccgtgcctggcccggaacttctctttgacataaaatttaatacgtactcttctccaatccattcgggttaacatcttgcctcataaatcattgaaaaatagaattggtcaggtaagaattcctatctttacagctttaaatctcccaacacatctgcttcatattcaacctctcagactattcttcttttatgttagaagtgtcactttctatcaagagctaattccttccctcgtgcactggatcttaactcttctcacctgttcaaggactttattgtttgtgtattttcac

SEQ ID NO: 4832 - DNA, 1099 bp, Homo sapiens
gatcgtaactgggatattgaagcccaactctattctctcctaaaaataaatccaattaggcaaacttctggtaacagttactgtttagactgtgaataaattttcttcttgtgatggtttctgataggtaggctagttatgcataaataaatgagtctttgttaaattatatataataaccagttgttaaattgccatttcttttttcttttttttttttttgagatggagtctcgctgtttcgcctagcggagtcagtggcgcgatctcggctcactgcactccgctaggcgacagagcactccgtctcaaaaaaagagctaaaagagtgaatgtgcaccttattagtccaattaaagatttgacctatgtagtatgcccaaatgtaatatgcgtacatttgattgttcaaaataaagataagacattctttagaaaaggactaaagcagagattagaagcaggcatattcatttaacggacttattggaatattcattaaatagctcatattctctccccgtctgatacactcaaacacacacacacacacacacacacacacacacgagatgagacacgctgagagcccataagggcttctgaaaatgtgggagatgcgtagtactccttgagccagtcaggtttaaggctttgtggaaaagaggcccacaggccttatggcttactaaaaacaatctttaatcagagggcatggaattacatgtctttaatcaaatctctggtagggtttgcttaaaactgacaaaattgatatgtatcatcttaaggaacaatactatgaccctgttgcatttattatttgatcatcagaagagtaacattggtctaaagtacatttctctcctgcagataacaaaacgatagctatccctgtgcaagcactctgcttaacacttactgcacataccttcacttaatacttacgacagtcgtgtgtagtgatatttctgtttccgttttatacttttacagactgaggcccagaatgtttgaagaacttgtccaggttcacacagctagcttaggaaatggcagaactgagatttgaattttcatatgtttaactccactgttt

SEQ ID NO: 4833 - DNA, 1176 bp, Homo sapiens
atgttcctgtccatccttatgaggctttggaggctcagcttccctcagtgttgattgatgagcttcatggattactcttgtatattggacacctatctgaacttcccagtgttaatataggagcatttgtaaatcaaaaccagattaaggtttgacttgtttcatttgatttttaaattatcagctttttctccccacaaggagtattcattcaagaaggagagaaattagtcagaattacagctctggaacctgactgcctgagttgaaattcttgccccccatcctccttttattaattgtgtgcttttgggcaaatgacacctcagcctccacatctgtgtaattcttacaacttaccagaatcattggatgaattaaataaattcatatacatgaagttattaaaacatagtagtcattgaatcagtagctattctcttgatttatgacagtataagtgtctgaaaattttaaagcaaatgaaataatctttattttctgaaatttttatcatatattacagtaagattcaagatcagcttataaaaaaaactttcaagaccacatcattatgtgtattctgacttttgaggcctttttggaatgtgattaagattgttttgactgtgccctttttttcctacctgtgataatcattccctctgaagtttggtttttaaaactttatattgttaccgtgcctagcttatagataagtaatagattctgcctatgaaaatgggagcttatatgaataacaaattatggtaattcacagtgagattccctgaagtctcaacccctttcattatatttgactttaccgttttgaataatatttactctttatgaatatatctttgttaaaatataaaaacggctaagcatggtagctcatgcctgtaatcccaacactttgggtggctgaggcaggaggattgtttgaatccaggatttgagaccagcttgggcaacatagcgagaccccatttctacaaaaaattaaaaagttagtccagtgtggtggcacataccttgtagtcccagctactcaggtggtcgaggtggggggatcccttgaactcaggaggttgaggctgtggtgagacatgattgcaccactgcattccagcctggatgacagagcaagaccctatctcaagaaataaaata

SEQ ID NO: 4834 - DNA, 1199 bp, Homo sapiens
ctaaaaacacaaaattagccaggcgtggtggtgcgtgcctataatcccagctacttgggaattgaggcaggagaatcgtttgaactggggaggcagaggttgcggtgagccgagatcatgccattgcactctagcctgggcaataagagcgaaactccgtctcaaaaataataataataataataaactgaacgtctttgaacagaaaagtttgggagctgtttcttcaaagaatatataaaaactataacaatgttccctgatttcaagtcactttcagataagttttgttctaaatcctgataagtggaacaaataaaataagcatagcctactgtgacggaagtgttaagctgagcgtctgtcttgacaacacggaaagttattttggtgacttctcaaagcaagtgggatttcagctagaatttctatcagatggaccgtttttcccctccctgggatgctctgtgcttgtagccccacaaaatttgttgtactccttcttctttttctatgtcaattagaacgccaacagagtttttaaacaataaagagatttattttcacctaaaaaaagtccgagcaggacagtgaccatggaagttggaatccactaaggagtgtgtaacaacccacctgccaaatcaactaaaaaaaaaaatccagatataggcacttgagaggttgtttaattcaatggttcctcaacattgtcaccctgaactaatttttttcatgccctttggttttgtcatcctcagccttgtctttacagtcatagcacatctgccacacaacagtgatcacatacagcagtttctcaactttggaagttggtatttggggctgaatcgttcattgttatggggggctgtcctgtgcattgtggaatgtttagcagcatccctgttttctacccagtagatgcccatagcactctccccacagttacaacaagcaaaagtgtcttcactcttcagtcactgccaaaagtcccatggggagcgggggcaaaatcatccccagaactgctcactatagatacaacagtcagtagcagaaaacagattgattttttttttcctccaaatactttagtttatgacctcgctcagaagttctcagcagacttcccctccatggcattggctagaattgtcacttgctcatgcctaaaccaaccacatacaaggtaaatg

SEQ ID NO: 4835 - DNA, 1147 bp, Homo sapiens
agtcagccaggtctgcgcggtgtgtcccatcctctgtccgcggtggccccagccaagggcctagctcgtggcctcagcacagagtctccttactccccaggccggcccaggagccgccccctgccctcatcagaggtcccgcaggtgcaggtgtgtgccagcagcccctcctgccctcccggccactgtccctgaagggcaagcagtcgtctaaaccttaggtccagatccagtctgtttgggcagttcccgggaaggcgggttaggtgccatcgtccgagtccctgcgccaagtagaacctaagtgggattcgcccgcgcgttcgggctcggcctcgccagcgcgggcctctagggaggtggcatagccaaagctgggccgcattcgaagacccggagtcccagggcgacatcgattgacgtttttcggccgtcacgcaggactgtctcatgaacgctgcatgaatttcgcccccagttttagtctggccgaaccccgccctccttgggtttctgccgtcttttcgcggctggctccaactcgggcagccaggttggcccgcaggctctatccctacgggaagcccaaactcgagggctggagctccgcgaaggcagagagagagagagagagagagagagagagagagagagagagagagagagagagagagagagagaaagagagagacagacagcggtgtgaccttcggcctccaccccacatttacagtaacattagtggattccctgggtgcggccgcggtgtctctggcccgggatcagcaggcaggagagatcagggcactgccgagtgcaggcacacactgtggggtccaggctgctgcgtggaacaagacctggcccggcgcgctcgccgatgccctcaggtcaaccacacaggctccttagccggagagggccgcaggcagggcgggcagcagtgccagaggtggggtcgggtgcgccttggtgcgtgaagggacctcctaccagtgactgctctaggagcttgattcgggctggttgcaccaatttccctctctttttttctctaaagagctcggctgcggaggcgcccggaggctgaacacgaaggccactcgacgcctcagcccggggaagacttgcacagtacacatttagc

SEQ ID NO: 4836 - DNA, 1210 bp, Homo sapiens
gttgttcatgtaatgaatggtggcttctgtgttcatcatcttcctagactccaatcctttaccatataattagatataagctccagaagcacagggaccagtgctaggcgagcccgttatatgtccgcagtgcctgtcacgtaattgttggatgatcacagactagcagaggagctaagtcaagcacaaaaatagtcaaaaataaaagataggcagtgataaacacttaagagagacgcatctgaattatttggatgcccaaaaggataaggcatcacagcacttgtatctggaagcagccaggaaaaactacttaatcgtaatagtaatgttcatctcttccacgtaggtatgagagtttctattttatttcttaaatgaaattttatgaaaaatgtataaacttttcaagtaattcagtagccacaaaactatattttaaaatgtttaaatcttagattttttcataagatctatctcaaatatttatactcagtttactcagatatacatatctaaatgctttcttgctcaccttcatttttaataaaagaatcaagagttcctgttgttgttttttttttttaataactccaccactttaaaattatcctgtcttctgtcctatcaattacaattccaagattgtctttaggtgttttccatggtttgcgtactttttaaaaatatttcttcaagccatattttttgaccatgtgatatgtattcctttattaaaatcaatattgttttaaaccatgatggcctttctctgttaagtttaaaatacttctctaacttaaaaataatttttcaggtatttcttttagtagtatcaggtttttttttttctgagccttgaaatgaatgatttcctttatcttagtatataattttttatgaggttatgttttaccttttcaggtggtattatttttgtccacatgtccatttctacaaaaagtctgtattgaccgccatatgaatttgctctcttctctgtttgaacatatggatactttcccttgaactgctgttgatttcttctgctaggtcatgtctcttttttcttcctaaagcatttccaggtaaactaaaatataaattcatcacttagaccacaagttttatcatcacccttttaagtgcattgctaaatatgtgtttttttaggctttttaccataaaacccatagcagtaaaataacca

SEQ ID NO: 4837 - DNA, 1223 bp, Homo sapiens
cttggggccatagctggagcagctgggatggaaggcaccaagtccctaggctgcacgcagcatggggaccctgggttcagcccacaaaaccactttttcctcctagacctctgggcctgtgatgggttgggctgccacaaaggtctctgacatgccccagagacattttcccctttgtcttggtgactaacatttggctcctcttttcttatgcaattttctgcagcagacttgaattgctacttagaaaatgggattttcttttctactgcattgttaggttgcacattttcccaacttttatgctctgtttcccttttaaaactgaatgcttttaacagcacccaagttacttctcgaatgttttgctgcttagaaatttcttccagcagataccctgaatcatctctctcaagttcaaagttccacaaatctctatggcaagggcaaaatgccgccagtctctttgctaaaacataacaagagtcacctttgctccagttcctcatctccatctaagaccaccttagcccagatttcattgcccaaatcattatcagcattttgttcaaagccattcaacaagtctctagggagatccaaactttcccacatcttcctgtcttcttctgtacccaccaaactgttctgacctctgcctgctacccagttccaaagtcattgcacatttttgagtatcttttcagtagcacctcactctactggtacaaatttactgtattagtccattttcacactgctgataaagacttacctaagactgagcaatttacaaaaaaagaggtttcacatacttacagttccacatggctgaggaggcctcacagtcatggcagaaggcaaggagaagcaagtcatgtcttacatggatggcggcaggaaaagagagagcttgtagagggaatctcccgtttttaaaactgtcagatcttgtgacacttattcactatcacaagaacagcacaggaaagacccacccccatgattcaattacctcccaccgtgttagtcccacgacacatcagaattgtgggagttacattacgattcaagatgagatttgtgtggggacacagccaaaccatatgatgcattatttcgttgtgcaaacattatagagtgtactttcacaaacctagatgatatagcctaccatgtacctaggctatatatgatatagcccttatatgggaccaatgtca

SEQ ID NO: 4838 - DNA, 1112 bp, Homo sapiens
atctggttttcccacttgtctgaagctctcctgatcttagaacctggagctgcagattcctccatgtcagctcccatcacggccccaaagacagagtcacttggttgctgagtcacttggttgctggaaaaatctttggggaaagctggtataagctacacactgacctgtccccagtgtttccaggtaatgacttggcactccagagaaagtttcatgctgttgcgtgtggtggctccaagccaagcacctggcatgcaggtcagcccttcccagcgggcgtggcgtcgtcctcttcacagatgccacgttgcagccccaaggcctcaccattttgcgttttttagaaacccattttcttggtcatttataaagctgctttatagatatctttgatcctggcatgccttggtttcctctcccttccctctttccaatcctggtttcctaacctcctcttgtagtaattctcaactcaactcaaagtcccaagaatttggaatggtaggatgctgtgcggggagctcgaggctgaggcataatcactgcttcggttctgctcatcaggggacacgctcccttactcatggcagccatgtttgattgtcacagagccccccgaatactctgtctatagtgacacactgtaggtgtcataaattttaagaaacctgcttttaagtactatttataggtttttctgttatacttgcaacctagttttaaaatacatgaggattttatgaaagctttatacagacatttataggaaactcattctttgattttaggtgccatttaaattgataacacttactttataaaaagatgctttttgtctggatagagccttatagtttaaaatatcttcatatattgccatttgatcaaataaatttcttacttagaaaatgtgtgtattttttatttcattcctcttacatatatctagcttgttcgaatgtcatgcccaaaggccaaggttgtggggatgggcctggtgcaggccattgtattctgagcagaccagcaggggcggtgcttgtgggtcggtcatacctgacttcaaaggtcctgccatcttggctgctttgactgtgaaaaaaaaaaat

SEQ ID NO: 4839 - DNA, 1167 bp, Homo sapiens
ttcctagtaatattcccaagagaactgaatatgtaattctgatatgcaaaatagggaaataacttgcgtccacacaaaagcttatacatgaatgttcataataggcaaagtggaaataacccaatgtccatcagctgatgaataaacaaaatactgtatgtatccttacaatggagtataatttggtcatgaaaaggagtgaattactgataatatgctacaaccttgaaaataccatgttaagtgaaagaagacacaaaagactgcacattatataatgcatttatattaattgaataaataactttgtgccaataaatttgacagatggacaaattcaatgaaaacacaagtcaccaaaaccgacataagaaataacagaaatgaatagctgttgataagtaactttgatttgtaattttaaaagcctcagagagtaaaacaccctgcacagatcgtttcattggtgaagtctataaaatacctaagaactagtcgggcgcggtggcacatgcctgttgtcccagctactcagaagactgaggtgggaggaacgcttgagcccaggagttctgggccgtagtgtgctatgccgattgaatttccacactaagttcagcatcaatacggtgacctcctgggagcaagagaccaccaggttacctaaggaaaggtgaaacagcccaggtcagaaatggagcaggtcaaaactcccgtgctgattagtactgggagtgcacctgtgagtagccactgcactccagcctgggcagcataatgagaccctgtctctaaaaataaaaataaaataaaatatttaagaaataatattacaaactttacaagctttgttactctgtacaaactttttccagaaatgagacacttgccaacttgtgttagaggccagaataaccctgatactgaaacctgataaagacattaaaagaaaattataagccagtatatttcatgatcatggatgcaagagccttcaacagagtactagcaaattgaatctcgtaataattaaaaaggatggtacacaccatgactgagttgagtttatcctaggagtacaaaattgattcaacattcaaatctcaatccgtgtaggccaggtgcagtggctcatgcccgtaatcccagtactttgggaggctgaac

SEQ ID NO: 4840 - DNA, 1222 bp, Homo sapiens
ggtttagtgcaggtatgaaaagaagcctgctaggtggcttctagaggagatttcccccacttctaagcaagttacacaggaaggaattatcatacctctatgtgacagctagaaatgtagcagtgactaaattcagtagcaaaggaatacactagttaaaccaactcagtctaccccttttgttttatatgtgataatatattttgttttttatcaggcttctgtgagttggactgttatttccaggcaaaaggatcctatgttttaagcagggattgtatcacaagcaaaatacatagaaaaggctacacttgccagcttttaattatgtaatacgtaagtatctaggaagaagagataggtcttttttggagtgcccgtctccgacaatacaaagcttaggaagcacaggtagattgcttttatctctcttgtcacttggagtcagtcaatgggcacatatgtttttccaaaaaggaaaactattaaggggagcagactgcctaacatttgtggttgacttttcacaatgtgtaagtctaatctatggccacaccaccctaaatgcacctgatcttgtctgatgtcagaagctaagcagggtcgggcctggttagtacttgaatggctgacaatgtgtaagtccacagcagttggaataagctttcaagtcctaggagtcttctcttgtttgctacttctttggcatatttgtgagcagaaggacaaggtgaacactaacttagggtactggaacaattaataaaaataggtcttgatgtaagacacattcatggtaagacgatgacagcatttcaactttaaggtatttttcagttgttacttaaattctcctgagctatatgtgtttctctttcccttcaaaaatactgtatttaaattcctaagaagatattagcctcacaggtagaaatgtatttttatatgtgtttatatatggcataatatattgtctttactgtacacaagtattactttcatagtatgaaactaaaggaaaaacaaaaagaaatatattgctgctaatgtacctttacattttatataatgcaaacaatagtgactttttaaaaaagtatgtacaggggccaggcacagtggctcacgcctgtaatcccggcactttgggaggctgaggcaggtggctcacttaaggtcaggagttcgagattagcctggctaacatggtgaaaccctgtct

SEQ ID NO: 4841 - DNA, 1176 bp, Homo sapiens
cttgcccctcttcccatattttacatcttccattttgacccatttttttttaattaaaaagaaacccttaaaaaaaatcattgggctctttgggggccattttacttagaaaaaaatctctttaaaagtgccatgttcgtgcacagtggctaatcatagcttcaggtggcatggatactgattttactgaccttgttttttacatctgattttggaagagtcaagatgccccttggatggcagtagaggggatggaatagtgcgaagtcctttacgaccacatgcaagttttcccttctgctctggtgccagggaaggcttccgttcagcttggcctgtccttcaggcgcgttggtagaatgttgtgtcactctttaggcgagaacactggatgatgatgatatgaatgtagacagccgtggaaacacgttcgcagtgtctccatctgagccgtgtccttccgctgcccccattccttctccatacatggttgctggttggagggagtggacatgtttccttggaaaacagtgcaggggcttttggcttcttgttagatttaagggtgggcctctttgagctcaccatgaactgtttacttttccgtgtgtgtatttgtacaaaatccaggttccgggagctttgtggtgacttccccagacctcagtgttagctactccaggcagtactacatcctcattcctcagggcgggcccaggtctgggcccctcttggggataccatgcattggaaggacacaggccattttagatggggtacacatgtcccttcccagggtccactcagaactttcctcttggactctctagaaggtcctgctgtcctatacctggccaccccctgccttggggggcacatgtcttcgttccctcccgactgggaatgtcaggctcctgcaggccagctgcatgctctccaggagcaccaactgggaaatcccctgacaggtaaagtcctttaaaatgatacttttacctacctaactctgggggccaaatgcttaagagggaaaggaaacagtcgaatgcaaacagtgtgtcataccagagtcctggaaaatttattgaatcacacagggtagtcatagaacccctgtgggatggcttaatattttgctactttaaaatgcagagataacagaaacaatctggattt

SEQ ID NO: 4842 - DNA, 1228 bp, Homo sapiens
ggttgcaggaaagcagttagtaaccacactctccatcatttttgctgttgggggagaaatcagtattatagctcttacattttgcaatggcatttgtactaatatgaagctttctccctccctctctctgctaatgggctggtcataaagaatgaatcaagtgtggagaagactgctttcccagacctcatctaaatcctaaaatctgccgttgacccacaggtcaaagctacttgccacatgaagctgcttttttctctgtattctttctcttttacctagaatgcctctgttcatataacatagagaagtaacacacttaatcttaacacagtaaacatctggcttttttgtcacaggcagaatttttggaaggccgcagtcttgagagtcagggtggtagaaatcagaaaaggacaaggaccctgtcctttccactgaccccttgaatgagtctctaaattcatctaggatttagcatctcccactttaacagggacacagtgacacctgctcctgtagtcacagtggggagaggggagcagagctgtgggccaggggcctgctgagttccatgaactgacatcagctagttcgtgtgttggatgagacttgatgaaaatgtgtggttttttttttttcttatgaaaaacttttcagagttcttgtttgcaaatgcagggtgttaggccatgtatgtctctaaggcactatacagctctgacattgtgaccctgccaccctactgtcagggcaaagaaggggggagatggaacataggctaggggtcagctctcccagcgggagggggaaacttgactttggggttctagaagctggacttccatccaccttttcctatttctggcaacccttcctggcaaagttattcatctgtaaaatggagatagtaataaatatttcagtagcattgctgtttgcttccaagtgaaataagtatataaaaatgcctggtgctgtatttgatgtaaattaggtgtgcaataaaatttgactcctagtctgggcacagcggctcatgcctgtaatctcaggactttggaaggctgaggtgggaggatcatgagcccaggagtttgagaccccatctctacaaaaaatttaaaaattaactgggcatgcctgtagacccagctactcaggaggctgaggcccaggagtttgaggctgcagtgagctatgatcatgcagctgtcctccagcctgg

SEQ ID NO: 4843 - DNA, 1577 bp, Homo sapiens
ctgggtgctcggttttggaccattctggttcatactctgtattttcttttctccctgcagaactccatccggcacaacctgtcactgcatagtcgattcatgcgggtccagaatgagggaactggcaagagctcttggtggatcatcaaccctgatggggggaagagcggaaaagccccccggcggcgggctgtctccatggacaatagcaacaagtataccaagagccgtggccgcgcagccaagaagaaggcagccctgcagacagcccccgaatcagctgacgacagtccctcccagctctccaagtggcctggcagccccacgtcacgcagcagtgatgagctggatgcgtggacggacttccgttcacgcaccaattctaacgccagcacagtcagtggccgcctgtcgcccatcatggcaagcacagagttggatgaagtccaggacgatgatgcgcctctctcgcccatgctctacagcagctcagccagcctgtcaccttcagtaagcaagccgtgcacggtggaactgccacggctgactgatatggcaggcaccatgaatctgaatgatgggctgactgaaaacctcatggacgacctgctggataacatcacgctcccgccatcccagccatcgcccactgggggactcatgcagcggagctctagcttcccgtataccaccaagggctcgggcctgggctccccaaccagctcctttaacagcacggtgttcggaccttcatctctgaactccctacgccagtctcccatgcagaccatccaagagaacaagccagctaccttctcttccatgtcacactatggtaaccagacactccaggacctgctcacttcggactcacttagccacagcgatgtcatgatgacacagtcggaccccttgatgtctcaggccagcaccgctgtgtctgcccagaattcccgccggaacgtgatgcttcgcaatgatccgatgatgtcctttgctgcccagcctaaccagggaagtttggtcaatcagaacttgctccaccaccagcaccaaacccagggcgctcttggtggcagccgtgccttgtcgaattctgtcagcaacatgggcttgagtgagtccagcagccttgggtcagccaaacaccagcagcagtctcctgtcagccagtctatgcaaaccctctcggactctctctcaggctcctccttgtactcaactagtgcaaacctgcccgtcatgggccatgagaagttccccagcgacttggacctggacatgttcaatgggagcttggaatgtgacatggagtccattatccgtagtgaactcatggatgctgatgggttggattttaactttgattccctcatctccacacagaatgttgttggtttgaacgtggggaacttcactggtgctaagcaggcctcatctcagagctgggtgccaggctgaaggatcactgaggaaggggaagtgggcaaagcaggtcagtgccgaatgctatggcataaaaataacaatatggggatgaggggggatctctgggggagcctgtcttctctttactt

SEQ ID NO: 4844 - DNA, 1186 bp, Homo sapiens
agcatcttatgtcattgagaatataaagaacagtgccttagaagacagtgaaaggtaagctctagcttaatgtctatgatttgttctttgacattaaggaaggtaaggattggtcagaggatgtaacttgatgtgagcagtagtaaacctgttttagatatcatactgttaatattttattgaaaatttatttcagagcggagaaacttaagctaaagtctgttatacagaattgaaagccttcgtatcttgaacctcccaacatttttcttatggctgttgaaaagtatagagctaaattgatttaattacactttcctttgtactttaaaaaaaagtatgctagcactattgtaccttgaaaggatttccaccagactgtcttgagtagtgacttctttggtgaggcaagaaggatatacattattttagaatcatttactatttaaatgagacaatcatattattttagaatcatttattttaaatgagacaatcattttaagttttaagataacagaagtgaccaatgtaatttcacaacacctaaggattttttggttgatcaggttactgtagatttttactgattgtcctggatgaatagactgtgctttttctttttctctcccttccttcttggtttcccatagtataataagcatgcatactttaacttctatagttttctcctttagagggtcgtcttcagttttagaggtttacttctcccttgcctttgactcattggactagtgcagaggctttaagtagtttaaaatgggcttttgcttttctaggtcattaacgttttttatttagtttctttagccaatagtggctgagtttcgcacttgattttcaatattttatagtaagaaatgacaaactgctttgtttcatttcataaacaaactctgcatttagataactattaaaggttgttaagatgaagatttactgtttctttgttactcgttggtacagctgtttgttttacttgcacatttgtacatatacttaatgttttcaagtgccttaattgtttaaaatctctggcttcaaagtttcttggggaaaggtcggtttacctcacattttttgtttccattagtaatattctaggtacctcacaaaatgtattatggtgccatggctgttagtttttagtgagtgctgtaggatt

SEQ ID NO: 4845 - DNA, 1200 bp, Homo sapiens
tatacaaggaattttgagcttcaagataacaagaaaaatgatatattttacaaaggaccaatccagttggtagactatttaaattatcctatatcaaattaataaggatttactttgccaagattcttggcacttttatattaacttaaattgcactgggaaaaaagcataatagtagttgagaagcaactaattataagcaattataagccaaattatgtttataccacaattagtgtttgaggtggtttagtaggcagattcttcagtaagaaccatcaaataattgaacagcttgtaaaacacagaaatacttcttttatctttattccaagtagagtaaccacattcttttatcattataaaataagcaacatttattatcttttgtcccaatccgcagtttgagttggatgcttataaaacatggcaagagggctgggtgcggtggcctcccagcactttgggaggccgaagtgggcagatcacctgaggtcaggagttcaagacaagcctggcaaacatggtgaaacctcgtctctactaaaatacaaaaattggccgggtgtgttggcatgcacctgtaatcccagctactcgggaggctaaggcaggagaatcgcttgaacccaggaggcagaggttgcagtgagccgagatcacgccactgaactccagcctgggcaacagagcgagactccgtctcagacaaacaaaacaaagcaagagtagtttatgtacctagctcacaacatagcttctttcaacaggtttcacggagacacgtgaaccacgttcttgtaagacaagagctattctacagggtatctagagtgcaaacccaaaccatgtctttttcagtggatttttcatgttgacatcatcttatttcactttggggaaagtttttttctaaggatgatagcgaaaagtccttttgtcttgtgacaatagcaatttttatgtcagcttgggtttttttcctcccatattcccaagtaaaagtaataactttgttaccagttttgccatctgaggttaaactgtttgaccatggcttgacgactattttatacttaacacttataaaatattagactgatagttatttaagttaccaccagtgatagctctggaatccctgttttattaatttccaggtaaatccttcttaagcacatgggaagatagcactgtaaa

SEQ ID NO: 4846 - DNA, 1207 bp, Homo sapiens
ctcagtctcctaaagtgctgggattgcaggcgtgagccactgcacccggcctgaattttaatctttaacttcataaggaaaggatggattgtcattagtactcaatacagtttttgttgttatgaattgatccttgtaagaaatctaaagcaatgtgtgcttaaccgatgcttaaaactaatatgttattccccccaaatttttgcttatatgactattaataagctcagtttagaaactactgttctagaaaggaatatacttggtgttaatagttgttatgacccatcatcactagactgggctttttaaaaaaaagagagagagagagagatggggcctcagtatgttgcccaggctggactcctgggccaagtgatcctcctgcctcctaatagcgagactacaggcatatgctaccatgccaagctaaaatatttgagttttgattttgccgagtttttgatatgtggacaatagttgattagcttcgaaaagtgatagaattctacatctaaagtcatctttttttttctttcttttcttttttaataaagagcttcttttattctcgtaagaatttcatgaagccttctcaccaagggtacccacaccggaatttccaggaagaaatagagtttcttaatgcaattttcccaagtaagtttaaataaaatataaacctgttgtcttcttaaagatagaaagtgcaacctcagagatctttctatatgagagcatacttatgcatatatagcattctacacacactaatacttgcttttcttgtgggttttttggtttgttttagacaggggtctcattctgtcacccatgctggtgcagtggtgtgatcacagctcactgcagcctcaacatcccaggcttaagtgatcctcccaccttagcctcccaagtagctggggctacagatgtttgccaccccacctggctaatttttttttaatttttagtaaagacaaggttttgccatattgcccaggccggtcttgaacgcctgggctcaagggatccacctgccttggcctcccaaagtgctaggattacaagtgtgagttactgcacctggtccatatttactttgacttagatgttttgggagtacagtagtgatctttatatagcttgtaattcaaaatatgcagaatttataaagaacattaaaatatcagataaaatattttta

SEQ ID NO: 4847 - DNA, 1125 bp, Homo sapiens
aagacagaaagagtgaggaccagaaagctctgctctctagctccgggctaaatgaatatgaggaagagaatgaagaggaggatgcagaaaaatggaatgaaatggattttgaaatgattgaaacgaatgatacaatgaggcattctataatagagacatctagaagtagtctgacggagcccacagctgaagtctataatcaatacccatcaaatgcactggtgtttgagtcttctccttttaatactggcagtgcccatgtgaagcacttgccagaaaccaggacaaaagggactaacgtttagagaagatggattactcactgacatctttgaataactgccacttctaaggacgccattcagagcagagcattagcagaatttcaccatgctttggggattaaaatttttaggtccatattatagcaaatgctaaaaatttttgaaatgttctgtaattcccagagtcttccataaataaccaaatggtctcatacacgtacaataggatcttgttataacgctatcatttgacatgtgactgattaggaaatattttatggtctccacccctcagagcacccaaagaaggcattgtttttgagaaggggggtattctcagaatgagaccatgtaggagttgaattgattggttgaacaaattatcaggtatcaatatttttccaggaaagttgaggagaatagtttcataaaagagaaatgggccgggtgcagtggctaaagcctgtaatcccagcactttgggaggccgagacgggcagatcacgaggtcaggagatcgagaccatcctggctaacacagtgaaaccctgtctctactaaaaatacaaaaaattagccaggcgtggtggcaggcacctgtagtcccagctacttgggaggctgaggcaggagaatggcgtgaacccgggaggtggagcttgcagtgagccgagatcatgccacaccgtactccagcctgggcgacatctagactccgtctcaaaaaagaaatggagaggtatttttattaattgctttaccttatctgtagggttggatcaaagaatgtaatgactcatttgatttctaatttcaatgaagagaacacagaacagggccc

SEQ ID NO: 4848 - DNA, 1167 bp, Homo sapiens
tggtcatagtggctcacgcctataatcccagcactttgggaggctgaggtgggcggatcacctgaggtcaggagttcgagaccagcctggctaacatggtgaaaccctgtttctactaaaaatacaaaaaattagctggacatggtggcgcatgcctgtaatcccagctactcgggaggctgaggtaggagaatcgcttgaacctgggaggcggaggttgcagtgagccgcaatcgtgccatcgtactccagcttgggcaacaagagcgaaacactgtctcaaaaaaaaaaaaaagtcatacaatcttattctgaaaagcagattatcctcaaatgattatatattcaaatgaccaatatatttaactgtgtttcttctcttctcacctccctttctccctgcagtaccgtgtggaatcaatgatgttgcgtattgctaaaccaatgaactatattcctgtgacacctagtgttcagcaaagatcccagatgagagccccacagtgtgttcctctaattatggagcctgaatcccgcttctatagcaactctgttctcgttttggatttccaatcactttatccttctattgtgattgcatataactactgcttttccacctgccttggccatgtggagaacttgggaaagtaaggtttttttcacatttacaataatattgttgtgctttgtacttcttactaaaattagacactttctgagtgtctctttgctctggacaccttccctatgagcaagataaatggactgtatcccagctaatccattcattatagttgtcttaccaattgacatggatcaccatatgattaatccagcttcatggatggatgactcatgaagaggattgggaataggtcagccttgcaactgtttcactccatatgtaactatagtctcttttaaaatgaaagttaaattgttgatgtaaattacctttcagtggaacagtttgaggattatgatcttataacttcaactagacctcctctttatttttcttataaatagtccaggattttaaaaattaaatgttaggttttattaattaatgtaaattaaattttataaactgataataacattttaaattctcaaaggattagatacttttcttaaattgtaggaaataacggagtcttcctt

SEQ ID NO: 4849 - DNA, 1170 bp, Homo sapiens
attagaattcacgcaattaaagataatctagggccaggcacctataatcccagcactttgggaagcagaggcaggaagattgcctgagcccaggattttgagaccagtctgggcaacatggcaagaccccgtctctttaaaaaaaaaaaaaaatctaagtgaaaaatgattcaagtctaaataggttgggttaaagtaggttttagaggatgttgtcattggtgctggatatttcaaagaaatagtttgaacttacttataaagtaagaaatgggccatggtatgaggtatgtcactctggtatctggctgccattttaacatcatagtgataataagaggaaataatgggagttaaggaacagtaaactttgggtgaaattgtgttaacttgtaatttccatgtagatacagataaggcaggaatgagtgtcttaggcaattagaaataactcagtctactgtccaaacatgatgtggattttgagaccaaaacaaattataagtaaaagtaagaccctcttaatgacagcctatttaacctttttggtgtttttgtttggtgtgtgtgtgtgttttctgtcgttccttctaagttttccagatgatcttgtgtttcttccagctctctgtgggtttttaaatatttcattttataaatgaaaaatactttgttgtttaattagcattggtaaactggactgttttctgtagcagaaattgaatacaagcctagcaaagtaaattctgagaaaaatgagtagtaattgtcaatggaaaatttcgtggtttttttttttcttttttggccaattctatttttttagatgatagttttgggaaatactaagaatttgagctcaatttactttggggcagttatttaattttctttgggttcagagagcattactactatataaacaattcaaataataaaagagtgttacctcaaaaatgccttgtgtaatatataacagttcacaagaatactatttttcttccatttattacgattacaaagaagtataacaagaattaaaagaaatatattattttgcatatatatttatacttcaaagtaatttatatactaaattaggttttgtttgagatggtgaaatgaaagactttgtaaataagaatacatgttgatatgtgaaaaatgtaa

SEQ ID NO: 4850 - DNA, 1177 bp, Homo sapiens
ctcaatagttacaaagccaacttacagaaaaagagaagccatttaggactgcacaatctattaatactttctagggcacaggtctcctagaccaggggctcccaactcccaggccacaggctggtatcagtccattgcctgttaggaaccaggccacacagtaggaggtaaacagtgggtgagtaagtgaagctctgtctgtatttacaaccactccccatcacttgcattaccgcctgagctctgcctcctgtcagatcagcagcagattctcacaggagtgcaaaccctattgtgaactgcgcacatgagggatctaggctgcacgctccttatgagaatccaaggcctgatgatctgtcactgtcttccatcacccccagatctagctgcaggaaaacaagctcagggctcccactgattctacattataatgagttgtataattatttcattatatattacaatgtaacaataatagaaataaagtgcacaataaatgtaatgcacttgaatcatccccaaaccatccccatccccagtccatggaaaaattgtcttccatgaaactggtccctagtgccaaaaaagttggggaccactgccctagactgtcttaattctcttctgctgtccatttgttttgggggttttttggtttaatcggtgtctccctccagaagtaggaaggagaaacacaaggtaaaagaggagaaactttgccagtggccttaaaagcctttatgaggaaaaagctgaaagtatcttgagaagtttttaatgtttgaagccatttttcttcctatatccattaatgaatggctaatattgttttatttgctttaaaaggactaccaagctctaatcatagggtttatttcttttccagaaagcggatgttggtgctgttaatcaaaagcctttgaatcaaggtcatatgatttctaacagattatttccctcacaacatgtctttgtctcacagcaacaaatcatatcattaaaatcaccaaggcatgtgggctaagtgtttgattagctgtaactttcatttcagaaacggccacctgtggtaaaaagttatgccagtttatgtgagcagatgaaaatgatacacctcatcaatttttaaaattagggtactgacaatatagtcctccatgctgtccttttattg

SEQ ID NO: 4851 - DNA, 1196 bp, Homo sapiens
ttgtgtctggcttccttcacttatcatgttttgagagtcattctgaatttttcatgtctcagttctgcactccttctttactcctgagtagcatggcagggtttgactcctggggggatgggagtactccgcatgttttagccacatgcagacgcaaagaagaagaaaggggatctgcaagtgcggcggtcagggcctggatccccggggtgcccactctcactgcgcttgtctttgcaggcatgaacaaccgggaggtgctggagcaggtggagcgaggctacaggatgccctgcccgcaggactgccccatctctctgcatgagctcatgatccactgctggaaaaaggaccctgaagaacgccccacttttgagtacttgcagagcttcctggaagactactttaccgcgacagagccccagtaccaacctggtgaaaacctgtaaggcccgggtctgcggagagaggccttgtcccagaggctgccccacccctccccattagctttcaattccgtagccagctgctccccagcagcggaaccgcccaggatcagattgcatgtgactctgaagctgacgaacttccatggccctcattaatgacacttgtccccaaatccgaacctcctctgtgaagcattcgagacagaaccttgttatttctcagactttggaaaatgcattgtatcgatgttatgtaaaaggccaaacctctgttcagtgtaaatagttactccagtgccaacaatcctagtgctttccttttttaaaaatgcaaatcctatgtgattttaactctgtcttcacctgattcaactaaaaaaaaaaaagtattattttccaaaagtggcctctttgtctaaaacaataaaattttttttcatgttttaacaaaaaccaatcaggacaggtgtttgtttttgttttcttttttataaatatgaatatatataatatatatgtccctgtacatatacaatgtgggtgctaatgtggagactgtggccggcctgagccaccaagctgcgggacccagagggaggattttactgcaagtcagcatcaaagcaccggtgttattctgaaaacaccagtggcctcatttttggcttttgcaaagcatgaattttttcatttggattgcactttcctggttcatgactgtacctgtaggtggttgttactttgact

SEQ ID NO: 4852 - DNA, 1219 bp, Homo sapiens
cagcactttgggaggcccaggtgggcggatcacgaggtcaggagactgagaccatcctggctaacatggtgaaaccccgtctcactaaaaatacaaaaaattagccgggcatggtggcgggcgccaccactactccgagtagtctcagctactcggaggctgaggcaggagaacggcgtgaacctgggaggcggagcttgcagtgagccgagaccgcaccactgcactccaggctgggtgacagagcgagactccgtctcaaaataataataataataataataataataataataataataataataataaataaagtttaaaaaccctaatgaatctgggaaaaatattcatgatgtgttgttactttgtggagggaggtgtgacattaaaaatcagtttaaaaagtttgaaggcactacactaatgggacaataattattatctctgagaattgagattgctgccacttttttcttcttctcactaatctatggtttctaattccaataattaaaatgccgtcttagtaaatatgtagtgctcactttggcagcacatgtactaaaattggaatggtacagagaagattaccatggcccgtgtgaaagtatgacatacaaattcgtgaagtgttcctgaaacctgcacatatcaatattcacctgaaattgaatgggctaaatgccccaattaaaaggcacagaatggctactgaataaagaagcaggacccaacattatgctctcttcaagagacccgtaggctcaaagtaaggggatggattaaaatctgccaagtgaatggaaaacagtaaaaagcataagctgctattctaatttcacacaaaacagactttaaaccaacaatggttaaaaaaaggacattaaataaacataaagggtttaagttaacaagacataactttcctaaagaaatattcatccaacacaggagcacccagattcataaagcaagttctttagagacctataaagagacttaaataaccacacaataatatttggagatttaaacattccactgacagtattagatagatcattgaggcagaaaaattgacaagtggaacctaattacactaatttaactaaagagcttctgcaaagctagaaactatcaacagtgtagacagacaacctagagaatgggaggaaatatttgcaaactatacaccctgcaaaggtctgatatccag

SEQ ID NO: 4853 - DNA, 1218 bp, Homo sapiens
atacacacacatacacataaacacacggaaagatgggggaggggagcgagtggagagagagagacacacggatatagaccgacgagagtcaatgcgagtcaagttaacgctttctccgccccgatgcacaagtacccccctcccgtgttaattaattccaaacaaagcaagccaatcaagaaatgcattattattttcaagcagagagagacgagtgccatgtattttttaattgatttatttatttggaggacattaattctcggtctgaggctgattttcaaaccgtttgcaaagcgcggctccattgttcgccaggcgcgcagaccccgccccctgctttgtgtgcggcgcgcggattggccgacgcgcgcgggggccgcgtcagcgcccgcgagcccattcatctgtgcacttgggcgttggaccccgcatcttattagcaaccagggagatttctccattttcctcttgtctacagtgcggctacaaatctgggatttttttattacttctttttttttcgaactacacttgggctcctttttttgtgctcgacttttccaccctttttccctccctcctgtgctgctgctttttgatctcttcgactaaaatttttttatccggagtgtatttaatcggttctgttctgtcctctccaccacccccacccccctccctccggtgtgtgtgccgctgccgctgttgccgccgccgctgctgctgctcgccccgtcgttacaccaacccgaggctctttgtttcccctcttggatctgttgagtttctttgttgaagaagccagcatgggtgcccagttctccaagaccgcagcgaagggagaagccgccgcggagaggcctggggaggcggctgtggcctcgtcgccttccaaagcgaacggacaggtaaattctacctgtggttgtggtcatttatttcgtgtctttctctccttccctcctggtggctcccaaggctcattcgtggagaggagtgtggctggattctagtctgaaagttgaatggaaatggatagcctaaattgtggatttttcatagccggggtccccccacaccaaaggagtggttccttagaatcctggagaattcttgagtagacgggaggaaaggagtgataaatcgtctaaaatggcgtggtttggagattggcagaacgtgactagctaggtgccctccttcccccgcccccag

SEQ ID NO: 4854 - DNA, 1164 bp, Homo sapiens
ttttttattttacttttttttaagcaccaaattttgttgttttttttttttctcccctccccacagatcccatctcaaatcattctgttaaccaccattccaacaggtcgaggagagcttaaacaccttcttcctctgccttgtttctcttttattttttattttttcgcatcagtattaatgtttttgcatactttgcatctttattcaaaagtgtaaactttctttgtcaatctatggacatgcccatatatgaaggagatgggtgggtcaaaaagggatatcaaatgaagtgataggggtcacaatggggaaattgaagtggtgcataacattgccaaaatagtgtgccactagaaatggtgtaaaggctgtcttttttttttttttttaaagaaaagttattaccatgtattttgtgaggcaggtttacaacactacaagtcttgagttaagaaggaaagaggaaaaaagaaaaaacaccaatacccagatttaaaaaaaaaaaaacgatcatagtcttaggagttcatttaaaccataggaacttttcacttatctcatgttagctgtaccagtcagtgattaagtagaactacaagttgtataggctttattgtttattgctggtttatgaccttaataaagtgtaattatgtattaccagcagggtgtttttaactgtgactattgtataaaaacaaatcttgatatccagaagcacatgaagtttgcaactttccaccctgcccatttttgtaaaactgcagtcatcttggaccttttaaaacacaaattttaaactcaaccaagctgtgataagtggaatggttactgtttatactgtggtatgtttttgattacagcagataatgctttcttttccagtcgtctttgagaataaaggaaaaaaaaatcttcagatgcaatggttttgtgtagcatcttgtctatcatgttttgtaaatactggagaagctttgaccaatttgacttagagatggaatgtaactttgcttacaaaaattgctattaaactcctgcttaaggtgttctaattttctgtgagcacactaaaagcgaaaaataaatgtgaataaaatgtacaaatttgttgtgtttttttatgttctaataatactgagacttctaggtcttaggtta

SEQ ID NO: 4855 - DNA, 1280 bp, Homo sapiens
catacacctatatcgagttgcatcagtagtttcatacactggtaagtctacaggtataaccatttaactaatttatcatgctgtaaagtgctggcatgtcaaagcatttatattttaaaatagatattttaaaaattactttccttttatttttcctttaaattacaagtaagtttgctcttcctgtctgtgccagggtggcgcatggtctacgtcgagcaacagagacactcaggctgtgttctcacgatgactgagtgggagacagcagcaccagcagtggcagagaccccagacatcaagctctttgggaagtggagcactgatgatgtgcacatcagtgacatttccctgcaggattacattgcagtgaaggagaaatatgccaagtacctacctcacagtgcagggtggtatgccgccaaatgcttccacaaagctcagtgtcccattgtggagcgccttactaactccatgatgatgcacggctgcaacaacggcaagaagctcatgactgtgtgcatcgtcaagcatgccttcgaggtcatacacctgctcacaggcgagaaccctctgcaggtcctggtgaacgccatcatcaacagtggtccccgggaggactccacacgcattgggtgcgccgggactgtgagacgacaggctgtggacgtgtccccacttcgccgtgtgaatcaggccatctggctgctgtgcacaggtgctcgtgaggctgccttccggaacattaagaccattgctgagtgcctggcagaggagctcatcaatgctgccaagggctcctccaactcctatgccattaagaagaaggacgtgtggccttcttggagcatgtggccaagtccaaccgctgattttcccagctgttgcccaataaacctgtctgcccttcagggcagccctaccaaaaaaagcaaaaaaattacaactaagttattataatgactttaaaaaatgtgcatgttgatatacaatatgaatttcaagaaaggaaaagggagttataaagcacgttataaaaagaaatatctggccaggtccggtggctcacacctgtaatcccagctctttgagaggccaaggcgggcagatcacctgaggttgggagtttgaggccagcctggccaatatggtgaaaccctgtatctactaaaaaaaaaaaaattagccgggcatggtggcaggtgcctgtaatcccagctacttgggagactgaggtagaactgcttgaacccaggaggtggaggttgcagtgagccaag

SEQ ID NO: 4856 - DNA, 1223 bp, Homo sapiens
gcagaaaccaagacctcatctgcagcttcttcacttggttttcagaccacagccttccagagtccgacaaaattgctgagattattaaagaggatctgtggccaaatccactgcaatactacctgttgcgtgaaggagtccgtagagcccgacgtcgcccgctaagggagcctgtagagatccccaggccctttgggttccagtctggttaacatttgcccttgggaatactcctgcacaaggtctcctaccaccttctgctggacctgtgcttgggcatcagcaatgagtatgccttctattgtgctttgtttttgctgacttttctgcaccctgtttcctttggatattcagttctctcaacctcaagattgagacggtggtgggtatgcttctccacttccatatgaccttcatgctgttctggaatatcacatgctacgaggtcatccttcacactacttgtaagccaagcaaatgatactgtagattgtactgcctttatctgcactgcttggaccctgtttattcccagggcctctgaactggttgctgtcacttggatttctagctttgggagcctgttccacctactcagctctgcattgagcagtatgggcacatgccctgtggacagttactggacgttaatgaactcagaggagaaaagcagtgagccacttgttctgtgtgatttatggtacttcattgctcttccttcacctctagtcactttctattgctacctgccctacattggctcctgccaaggtccctctctctccctgttttccttttttttttttttttttttttttttgagacggaggacggagtcttgctctgtcgcccaggttggagtgcagtggcgcgatctcggctcactgcaacctccacctcccgggttcaagcgattctcctgcctcagcctcccgagtagctgggactacaggcgcgcgccgccacgcccggctaatttttatatttttagtagagacggggtttcaccatgctggccaggctggtctcgaaccccgatctcgtgatccgccctccttagcctcccaatcctctcttaaaaaagtgatagctcagaaacatttgtaaaagcaaggtttttatttcattttggctctgtcattttcagaggcaaagaagttggcctgtaaaatagagtgctagagctcttacgcccctccccttcttcccaacttcctacttcc

SEQ ID NO: 4857 - DNA, 1121 bp, Homo sapiens
ttctttttctttctgcttctcagtttgaataatttcaattaacctatcttagggttgtggattctttcttctccctgctcaatctgctgtcaaacccctatagtgaaattttaatttcagttttatacttacagcttcataattcctatttagttcctttttataatgtctgtttccatagtgatgattctctatttgttgagacattgtttttctagttttctttagtttttttgtgcataggtcctttagctcttttgaacatgttagacaatgaatttaaaatctttgcatagtaaatccaatgtctgtgatttctcagggaaaatttcttttaatttatatatttcactgttaatggaccacacttttaaaatttctttgcatgcctcataatttcttgttgaaaaactggactgattattgtaactatggttaactatggaaatcagattctcctctccttccaggttttcatgttgctgcttgttgtagttatttatttggggacttttaaaattaattttataaagcctctattccttgtcatgcgtggtctctgaaatctcttttcccttaactcagtgggtagctagtggtttgacagcagagagtgctttaaatatctggagccaaaaataaacaaaaagaaaagtctccaggtttttacagattggccctgcattgagccacctcttcaattcttagtcaggctgattacagctatgacttagcactactttactccctgcttgtgctaagcctaaaggaaaactagaagtaaaagcgtaggtctcttcatgttttttctgattgtggactctgccctggacatgtgcatgggccttcagactgtctgatacatgtgggagcttttcacatccctcatagcccaagtatcttactccccacctttccagccaggttttcaacatgtgtcttgtttgcctcaactgtatcttttgttgaggtttcaacatctcattcatttgccttttaatgtttttgaggaccattctttatttacaaagctacttttccaccctgagagaattcccagttatgcaaaacaaaggcaagccctttgcatcagtttttcagggaacctccaaacaggtcaa

SEQ ID NO: 4858 - DNA, 1135 bp, Homo sapiens
tttttaaaaaactataaactagaaattgagagtcttgcattctcttttgtatttgattattgtgtctggatataaattacaatagcacatgaaaataaaatgttttaaaaaattatagtccacattcagttattcttaatatttaatgttggcccaaattcttcaaataattttatgctcatctctccctcatctagtgattcaaggactgttaagtgaattttagcatgacgtatccagatgattgcaacaaataaaatgtactctgaggtcaaactattagcaatatctgctattgactgttcatagtccccttcattagtattagtaatttaagttgctgttacaaggacaagaaaaacatctggcttggaaaaggcaatcctggaaaaaaagaaaaattcagaatatggataaatgctaacagcatagttctgtccttgtatagagtaatgtttccattccgataaagatttatttcaattgctatatcttatggatttggttctatgagtgctttattttaataaatgtgtatttttcagtgttaatttatcagtaacagctatacttaataagtgccttaaatttctttcttcttttttttagagatgagatctcactgtattgcccaggctaggcttgaattcggtctcaagcgatcgtcccacttcagcttcatgagtagctgggctgacaggttgtgtgccaccatgccaggcaaattttttattttacgtgaaatagaagtagatataggtaatgataatagtaagcaactgttatcaccatgtattttacttagatttcagacaattagaaaataggacattcagaaaaatgtggaagctacttacctggggatgtttgacatggcattcatttttctagtgcagtggttctcacctggagtgattttgccccccagtggacatttgacaactggagacatttttgtcacaactcaggaggtatactagtggtatcaagtgggatgaggccaaggatgctgctaaacatgctgcaatacacaggacagcccttgcatcaaagaattagcctcaaatgtcagtagtgccaagtctcagaatctttggtctagtgtgatttctataattttgtcacttaatttgtg

SEQ ID NO: 4859 - DNA, 1197 bp, Homo sapiens
actagggacagttttgtggtagacagtttttccacggatggtgggggaatggtcttgggatgaaactgttccaccttagatcatcagacattagattcttataaggaatgcgttattagtccattctcacactgctataaagaactacctgagactgggtaatttataaagaaaataggtttaattggctcacagtttcacaggctgtacaggaagcatggttggagacagctcaggaaacttacaatcatggaggaaggtgaaggggaagcaggtacatcttcacatggctggcgggagagagagagagttaagtgggaagtactacatggtttcaaacaaccagatctcatgagaactcatttactatcacaagaacagcaagggggaagtctgcctccatgatctagtcacctcccaccaggcccctcctccaaccttggggattacaattcaatgagatttggttggggacacagagccaaaccatatcaattgcggaaccaagatttctcacatgtgcagttcacaatagggttgtgctcctataagaatctgatgctgctgctaatctgacgggaggcagagctcagactgtaatgctcactcacccaccactcacctcctgctgtgctgcccaattccaaacaggccaccaaccagtaccagttcatggcttggggattgaggagccctacagtagtacacaggacagccctgctcaacacagaattatccagctcaaattgtcaatagtcctgtagttgaaaagcctaatattgagacagaagcactggtctgagggacaagagacagatatctttatttgtctctgcttcttagaggtcaatcagaaaaagaaagaaaaagtgctttgaattctcagaatgatcaccttatacatatcctgacattttaaaaaatgatattaatatttgtaatgttgttaacaacagggttaatggcatgcatagatctttaagcaaaagaaagaaacctggaaggaaaggattaaggaaaaaaaatcttttatattaatgaccaagatggagagaaggaaaaagcaggaggtaaaggaataggagaggaaaatgacagggacatttgtagttacttgtttatttaactacatttgtgatactttttaccttgtagtaaacttagcaactgtcattttattcatctttttcttgaact

SEQ ID NO: 4860 - DNA, 1155 bp, Homo sapiens
tcctcagctgtatttggaccactctcagaatcagagctacttatttctgctcttagctgtattccaatgaccatgataatgaggtggtctttccaaccctatgaagacttgtgagcacaaagctttcagttacatacagactgtcaaagcatgagttgtggccagttgacaataggagagaagggtctcttgacctttggtggtcaaatcagtttgccagcctactcttccaagccacacttctcatagccttcaagccttcaagcatgcacaaagtctttctgtatcagggaactgcgctccccatcttgcaaactcctattcatttttcaaaatgtagcccttctctggtcttttggctaagccctttccccaactgggtaatgcacatccatctctgattaatcctttcataggattgtgattactgactcttcactagactgggtgcttttatccaaaggtagagttaatgtcttactcatatacttatccatagcctctagcatactgacatatagcaagggttagctaagtgttttggagtgaatgaatcaatgaattgaaaacaaaaaaaaagtgaaatactgtctgaatatgtcaagagccagtgctagaatatgagtcactcttttcatggttttgcacatgagaaggctggcagatgtgatccgcaaggtcagttcttcaccgccagatcattttggcagtctttgaacagctcttctgcctctctgacttgccttacatgtttgacaatcaacacattcgtcaggatttgtcttgtcaatcagtgattctcaacctgactgcgtattcacatcatctggagagcttttaaaaagtcctggctgggcgcggtggctcacgcctgtaatcccagcactttgggaggctgaggcgggcagatcacgaggtcaagagatcgagatcatcctggccaacgtggtgaaactctgtctctactaaaaaatacatgaattagctgagtgtggtggtgcacacctatagttccagctactcaggaggttgaggcaggagaatcacttgaacccaggaggcggaggttgcagtgagccgagatggcgccactgcactccagcctggcaacagagtgagacttcgtctaaaaaaaaaaaaaccagaaaagtccta

SEQ ID NO: 4861 - DNA, 1207 bp, Homo sapiens
acaaggagagacagaaaatttgagaacttctggttgctacaaaatactggagaacacaccttacatttttagaacataggagcttatgaggccttccagtgactagatatgtgaagcaattgtcctgatgccatccattcttggttaactgcaaataaaagtctttatgcccttctctttaaaatgtaggcatttctttcctttcataggttaagatatgccttttttgtttttttaagacaagatcttgctctgtcacccaggctggagtgtagtggctctaatatggctcactacagccttgacctcctgggctcaagcgatcctcccgcctcagccttctgagtagctgaaattacaggtgcacacaccactgtgcccagcaaatttttaaattatttgtagagacaaggttttgccatgttgtccaggcaggcctcgaactcctgtgttcaagaaatcttctcacctcagcctcctaaactgctggaattacaggtgtgagccactgcgcccagtcaagataatgcttttgaaaataaaagttgatatggcttgcttgtttcctcaggtctgacggtaactgctgtaaaagactcaggagaatggaatttggaggctggggcattagttcttgcagatgcgggcctttgctgtattgatgagttcaatagcctcaaagagcatgataggaccagtatccatgaagcaatggagcaacaaaccataagtgttgctaaggctgggtaagagtttctttaaaatctatgggaataatgagattatttaatatatgcttaggggaaaatgtgaaccttgttgagctataaggtatgtttggtcctctttgggatgatcagttaccacccttcaagacacacattagagtttttccttattagaccacagaagtgtgtgaggaaataaaaatgagctattgggaaagagaaaaggaaaagtaaagtataaatgtggttgactaaactagtggaagggatttttgaagagctttcaatgcaggattcaactcattctctttttcattcagtaaacattgtatgtgtactctgggcatatttctgtgttaggaattttgaaaagttcaaaaagaaaaaagaaatcatagtttccagcattctccttataaatcctcatggaaggttgattacagcatatggaatactaaatagtaaataatgtaagcata

SEQ ID NO: 4862 - DNA, 1231 bp, Homo sapiens
gtgcttagcatcaagtcctcttatttaatacccagcttatggctcttctactaaaactgtcctgaccagctacccttgttgggctttccttgctgtgcgttagcattgattgttggtacctcttacttgatacttaataatgcaaacttgcaaatactgtttattgtgtttataaatatactttgttttcataatttgactgtaaggttctcagctctagggactgtatcttttattacatgtaaccttaatatgaatggtttgcacatagtaccaaagcttaataagtatttactgaagaagatggtggtcataatgatacagcaagtaattttgttatacagcagagaaagacagtactttttaggaattgtatctgctactcttctgggttaatgatagatcatttcagctgagttaaattattcctaaatatgtaaatgtttattgactgccctttaaactgcttcaaaaagctattttatttcttaatgtatttttgatgtaaaaaatacaaatataatgttctttgtctacattataagtatttgacacttcagaatgtaggtaattaatatactagtttcttagcaaatataaaaaagccttgtgatcagtcattttatactaactctgcttttactatatccaaaaccagaatgtgtttatataacaccaaaaccagtgaatttttcaaataatactattttctgtacatgaaataaatgatttttcactaattggtttgtttgaattatctagatactctttcataataattctatattgcttatgacttgagtctttgaacaagaatggtaagtggcctcataaaacatagcaattggctgtgtttcaccttagcactagtacatgccaaatgcagcatctctttttctttgttacattgtagctttgccatgctgttatgcagtggcttggatgtaatcttttagtcatagtggagtggtttggattaatttgttgcattttactaatggacacaaaagcatagtatcctgttaattaactggtcacaaacttataaagggacttcctttagagttaaagatttagagttaaaggttaaaggtttaggttgggtgccctggctcatgcctacagtcccagcactttgggaggccaaggcaggcagatcacttgaggccatgagttcgagaccagcctggccaacatggtgaaatcccgtctttacaaaaaatacaaaaaa

SEQ ID NO: 4863 - DNA, 1226 bp, Homo sapiens
acacttgtcttttgaatggtgtgacaattgatgtagcatcttcaaagctgtgtacgaacaagaggcactataaggttataaatactaaaggaagatcatcattattcatgtgatggaaataatcattcagttaaacaccagtaagaacatcattagatttagaagtacatcgctatcttttcatgctatcttttcatgtgagagatcctttctacagaaagtaataaaggaatccaatttgtaaagaagtatttttactaatagaaccatttatttctggtctactgatataatgccataatcttgttatcataatgtagacaattttgttaacgtgatgattctgtcagcataatgggaagagtaaatactaggatgacagtataaatggagaaaatctctacaaaagtagatctcccatctctctttctgaggctgtgtttattagaaacataagttataaacataacctgaaaaattccacacagttattacttcacaataataatattgttcacaaaaggttcacagaaattacagtgttagtctacagccataccaccctgaacacacctgatctctcatctgatctcggaagctaagcagggccgggcctggttagtacttggatgggagaaattataaggttaaaaagtaatcgtgagtatctaatgatagaaatgttcctatctaagcctgttctcactttccctttttttttcataaaatgtgtgtggcataattatgctagcagtttacatgaatgaagtgaaatatttctaaatcataaagtaagtttatgcaatcccttagcaccagatataactggtagtcccattcaattatgtcgaattgaatcacctgatttttaagttcaaagatactgccttcagtacttttggcatctgcacattgcacattaaaaacatcaaattctcaagatacaagttcctcatatcagtgtcctttgtggcaacatggatggagctggaggctgttatcccaagcgaactaatataagaacagaaaaccaaacactgcatgttctaacttataagtaggagctaatcactgagtatacatggacacaaagaagggcacaatagacactggggcctgcttaagggtggaggatggcaggagtgtgaggatggaaaactaccttattacctgggtgatgaaacaatatgtacaccaaacacttataacacgtaatttatctgtag

SEQ ID NO: 4864 - DNA, 1251 bp, Homo sapiens
aaattcagacaaggcccacagaataagattttccatgcatttgcaaatacgtatattctttttccatccacttgcacaatatcattaccatcactttttcatcattcctcagctactactcacattcatttaatggtttctgtaaacatttttaagacagttgggatgtcacttaacattttttttttgagctaaagtcagggaatcaagccatgcttaatatttaacaatcacttatatgtgtgtcgaagagtttgttttgtttgtcatgtattggtacaagcagatacagtataaactcacaaacacagatttgaaaataatgcacatatggtgttcaaatttgaacctttctcatggatttttgtggtgtgggccaatatggtgtttacattatataattcctgctgtggcaagtaaagcacactttttttttctcctaaaatgtttttccctgtgtatcctattatggatactggttttgttaattatgattctttattttctctcctttttttaggatatagcagtaatgctattactgaaatgaatttcctttttctgaaatgtaatcattgatgcttgaatgatagaattttagtactgtaaacaggctttagtcattaatgtgagagacttagaaaaaatgcttagagtggactattaaatgtgcctaaatgaattttgcagtaactggtattcttgggttttcctacttaatacacagtaattcagaacttgtattctattatgagtttagcagtcttttggagtgaccagcaactttgatgtttgcactaagattttatttggaatgcaagagaggttgaaagaggattcagtagtacacatacaactaatttatttgaactatatgttgaagacatctaccagtttctccaaatgccttttttaaaactcatcacagaagattggtgaaaatgctgagtatgacacttttcttcttgcatgcatgtcagctacataaacagttttgtacaatgaaaattactaatttgtttgacattccatgttaaactacggtcatgttcagcttcattgcatgtaatgtagacctagtccatcagatcatgtgttctggagagtgttctttattcaataaagttttaatttagtataaacatagcttctatattccgtgtgatttgtttcccctgccgagatggagtcttgctctgtcacccaggctggagtgcagtggcgcgatctcgtctcactgcaacccttgcc

SEQ ID NO: 4865 - DNA, 1181 bp, Homo sapiens
gttttgttgtttttaaagactcatctaaatttaatcaagttgctcctccctgaaggcagtatcaggtcacagagaacttgtttgaagacatttggtttcagctaccaaactgagtgaagggacacgacctgagtgatcaggttagatacccacctcgacaaacacgcgaacacacacacacaccctcaagttaacatgatggaggctggagataagtagaagtagtaaagaaagatattccattttgctgacttaagcaagtcagatactaaatagaaaaaaacatagggtaaggagcaggtaatttagtggggattgggaagagaacttaataaatgcaggtttggataagttgaagttgagattccttgtgagccagcaaactggatgtataaatcattctcttaggtttatatgactggagatcacaagaaagatttgaattagaaatttttaattgagaggtttcacaatataaataatttcttcttggccttttagctaagatcaaatgtggtatctgttcttaacagcttaaaatctgatatgtcctctattcaaggacaatatattaaatgtatttttgagcagggagatggaatagaagcttgctccttccattccatacatctacctagtattgcagtgcctccaggaatggtacaccacacacacacacacaaacacacacacacacacacacacacacacacacacagagatagataatacagaagctgtgagaggagataaagattacttagtttacatagtttcttataaaaagttttacatgttatccaagtaattaatacttttttttttggagatagggtcttgctgtgttgcccaggctggagtgcagtggcatgatcacagctcactgcaaccttgaactcccaggctcaagcaattcttccacttcaggcccccaagtagctgggaccacaggtacacaccagtatgcctggctaatttttgtatttttttgtagagacagggttttactatgttgcccagactggtctctaactcctgggctcagcaatctacctgcctcagcccctcaaagtgctatgattacaggtgtgaaccacctagcccatccagcttcactcttattattgtatgcaatttttactatcatgcaaataagctcaggtaaataaaactaatgatcg

SEQ ID NO: 4866 - DNA, 1233 bp, Homo sapiens
tcgtgttggataagcctctacccacccagagtaagtacacacaagaaccagcaaatacttgttacctccacatttcagcatttctgtgaaatccacctgaagatcctcaaaaggagccgctccataagcttgtatgccaggtggaacagtggggccttgcctcttattgtgctgtcggcaagtaatgcactgttgtgctactgctttggcaagggctggcaagagtgagatgtagaagtaccggcctaacaatttttcaagtgactcttgtcctagatgagtggttttgtgcatggccaatatgattatggctcctagcaactgcagcacagctactcttccacctggcagtctgatccatcctccttttattacttgcccctcttctgtgtggaagaagtctttttcttccttagaataggtaggtaccaggtcaggtgtttgagggagtaagggggctgctactgatgcccggtaagaggtagatgctgcttttcgagcttctgaatcagctgtagtgcgctatgccaattgggtgtctgcactaagttcagcatcaatatggtgacctcccggaagcgggggaacagcaggttgcctaaggaggggtggaccggcccaggtcggaaattgagcaggtcaaaactcccgtgctgatcagtagtgggatcgtgcctgtgctgtcagcagatctgagctttcttcttggacaccttatacccacagtcctccaggtgccaaagcagggcatccgtccctttagcacacctgactgctgtggagtgtcccagcagaaggttgtccacgtacaggagcaagatgcagcctaagtctttagcaggaagcttttgcaggtctcgagccagggcctccccaaagatagtaggggagttcttgaacctttggggaagccgggtccaagtgtactgagtagtgacacgtgactccggatcttcccactgaaaggcaaacagcttctggctctcaggagctagtctgatgcaaaagaaggcatattttaagtccagacaggtaaaccagctgtcctcagctagcagcagccctaataatgtgtaagggttaggaactgttgggtgcagagtcactgtagcttggttgaccaagcataagtcctgtactggctggtagtccttggtccctggcttaggcacaggcaggaggggggtgtgccatggagactagcaaagaactataattccataggctttgaag

SEQ ID NO: 4867 - DNA, 1048 bp, Homo sapiens
catttgcagctgcatctgcatctcagacacgtaacattaactgatgttcataatgataaccctgagtcattaaggaaatgttgtattatgtctggtacagtacacttgagaagtaaagagatgaaatggagaaagaactgagacttactgaatgcttgctgtattgcagatactgagagagatgagctacttatgttactgcccttaacaacagaatcctgtgacataggtacagttaccttcattttacaactgagaaaaaaacatgttcagataaggatattttccatatttgaattaggaatccaaatccatcttattctagaatttttgctctccctttatatcaccaacctgtttaattttttttaaaagacatattcaagtcagtatttaaatgagatagccttaggtagtcagtgttagctagtcaaagactcaaactcaaaatattcacaaaagaaagaagagaactaatatttgagcacatgaccattcatgatgatttattccctgtgaactatgtgttattatccccaagttataagttaaggaaattcattaaggcaaagtgacttgtccaaggttgctcattgagagagatgtggctttaatgtgtttttgtttgtttgttttgcaggcttcttttgtcaatccactatgtaaatgttagttttcttaagtcagtcctgagctccctcattttcttctccttcagtttccttttgtaggatagtttcagatgtaagaattctgaaatttataactttagatcccaccttgctctcaagttccctacataacttagatacttttttcatataccgtgaaacactgaaactcaaaagatataattttttcatttcaacagtctccaagtatacctgcaaccccacatttcttgtctaagtgaatgaccccaattactcaagcaagaaatctatgtatcaccctacttgactcagtaggtgctgactggccacctcttgttgtccttgatatgaatctctttcttcctcttcctctaccacttctctaatttaagcca

SEQ ID NO: 4868 - DNA, 1211 bp, Homo sapiens
gagacacctgcatccttgtttacatcatgagccagcctagcccctctgatcttcctccttgtcttttcatatataggtgcttcattctccttacttaattgcaggtttggaatgggcagagattgtcttcagctttctgggctctcacacctgagttttcccatagttcctggtagaggcactgaggagcctggtgaagtttcccctacctctgcctaattgatgattccttgcctgagtctcatccttattctcagttgcacctggggtgacagagcgtaaatgccaagtggtccccttcagccccttcccaggacctggaatctctttctgctttggaatgaagtgtgggtcagatcgtagactagagcccccagtgaaccctgggatcaagctggggaaatgaatatactctcttgtcaatatgggaatgtatttttccctgttcttttgctttgcaggaaaattcaatcaccctgagatagtccagcttgtttctgaacttgaggcagaaagaagcactaacatagctgcagctgccagtgagccacactcctgagacactctctaaattgctgcactcctgtaacaaacattatttttccatttcattgtattgtgttttgccattgttggtctgttgatttccctagatgtgagtctgtttgttttcaattgtctgaacttcagcaagaaatgtgatacaacttgggcactaaaagaagccacagaacaggaagcggtcatgaaagtgccatggatgaacactggaggtggcagtgcctgtttatgaactaaataaataaatattaaacacctaaaatattagaatatttattggagatttaaaatcatcttattctgacttaattaccgatatccccgaaggctaggttcattgaataatagaaaatttcattatgattgcttttaagaacagattcttcagctgatttagtgataagaatccagaaaagaaaatgtactagtgatgtattctctccccagatgaaattgctgccttattcagatttactctcttgagccagattttgaatttcactgcagactgcttcagacttctaatcataggcttgtaaacctactaataggctctgcccctcttcccaatactttttgtcatttagagatataaaccggggcatataaaaatgcaacttgtattcctttgtatatttttccctgtctga

SEQ ID NO: 4869 - DNA, 1203 bp, Homo sapiens
gaataccatactacacaatgatctctgattttgctgagggaaggaattatatatgtgccactttttcctcaaatttcagatgccagttttcactttttgaagcattgcatctttttaataaatctatcctgaaagctatataatatatataatttatatcaatgaatttacaataactatcaaattggctatcagaattcactgtaatggaattttgcctctaataacataaagggggaagaaacataaagtggttctcttaataaaactagcagaaaatgttgctttatggcatgtttttgtatcaaagagaaatcagaggttaaactttgcttttatcatgaaaagggcctgatttgaaggtagagataggcttagatgagaaaaattgataacgcaatgttaatactattgatatttcataggtatattttgttagaaattggttttttggtgctaatctataggcacaatagtgaatatgaatgaagagtaggtgctgcaagttaatcctacattgtgccagtgtatattagtaccatgtaaatgaatatgaataaatgaacatgaggattaacgaactgttgaaaataggctgagatactagttttctttcttttttagagggggcatgatattaaagatagttttaagtaacaaattacttattacaaagttacaacatgtggaatcaatagttttatttgttcattaatttattcattcagcaaacatttgttgaacatttaatgtgtaccagatattgccaggatcaggaaataaagaactaaaaatggacattcagactgcaattgctagtacaggggtcaaacaaaatcagtgattagaatttagtgcgttaagttccctgatgccttcacagccagaagaggctgtgaagggataaacacttctgagagtgggtggtagtagaactgagtattcaagactgaatgttaggcaggtagacagtgactggttaggctgagaaacttacaagtattttcgttgagttctgcttccactattatttactttacaatggatatgaagttcagatttcatcttatttactgaaggtggagaaaggatgtggaagtaggggttatgggctctcaaaagtagatttagagagatttttttatcactgttttatgatatagttcactgagcacttacatagattaacagttacaagtttcc

SEQ ID NO: 4870 - DNA, 1117 bp, Homo sapiens
tgatggtatatttctaattcaagtagtgaaggaagataaatatgcactagagagtgagattttgcttaagattttgcttaaggtaaacaactgctttggtataagctaactaaagaaataatttttacattttgtattttccaaccaaacagaatcgggaccagtattcacatctgctaagtgatcattttctgccataccaaggtcataattccttccgtgagaaatattttagtggggtaacaaaaagaattgccaaggaagaaaaatccacccaggaatgaaaattaagattttgacaatgaagaaagaataagaatttgatttaaaaagacatctggatgtgaactttcatgtatgatccagaaaataggtacggttttaaaatattttatatagaaaagctacaaagtaaattgagcaatgcttttaaagttatctttgttttatagacttttttgttgtatgtattacagtctttataatcttatttaatgtatatttgtactttcaagtactgatggagatagactcaaaacagttatttttttacaattaatctacaaagggaattaatattgttgacttttaaaacatctgctggatatattatatgcaattaatagtagttaagaatttattcatttggtagatatgtttatttggtttttggttgtcatcgatttacattgccactaataaaccatattgagaatttctaaaattgtgtcatatctagttgtcttcatgggggatgtgatgagggaaataaatttttatttagaaattccagacaaggaaggaataacaatgctaatagtgatgataagaaaggctaagacctgacaacctagaaagattccaaactccttaaggcctgtctacatttgaagctcttttgtaccttggatttgctcctgcattcctaaccgttgactgttgctcaagttaactacccacaatttttggtttagaaagtaacggatagttaaaagcagtaacagcaacacaaatgcttgatggttccttaatggtattaagcctaatcagtgccctttgaaatagaagctatatttttcttgaaggagaaactttgctgagtccacattgtgtccat

SEQ ID NO: 4871 - DNA, 1151 bp, Homo sapiens
tgaaacaccatctctactaaaaaatacaaaaattagctgggcgtggtggcacacacctgtaatcccagctgcttgggaggctgaggcaggagaatcgcttgaatctgggaggcagaggttgcagtgagccaagattgtgccactgcactccagcctggacaacagagcaagacttcatctcaaaaaaaaaaaaaaaaaaaatagacaatagaaagttgtcatgggactaaagatttgagaatagggactgatttcagaaaggtgatttggggtgtcagttgcagtggctcacgcctgtattctcagagctttgagaggctgaggccggaggatcacttggggccaggattacgagaccagcgtgggcaacatagtgaggccctgtaattacaaaaataaaatgggccaggtgtagtggcacatgcctgtagtgctagctactcaggaggctgaggtgggaagatcacttgagcccaggagttcaaggttacaggaaactgtgattatgccactgcactccagtgtgggtgacacagtgagatgtggtctcaaaaaaaaaaaaagtgattttggcaatggagtgtaggatgtgtttgagacaggccaggaggtaaataaacagtccatgtgagaatctgaaccaacagtgggaatagacaatagagacagatggaagacattttactcatctattcattcattcaacaaatattttgtcctcattggtatgctaggcactacagggtcaaagattagaaatgataatccctacctggaagaagcttggaaccttcagtagttgtagagataaataatcctagcaaggcatcaagtgcagtgagatacagggggccctatgggaacatgcaggcaaggaatccagcctgccctggggctggggcgtgggagatggttccaagaggaggtgtttcctgaattgccttttgaagtttttatattgggtttaataactgtattgtgagatatattatttataccaaagagtgcataaagcataagtacagtttaatgaataattacacagggacatccctacagcaccatccctgaagtgagtttggaagggtaggtagtagttagccaggttaagctggggaaagatccgggaggaggtaatgatgtgtgaggca

SEQ ID NO: 4872 - DNA, 1236 bp, Homo sapiens
gacagtgttgatcctgtcctctttttagaaacattcctcacttggcttccaggatatcacactgaacaaagttttttttctacttttctgactgttcattcccattgtttaatctttcatttccccaaagattaacttgtcatgaaaaaatcaaaatatggcatttctaccaaataatattaactaaagtgcaagagcagataggatgacaaaactgaaagactacatgtcaggtttcacatatagcgaagaataactataagacagctcacaaatgagagtgaagtatatacttttcaaagatattcacttagcactcaagcaagtaaaatgattttaaactttttctgttttctgaaatattgttataaggttcaaacacctaaaaaatatgaacacattttaacttacctctaataattagggaagaaaatttaaaaacacacaaactaaattcatgcttattgaatttttttcaattatagattatatccaactctgtcaaaccagtttctatataagaaaggagaaaaacctatttgtaaactataataaatcaatatgcctgaatcaaatttcctttgttagaatagaatatgctacgtgataaaggactgaaaaaatagtttggaatgaaagaaattggaaaaaagatataactttatagacaaaacttcaatcattgtattttttgatcattgactcgtgaggttatattttcagaaatattttatttggtcatcttagatgatctacaaagattacctattgtgaatatgtattataattttttaaaaatatacctgagtatattttatgccattcaaatcagaatttgtaccagagagctaaatattctgtataagtgataaataccttgtccaagccatagtaattattgccattagccaagtgaacctagtatcaccttcattcattacacagtctatcatgttctcagaaaggacgcaaggacaatttagcaaggatgtgtagtttatcatgtttatagccaggaggccaggaaaatttatgcagggaaaatttggcaaagaaaatttagtgttagagttataaacacagtaattcctaacatgttagtccttaaatggattactgtaaagaaggtagtaagtttaggtcagagctataacatatagaaacaagaatgattcatatacttttaagacagtattcaaatcaatgagttactatctatttttcttcaacaactgc

SEQ ID NO: 4873 - DNA, 1194 bp, Homo sapiens
gaccacttagatttttttccaaccacttaaaaagtagaagacagattcaaaacactgagcagaaatatcagtaaatttgtacccttccatttgagatcctccaaatgtaccaggagtctgttttatgacttcagcctaccctggtcaccagcagattgagtgcaataaatttgggggcagtgaaaagcattttatattgtgataagtaaagatgacttcaaagccagcttgtactagtgtatctcaaaagccttgaaatatgtatttgtgttaatttagcaattcagccccaggacaaagtatgcaaagctgttacgtacaagcatgtttattataatgttatttgtgatagtcaaaaattggagataatctaaatgtgattagttaaataaattataatctacttgatggcatatcaggcagccattaaaatgacattttaggtgtgtactactacatattaaaaataatattagaatattctgtgtatagaatgattcattaaaaaatctatgcataaataaaaatttacaaagctgtccaacacaatgtagttatctctgggaggtgggatcatcattttgtgtgtgtgtgtgtgtgtgtgtgtgtgtgtgtgtgtattaatgtgttctgttttcaataatgactttgtagggcaattataccagttaagaacaaccaactaaccaggcaaaaaacaaccaaccatttgcaagatttgtttccatgtgcaagaaaactgtattacagcttttcatcattttttaaataaaacgataggcattaaagaaataattataagttaaaaagattcaatgggatgttattttcttcccattacagatattataagcatcttcattttcttctggacagtcaactataatttactgttcttgggctttcctctgaaacttctccagaaactgtggcaggtgcagaatgcatcacctcagctgttattgtatataggtgtgagagaagtggcaaggcccccatctgtgagctacattgcttgccagtttgataaaaagattcaggaccggattctctgccgttaggctatgactctctcacaccatggagggagagaaggtattgtatatactagaatccctgtgtactgcgttctttcaattcttccaaccactatagactatcctgacaagtccgcttagctctgattcttgcttc

SEQ ID NO: 4874 - DNA, 1164 bp, Homo sapiens
aagaattcagagatttcagcactgtcagcctggaagagaaattatctgcaagggattggtgttttgcaaaatattggcataattttaagagctattagctagggtaatccatctgaggtaaatgcacctaaaggaaaatggttgaacacatcttagggtaggccaacagactgtccctgaggctggactagcctacgggaaaagctcattttatttcccgtatcttcaggatctctagttctgcttcctttcttctctgttagctcctacagtggagcttgagaacatatgcattacgccttttgaaggacactgtgtcttatggtcatgttgccgtaactcttcggcaaatcacacctgatccctgaagatgaataaatttaacatgtatgtgtgtgcgccatagttttcattaacgtgcgtacttgtcactaaactttaaatacaaacctgttaaactgtcattcctgatcatgatttgagggagctaattagcttcttgatttgtgtaactttcacagctcttaaccatggttaattgggttatgcttggcaggactcagaaggtgtggacatcaagctgggcgtgtgtgctaatggacttctcatttacaaagacagactgcgaatcaatcgttttgcttggccgaaaatcttaaaaatttcctataaacgcagtaacttctacattaaagtcagaccggcagaggtaagccaagacatttctaatcagttgttgttagtcggcctgtttacgaccatgaatttaaaaattcttttctattaattctaaaattttaagaaaataaactatttattcttccattgtaaaaggtcagggttcttaatggtaaaattgcagtatatatacgtctggtctgtttttaaaaaaagcaaccatcacgctttttacaaaaaagaaaatgtgataaggtgtgggctcgttttttcttgttgaatcaattaagttgtgatcattaggaaagcaataagatgagttttagtgaacattgaaggatagttggtttatgtgagccgttgttacttgctttttgtagaaaatagtattgcagtctatgaaattcatctttatatgattatattagatatgcaatatttaccttttttgagaagaataattgcttctcacagaaacatctgaat

SEQ ID NO: 4875 - DNA, 1099 bp, Homo sapiens
caggtaggatttttattgtaactcaaattaagtgatggtagttggacttgaacttaccatttccgatgcctagtttagttctttttataatagtttcatagtgtttttccaacacacaatttaatgtctaggtatacttcatttatgcagcagatttattgctgaaaaagtcatgtgcaaataagtgtttagaacaagtgttattttaaatgtaactatagtggctttctaatttaagagacccagtggtgagtctcttaaagtaaataatggcttactaatttattgccaggttttttttttgtgtgcgaatatagtagtgctttttttttttcttttagagacagagagtctccctatgtcacccaggctggagttcagtggcatgatctcagctcactgcaacctctgcctcccgggctccagtgattctcgtgcctcagcctcccgagtagctgggattacaggcacatgccatcaccttagtatgtacaggaatcatcctgggaatttatgaaaaacacagattttctgacccccttgtttctctctgttattatgttggtttgttaagggctgtgagtttttcccattcattttggtattctctacagtgaccagcctggtggagtgtgtgtgtgtgtgtgtgtgtgtgtgtgtgtgtgtgtgtgtgtttccttattaaatgcttaataaatatttgcaggatgatttcaggaagagctttccagaagcgaatacctgaacaaaatgaatactgtgttaattgtggatggagaatactagaaataattcaatgctgtttctagtgtgtgctgaaattggttttcagttaagctgttaagcattatttttgaaacattctttttactggaaagatcatttaaaaacatgattattttaaaattccacagaataattttgctggaaaaggtataacagaaaataactgaatggaaaaaaatcacgttgtttcaaacaattatcccaagccagcttggaagttacagttctcttctcatagaagatttctttagccacaagctactgggaattgttcagcccattggcagctacacagaacattgcccttttcacc

SEQ ID NO: 4876 - DNA, 1198 bp, Homo sapiens
gctcagcctgcatttttcaactctagaatttctgcttgattctttttaattatttcaatatctttgttaaatttatctgataaaattctgagttcttcctatgttccagttttcttgtctttagaattggcttaatagtattagccctacctgtttttggataaaaagaccacatgaaaatttatttacccttgatctttaaaaaatatgaatttttcacatgtatgccaaatgattctgtcctcctctttgtgcattctaatttgatgcttgtgaaatcatagcaatgttatattgttaatgtatagtgcatttgttattgtgcttattttatgttttaatttttttattcaaaagtaatatatgctcattttaacaattctatccatatatatgtattatatttataactctggtctcctctatttaatttcaacccacatcccaaagtattctatactatttttccatgttagtaaaaacatatagatcatctattttctttctctcttttatattccagagaatcatattatagatgtaataaccatgtaagttctctctttttgcttaatggatcatggccatcttctcatgtctgtgtgtgtaattctaattaattttattatcttcatggtggtcatatggttatttatcaaccatttatttattgatgaaggttgtttccagtttgtgcaacttcaggaaatgctttaataaatatcttttcatagaatttcgtatactgatgcttttatttcttcgtattttcctagaattggaattgctggctcaaaatgcttgtatagcctaaattttaatagttgctacccagattattttccattgtagttgtggcagttcttattctgcaacaccattatttcttcatatattttctctaactccatctctttcccccttgttcaggaacttcagttacagacatattagacaactcgaagttgccccacagcttactgatattctattctctgttcttttttctttatgttttctttttcttagtgtgttttattttggcttctattgcattgttttcaaatttaccaatattttgctctgctgtgtctcacctgttatttccatccagttaatttttctcagacattgcagtttccatctgtatataaatttgatttggatttggatttaatagtttccatgtctctacttg

SEQ ID NO: 4877 - DNA, 1157 bp, Homo sapiens
tttccaaattggaaagtactcaagtgcctatggacagtagaataagttctggtttattcattcactggaatattagatagctatgggaatgaatgatccataattacttgcaacaatatggaggaatctcaaacataatgtcgagtaaaagaattgagactcaacaaaatgcacactgtatgattttatttgcatataaatgtaagtacaaaaatagacaaagctaatctatgctgttggaaatcaagatactgatcatccttggtggggtgtggtttggagaatttagtgaccacaggaagcacaagcatcctgataatattctgtttcttcatctgggtgatgactacacagggagttcagttagtgaaaatttatcaaactatgcttctgtgaaatgtgtgtgtgtataacagaagtaaaattttaggccaggcgtggtgactcacacctgtaatcccagcactttggaggccaaggcgggcggatcacttgaggtcaggagtgggagaccagcctggccaacgtggtaaaaccctgtctctactaaaatttatccggttgtggtggtgtacgactgtaatcccagctactctgaggctgaggcatgagaatcacttgaacccaggaggtggaggtggcagtgagctgagattgctccactgcagtccagcttgggtgacagagtaaaactgtgtctcaaaaaaaaaaaaaaagaaattaaaaaaataaaaaatgacagtgtctggctatggcccaaaagttacccaattattttaccttaaacacaggtctaaaaaaggattgcaatgcttttgaggtaaatgtagctatccaaaacaatggacaaattttgttttccattttcaggtttgacctgccaccagttatcttgttttctatggatggatttagagctgaatatttatacacatgggatactttaatgccaaatatcaataaactgagtaagtcttctgtaactagtggcatgcaaatgataaagacacctagttagtcaatctctagaggatgcaactttctttctgacttttaacgctggtggtttgtcttagcctagatcctctctgactttaccacatggtttctactttcattcggaagtatattttcacgcttgctggcttctcctacct

SEQ ID NO: 4878 - DNA, 1135 bp, Homo sapiens
aaagctatcacttaaggttcctgcttaaaaggattttattattgtactggacactaatgtatttgacattgtttaatttttaaaatctatttcttaaaagaaaatagttttaaaacagcctttaaggataggactgtaagtattgtcatttataaagtgtcatttattttaaacatgtaaaattattggccctcagataccttatatttaatccttttaacaactcttcatagtaagcagtaattttcaagttttacaaataagaatctcatggactgtagaggttaagcataggcaccagtgtttaaaccagtcttactctaaaatacagactgctccccctataccacacattgctcctctgattccacacattgttttctcaaatccttgaataagggttattattgaggctattaagaatgattgccaacattgacttgaactagaaatgtcagaatgaacaatagaatgaaaaaatgacagttttgttttttacttttttttttttatttttaaccactgggttagaatagcagaaggtagaattaagagaacaaaaagtaattttcagtggtaatatgctgactgtatcaagagtagcaggaatgatactatcaaggaagaaaagaataaatatttcagcagacaattaatctatctcagggctaacaaatctaaaacaaatataccatcaataatactctatttccatttcctggctggaaagagctacacgagcatataactttgaattgttttgtaaggccaggtgacctgcagctggctcatggttaactgctggagcctcactgaagatgtaaatactgttccgcagctttgtgatacatagctaaagaccataaatgtgtatgtaatgagtcagagagcagcagttcattacttggggcctttgtcacatatgcatcatatgaatactgaacgacaatgatttgcatggaaaatcagtttaatgacagagaaacaaatacatagtggttgtgagctttcaattttgtgtctaaaaaacggattctaatctcttttgtgccatttattggctgtgtctcttttcctatcagtgggatgtacataagggtcttgggatgggtttattgtataagctaaataaaaa

SEQ ID NO: 4879 - DNA, 1533 bp, Homo sapiens
tggcagagatagaaaactcgcagtacgtttgcctcagaaccgcctcaatccggaaacagaaactccccaggcccggcactgcgggagccacctctttcgagggtgggagtgcacatgcgcacaggggacctgaaaaacccttaaataccggcatgcgtgcggatgaggcctctttccctgccgccgccgagtcgcgcggaggcggaggcttggggtaagttgagcgaggcggcaggggggtgtattggttataatttgtggctcgttgcgttcttgctgggattcgtgacgagtatctggttctttaacaagtcaatgcttttgttttttagtgcgttcaagattcaacttcacccgtaacccaccgccatggccgaggaagggtgagcccaggggccggggttggagttggggtcggggtgcggctgaggcgtggggctagagctggcggaacaggactgggtcaaacgggtcgccgtaagcgcgtctgttgtacacttagcttttgctgagtgcaaggccttatgtggtgtgaggattttaactgatggttctgatgtgtcgcgtttaagcattgctgctggaggtgtaatggacgttaatactgctttacaagaggttctgaagactgccctcatccacgatggcctagcacgtggaattcgcgaagctgccaaagccttagacaagtacgtgtatcagtctcaatactgtgggttcttgcaaccggaacaaaactgccacccaagggaagaaggcatggagttcatggtgttagcgcaaaagttctgaatggcatccgtcctaccggaaacctaggaaaaggtatcagaactcagatctataaagcccacttaaaatgtgtgggttgctgtttggaatggggataagcactcaaaactacagtgtttgaatgatgactttaattgtcggataccccttcactccttttatgagtgaaacataagagtctgacaaacctgtaggttgtggagctagtcagtcttatacttatctggcagatagatgagatggagagccacattacatctggtagtttgcaaaacaagcattaatttaatggaatttcaaactcaggtttcagaagcatttggtcctagatgaatttagtagtataatagctgtgatttatttgaatttgggatatttgttaatgtatttgaatggatcgagttaatgtgttttttagggtggtggcattgacaaatcaacctactcttgagctgaatttaaatgcagttttaaggttttacaggacaagttcgttttggtgtaatctagccagttcaatccgatggaaacggcattattgtttaatgtatttagtaggtcctagtatgagtcttctgtatttctatttcggcattattgcatggcatttcataactgttccattaatgccacagtcttttttttttcttttttcttttttttttttgagacaaagagtcttgctctgtcccccaggctggagtgcagtggcgcgatctcattgcaacctctacctaccag

SEQ ID NO: 4880 - DNA, 1533 bp, Homo sapiens; identical to SEQ ID NO: 4879

SEQ ID NO: 4881 - DNA, 1196 bp, Homo sapiens
gggacagaggttttactgaagaccagttgtaggttaattgaagatgtatatgctccctagcaggttcttcagactcaagcaattttgtacgcatttatgtgttcagtggattggctgcttatgtttcgcaagtgttagtgcaaagataaccctcctaaaatgcaagaatgatggatttggatctgagttttagctccattttcattgtaatttgaatttcaggcgccaagcccatctttgtgtgcttgcatccaactgtgatgagcctatgtatgtcaagttggtggaggccctttgtgctgaacaccaaatcaacctaattaaggtaaggctgctaaggattgtgttgggactaatgttcagtgatgcttgtatatgggggtaaattctgtgaagtctcaagctgttcattttgtgcaggtgtaaacattacgtgcacctgatactgtcggccattttaaagatgattgtaggtagaagcattttatacctgcagaattgaatcctaattttgacgttggtatacaacaaagattagtagcaggcttgtaggtgatcttagtgctgtacatgatgacaactggctccctctactgaactgccatgaggaaactgccatgtcacccttctgattacagccaccttttgggtttcatttaattttggtagtgttaatgtctattaatgtgattttttttttttttaacctttctcccaataggttgatgacaacaagaaactaggagaatgggtaggcctttgtaaaattgacagagaggggaaaccccgtaaagtggttggttgcagttgtgtagtagttaaggtaagtcaccgtttattctagggatgaaggttatgctgggtaatcatataaaaccttgtattgaaataagttgaggatcttataaaaggaaaaaactgattcaacaggtttaaagcattttctgcatttcaggaaaaaaataaaagctgtaatttacaagccagccaatgaatctgcttacctgattgtgtttgtgcagacatactttaaaaactggcaatagtaaagccatgttacgagccttaaggacattgaagtcgttaaggtccctgagaatggctataacaaatcttagtgatgggaaacatttttataagacatagctaattgttgaagctccactataattgatactaatagcttggtgaaattc

SEQ ID NO: 4882 - DNA, 1196 bp, Homo sapiens; identical to SEQ ID NO: 4881

SEQ ID NO: 4883 - DNA, 1196 bp, Homo sapiens; identical to SEQ ID NO: 4881

SEQ ID NO: 4884 - DNA, 1190 bp, Homo sapiens
gcgtctcactggctggagtgcagtggtgcaatcacagcttactacagcctcaacctccctgggctcaggtgatcctcccacctcagactcccacgtagctgggactgcagacatgtgccaccatgcccagctaactttttttctattttttgtagaaacgaggtttcatcatgttacccaggctggtcccaaactcctgagctcaagcagtccacctgcctcagcctcccaaagtgctggggttacaggcttgagccgctgtgcctggcaatgtctattttattataaactcttacaaaattctgaaggagttagtttatcccagctttatatggcaaaggtataatcatacttctcactttatatttctataataaaataatcatgtgaaaccaattgatagtagacaaatataagatggactgttacttttaagtcttataaaatttgtaagtttctagatggacactcagaataatttttccttttgtattattatgactattcattatttctggttgcctcaccttgtacactatatatttttttctcacctcaaaattatgaaaattgtgttaatggaagtatctttttttgtacagtggacggcctgtttcatcttactatgaaaaagagaatgtggattatattcttcctattatgacccagccatatgattttaaacagttaaaatcaagacttccagagtgggaagaacaaattgtatttaatgaaaattttccctatttgcttcgaggctctgatgagagtcctaaagtcatcctgttctttgaggtatgaattgaatggaccaattcaaattaaacgatagttaatatttaatagcacaaatgtaagctattatttttagtagtccagtaaggcaaaaaaaaaagttgtgtgagaatttaatctctaggatttagttttccaatgctgtggaatcaagtgagacgcccttttataaacagtgatagcatatttgctgagtgtttactatttaaccatttggcctactttgtataatttaataattacaacagctctgtgactgttaactgtagtgaagtgatgaatccactcgatatgaatgcatttctccattttaaacccatttcacaaagcataaactcatttaaccatgtcaggcaccctaagaatatgtgtaccacctggataaataaagataa

SEQ ID NO: 4885 - DNA, 1164 bp, Homo sapiens
gatcagtggttgagtagggtcagagcatggagggaaggcattgactgtgtaacaggacatgtagaatgatggaaatgttcaatgtcatgattatggtggtggtcacatgactgcatacatttgccaaaattcatttaattatacaattaaaattggcaaattttattgatgtaagctatatctttttttttttttttttttttttttttttttgagacggagtctcgctctgtcgcccaggccggactgcggactgcagtggcgcaatctcggctcactgcaagctccgcttcccaggttcacgccattctcctgcctcagcctccccagtagctgggactacaggtgcccgccaccgcgcccggctaattttttgtatttttagtagagacggggtttcaccttgttagccaggatggtctcgatctcctgacctcatgatccacccgcctcggcctcccaaagtgctgggattacaggcgtgagccaccgcgcccggcctgatgtaagctatatcttaataaagctgattttaatagcagataaaccaaagcaaaaaaaaacctgaatcatttaaagaggtaaaaaattggcaaaggtataataggaacatgaatgaacaaatgtatttgggacgtttcaaaattcaaacataatttgatccatgaaactgctgaattccacaaaggagacttttttaaaaaaaatagtacagtacaactagaagttaacaaaagtttataatttacaaactacttgggaatttatcccataaagctgttagagggaaaaaggaaatcaaaaccacaaaatcaggctatttaaaaagtaatgaaaatgtcagtgtaatgctatgaaaggtagagatgctactgaagatactctggaaacttcattcattgctgtatttaaaaaacagaactaaagaaaaagacaaattaataataaagtcataaaattaatgttattagtgcaaaggctgacagatcagtggtaaataaacaaaaaacagccttttctgattagtttgcctggagtttcaattttaaaattttttccttgagaccataaatctttcttctctttctaattcttgattagctcttttttctaattatttctttcaggagtatcctcacaatttgtatatattggtgctacatt

SEQ ID NO: 4886 - DNA, 2272 bp, Homo sapiens
attttagtgaatgttataatattttaatgatatttttatgactttctgctgcatctttatgactaaggtaattttgggaaaaacttaattttatctcattgcatttggtgtaataataagtggacttggattgacataataaaaaaacaaaactcaggattctaaaaatcagtggtaatttagcagttgagatcttccaaatgattgtctgggtaaccttcagtgcttgggttgctaagtagtaagatgtagttattctcttgatgatggaatgtatttttgttgaaaaattcagttttactggttttgttttattgtgttttagaatattaccaatctcatatacccaatcttcagaagattaatactgtgatttatgattggagaaatgatcatctttacaagaaacatttcattgacaattgtttttaacctttctgtagcatgacgacagagatgatggtgtggattattgggccaaaagaggaagaggtcgtggtacttttcaacgtggcagagggcgctttaacttcaaaaaatcaggtagcagtcctaaatggactcatgacaaataccaaggggatgggattgttgaagatgaagaagagaccatggaaaataatgaagaaaagaaggacagacgcaaggaagaaaaggtataaaatttcaacttgtgattctgacagattttttttgatataggtttggtgggtgaattatttcatttttaggaacaattattaatatggttccttttcactctccgcatcttttgttaatctttaattttttctctctcttttaggaataataaatatgaagtaagattacaacagagcagaacttgcacccaccattttttttacctgatttttgttttcaaataagaatgtaagcattttacttaaattttactgtttgcaagtagtctatagaaattttgttttaagtcttcaaatatcttgagaaatagtagactgtatgttgaaaattgtactgaaataaagtagaaaattgttacgtaccatatttgtaactatcaacttttaaaacttttaacgtttttgttacatgcattgtaattctgctttgtctataagatatggtcaagtacagctctgtgaaagttctgattctcttccttccctgtttgtcaatgttttattctgaagtaaacgttagctctacatataaatcctggaacagaaattgtttatagagactacactaattattttaactgtatacatctgtttaatttgaacacactacatcgtagggtgactgatttttgaagtataccacagacaaaaagttgttactatggtaaactaagctagtttaacacttgagcaaatgcttaagaaggaattaaaaaaaaaaagctttgccaatagctaaaaagtacaagctattaaaaatcagattgaaaagttttgagaaaatgttatttttactgaaagcaagcagtggcctataaagaacattcttaggagccttttctatttgcgttcaaaactgtgtgttctctttctattcctatttgatagtttgagtcatggtcttagatattagctatttgtgagaggaaactggtttgtaacaatactgcaaatagaaaccccatttctactgaacatcctagttttaaacagaagaaaaactgtaatcctggggttggtatgtaggaggtctatcctgcagaataagttgatacattagtacctgatttcatatcttacatatttatttgagctgaacattagtttgtagtgtaactattagtaaaaatagagaaacacagcatactgttcattaatagtattttaaaaaaattgtttttcaaatgtcaccaataaaagttttggcaggaagcttgttgcggcattgatctaacctttttcccccccatttcagttgcagtttttgtagaatggctttttctttttcctcttaagagttctattcttcaggtagataatttttcaaatgtgaattatcttttgtgtctatattgatagctcttaaaggagtgaaaatctaaaatagtaaatttcaatgttaagtgtctgctttatgggcatatataaaagtagacacatttcatttgttaatttagttgtgtgtgtgtgttaaaaggagctaatgcttattctgttaatgtaaacttttgaagatcttaagtgtattgctctttcatcttaaacactttcgaggatttgcagtgcgtctagcacctagattacagccaggaacattggttaagaactgt

SEQ ID NO: 4887 - DNA, 1153 bp, Homo sapiens
cttgagtcgggaaatggccgctgtgtggttgcaacggagataaattcccggaaccgcgattcggcgtgtcaggtaggcctcgcaatgtattcaagttactccaggggcagtgaagaccgaggacaggccatatttttgactcttttgtgggtggtgtcgggttggcggcgaaaggagaaccaaggagacgttgcgccgttatttatgcgttttttcgttagcttctctcaggttttcgaggcactacgggccgaaaaggccgggcgggggcgctgagcagtgctaacggcgggcgcgcgcgtgtttgcgaacctgcctggagacccacagcccgcgcggcctcccgtgcgcgtgcgcatatcttcctcttccacccttcccccatttcttcagcccgtacctctgcgcgcgcccgactgaacgctccgcgcacgcgcgctcgttcatttttctctcccccgcctatggcgccgacggccgctggaggtgcaacttgtgtccgcctctcattggctgggactgccacctttcttcgtggcctgtggggttttgagaaaataactgtgacccgcagcaaagtgcgttgagtaggtctaccccttttcgcgtggtctttaaaactgccctccggcttcagaccacccgtcagttaatgcctcgtttttgtgatgctactaggttttagtgctctgttctgcctctcgctgctgaccctggttctctggagttaatttcggtacccgcggcaacctgctgttttgaagcgagcgcgcgctgttgactggtgctggttgcctagttacggttccctagcgagaggattgggtcttagctggtggttctgagcgtggccctgccccatccggctgaaagtgcggttcttcatgagtactagcgaagccgagtcttttcaagtgattcagcccatttagtcgtgtcagaaatgttgcagccacgattggtggacagctggtgtgagaaatgggtgggagtggcgaattggactttgccttcattttaaattcatgagttggcttgattcgcttttaagatttatttcttcagaatcaagctgaagtaccagcagctactttgctacctcagacttttttaaaaagcattttagaactggaaacaaattaagactgaagtt

SEQ ID NO: 4888 - DNA, 1108 bp, Homo sapiens
cgccttggtctcccaaagtgctgagattacaggtgtgagccatggcgcccggccatatctcaccttcatttatttatttatttatttatttatttatttatttatttatttagagtctcactctgtcgcccaggctggagtgcctaggttcaagcgattctcctgctttagcctcccgagtagctgggattacaggcgcttgccaccatgcccggctaatttttgtattttcagtagagatggggtttcgccattttagccaggttggtctcaaactcctgacctcaaacaatccaactcctctgcctcccaaagtgctgggattacaggcatgagccaccacacccggcctaaatcttaccttcttaatgagcttcccaggccttcctatctaaaattgcacgtccctgctacactgtaacttcctaaacccttccctggtttattattctccttaaccctgatcaccatctaacatactatagatggtattttacttatttgtgtttattgtccgtctctcattagaaagtaacctgagtctacagctataccaccctgaatgcgtccaatctcttctgatctcggaagctaagcagagttgggcccgattaagacttagatgagagcatgtaagctctcagtgatagcaggaatttctctccattttgttctctgccatctctccagcacatggaatggtgcctaccattcaatagctgtccaaaaatatgtgagtgcattagtgagatccatttggacccactgatgtggatgaagatgattttaggctgaaaacatcagaaaaacagcagcagcagaaaaaaaccttatctaaatttcttttgcggacataagcaatgcctcctaaaatacatctgccatttatttcctctccaggaggttaatgaccaaagaggagatagaccacttgcacctagaggagatgttgcataaacaaaaccttatcaaaactttctgttcctcacacttatttctcattagtctcccaccatacactttcttaaagtcttaaccctctttcttactaagatgatatataaacactcaactctagctgtttagggagccaattctttgtgtaagt

SEQ ID NO: 4889 - DNA, 1193 bp, Homo sapiens
tgagccaagattgtgccactgcactccagcctgggcgacaagagcgaaactccatctcaaaaaaaaaaaaaaatacagctcttcttgagctatgctacatagtaaatgtattattcttccagagaatgtattcttcaaaagtacactattatagttaataaagtaatgataaagctgataatgagagtgatgttgaaataattgattctggcaaggatcatcaatttgaactaaaagtattaaattgaaatgcttatttaaaaaaaatttacattttaccccttttacatgataccaaagctaactcatagataacttgttagtcacaaaggaacaaatgtacctgtagaatgggaagacccagctgtcagtgatccatccttgtatcactaataatagggtggcgagacatgtgcccttaggactttattatgataactgtgaagtgtacagcagctcttctttttgattttttaacttttattttttgagatagagtctcactcttgtcacccaggtctggagtgcagtggtgcgatcttggctcactgcaacctccacctcccaggttcaagcgattctcatgctgcagccttctaagtagctgggattacaggtgcgtgccaccatgcccaactaatttttgtagttttagtagagacaggattttgccatgttggccaagctggtcttgaactcctggcctcaagtgatctgcccacctggcatgagccaccacatccggccgagtgtacagcaactcttgtgaaatattgtcaccaaaaatgtttaacttgaatcttaagatctaaagttctcttaataggaatcacaagctctagagaaataagtcaaataatcccaagaagttacatcagacagatcagaaggtgagcacactagagcagcagtccccaacctttttagcaatagggactggttttgtggaagacaatttttccatggaccaggggtggggggtggttcagggatgattcaggcacattacatttattgtgcactttatttctattgcattgtaatatataatgaaataattatacaactctccataatgtagaatcagtgggagccctgagcttgtttccctgcaactagatggtcccatctggggggatgggagacagtgacagatcatcaggcattaggttctcataaggagcgcacaacct

SEQ ID NO: 4890 - DNA, 1201 bp, Homo sapiens
ttgtgggaaaattacaaaaaaaaaaaaaaaactacatgaacaatgcacacattagaatgggaaaagcaaaaatatgaaaataattgaaatagccaaggaagaggtaatacttactaccctccaaaatgattataccaatgtgtactcccatcaaatgtgaatgaagtacctgtttttacaccctagctaattgactgaaataagtctttaatctcggtaaaacactttacacattaaatgcatttgcatttctttagtaaatttgagcatgtttttatatcttatttatagtttcatgccaactcatcttgttctttgtccatttttttatgggctgtttatatctttcttactaccctttatctgccctgagttacagatttattttataatttcctgccttttgacttaccacacagatgtttaagttgtttataaagtcaaatttatttatttccttctatttttaaaaagcccttcccctttccccaaaagatagaagttttcactcatgttttcttctggtctttggtgatgattgttttacatttaattcttctatccatctagatttttttcctttgaggacagagatagagatccagctttatttttttgttttagtttcctgtggctgccgtaataaattaccacaaacttgggtggcttaaaacaacagaaatttgttatctcacagttcagaggctagaggtctgaaatcaaggtttcaatagggccagattctatctgaaagctctaggggtggagggccccttcctagtttctagtgattgttgtcaatccttgatattctctgacttatggctgcattattccaatttctgcctcttgtcacctggcattcttctctgtatgtctgtgtccagatctttataaggacaccagtcaattggattgattagtcccactctaatccagtatgacctcctcttaacttgattacatctgtaaagacactttccagttaagatcacattcataggtaccaggggttaggacttcaacacatctttttgaggatacaactcaactcatatatttcccttaacaaattagttatcccaaatactattcattaaattatctaacttttctatgctgatttcaaatgtcacatttatcacatgccaaattctcagcactcctggaacagttttgttgttcagtcttttcccgtcta

SEQ ID NO: 4891 - DNA, 1177 bp, Homo sapiens
ctaaaataatttgggagaaaatattttttaagtagtgttatagtttcatgtttatcttttattatgttttgtgaagttgtgtcttttcactaattacctatactatgccaatatttccttatatctatccataacatttatactacatttgtaagagaatatgcacgtgaaacttaacactttataaggtaaaaatgaggtttccaagatttaataatctgatcaagttcttgttatttccaaatagaatggactcggtctgttaagggctaaggagaagaggaagataaggttaaaagttgttaatgaccaaacattctaaaagaaatgcaaaaaaaaagtttattttcaagccttcgaactatttaaggaaagcaaaatcatttcctaaatgcatatcatttgtgagaatttctcattaatatcctgaatcattcattttagctaaggcttcatgttgactcgatatgtcatctaggaaagtactatttcatggtccaaacctgttgccatagttggtaaggctttcctttaagtgtgaaatatttagatgaaattttctcttttaaagttctttatagggttagggtgtgggaaaatgctatattaataaatctgtagtgttttgtgtttatatgttcagaaccagagtagactggattgaaagatggactgggtctaatttatcatgactgatagatctggttaagttgtgtagtaaagcattaggagggtcattcttgtcacaaaagtgccactaaaacagcctcaggagaataaatgacttgcttttctaaatctcaggtttatctgggctctatcatatagacaggcttctgatagtttgcaactgtaagcagaaacctacatatagttaaaatcctggtctttcttggtaaacagattttaaatgtctgatataaaacatgccacaggagaattcggggatttgagtttctctgaatagcatatatatgatgcatcggataggtcattatgattttttaccatttcgacttacataatgaaaaccaattcattttaaatatcagattattattttgtaagttgtggaaaaagctaattgtagttttcattatgaagttttcccaataaaccaggtattctaaacttgtttccagtttgtagtttttccatttttcaaatctggggaaag

SEQ ID NO: 4892 - DNA, 1140 bp, Homo sapiens
cttagattttaaccatttgatcagcagagccttgtttttggcctgttgtgctgcatgatttacagtgtgcatctggatttgtaattatgcctcacatagtttatattttgattcacttcaggcttttctgctttctcctctttacctgcctctagggccatatggagtggaagtttgcatgttgttgtaaaagcattttgaaatgttcatcagactttcatggtttccttacttcccttttaggttttgcattttaaattaggttatagaattgtgaatttaccaaactatattgtggattttattcaaacagtttctgtgggtatgaaatactggtcatgtgtatgtatcaatattttatatggaatcattatatttcttggggttaggctgacaaaaaacaatctgttagcttcattcatgagaggtattcagatttgaaatttttgactttggaataaatcagttttcctcaacttatattttaatgttctgtgatatatgtgatctaaagatgactttgggggtgagagtggggctaaaaaaaaaaaaagaaatagatgataaaaaagatgactttgagtaatttttaaataattaattttaaatatttttttcttgatcaattttggacatatgagttagaattcatttagaatatatatatatatgttgaatataatcataggtaatataacaaattctataatagtagaaagtaagttttagatttttttggtaactcttttcacaaatgttatattatttttcccctctggtttgaaatgaatagttttgagtctttgagaatggtcataccataaaattatatctgtgttccacaaaagttagtaattggaaaaggaatgaacatttaattaaaatatcactagcttaaactatcaataggagtctgtaactctaagtttacttaattttccttagaaaattttatgaaatactcccttgaaatcaaatcatattatagcaagttgcttcaagttagtatatgtgaactgctagttcacaacaatcatgactgattgttgagtctactttttcatttttactgaggtatggataagacttagacatgccctcttctttgacaagtttttccttgttgcaacagattctata

SEQ ID NO: 4893 - DNA, 1202 bp, Homo sapiens
acttttgagatcaagagatcctcttgcttctgccttccaaagttttgggattacaggcatgagccactgcatctggccatgctactttgtatctttttaaacatgtagatgttttcaaagaatttctagacctctctggctttgacattttttgtctcttaattgtattataaacacctagggatgtgattccatagtttacgtcctcctacacaggattaaggaggcagctgcttcttgggttttagcatatacaagtttcttcaaggtcttaaaggaaaaaaagtacttgttaggagggctacatgtcactgggcaacaggaacttttcagcttcattataatcctatagcaccaccgctgtatatgtggtcctataagattataatggagctgaaaagtgctagcgagcttcttaactgggataaaagtttgtttgtaaacgtatgtaaatgtatttacatgtgctagcccagggtcaacctaaaaggtagcgaaagtgtttagcccagaagtctacatagaaactagggttgtctacctccataccaccctgaatgtcccccgatctcggaagctaagcagggtcaggcctggttagtacttggatgggacaatagggctaaggtgagtagatttaatgctccaggataacgacctttaccgacaggtcattgtgtggcacgtggctgtatgtagttattaaaatgtaaatacatatatttacaaacaaactttttttcccagttaagaagctcgctagcacacagcattctgttgaaagccccctttatttcgcagtcctgaagggagtgagggaaggaagtaaaagggcagaggaaataatgaatgaatgcgagacgccgattgtacagggacttgtttccatactgctctctaccagaaacgttctcagtttccttccttctgctggacatgttccaagggccaaaacctcaaataatgtgactttgtagattggagagtgtgtgaccacagaaaggaaagggaggcagcacgtgccagccggcgacagaatgttaagtctgcagcatactccaccgcaatgaaacaaataatttgtgtatttcctccccttccttcgcccagagccactgtgagaatgggctacagaaagtttcgaggcagtaaagccagttgttcacccagaacatctgactgccataaaaattatggtgacg

SEQ ID NO: 4894 - DNA, 1163 bp, Homo sapiens
gggaggcatgtatgaatagcagggttacgagcaatcttcctccagagcgactaaaatcctttcaatacattctaatatagtaatgttttcacattctgttctttttctttaaatttaatttcttgcttacattctgttcttttactcttagggatttaaaaagatgatggcaaaataatttttcaaatacttttgccatgattattaccttaatgccgattatttttaaaggaaccatcagctgataaaaagcaattttcttctgagccaagatcttttctaactctaaaattctattattttcagatttttaagtgagggaatacatttatatatagaaagttcaaaaataatctaaaattttagattatttagatatttagatcgtttctttaaaaatttttacatttaaccatttcacatgttcaaggacatgactataaatttgttttaattttttcccataaatatgtatcatatgtctctgatgaacacagtactgataatgagaaaatttttcttggcattactttaaaaggtcagccagccttgatttattcacttcatggtaagtccatcatgggtgtgtgtgtgtgtgtgtctgtgtgtgtgtgtgtgtgtgtgtgtgtggtggagggatgtttggaatctcttctttgtgtattgtttacacagtaactgtggatgtatacctcctgatgcgtgctggagctgggcccattgtctaccattttgcaaggtgttgaatactacttaccttatctggatccatcatgtgctaaaaagtgttgaaacagccatttaaatgttctcttacttatagaatactgggaatggaagtattagtaaagggagaattttggagagaaagatggccaagtctgaagtatattactttccaaaactctttcagctgaaatctttactgttggtaaaagacagtaggcaccgaggccccttcgagcggacttcctcactcctaagaaaaaaatctttatcctcatttacctccatgatagcgaatgccacattttaaaatataaacttgattttagaatagttttagattcgcagaaaagctgaaaaaatggtacagagagatcttatatcagcatgatacatttgttacaaccaaggaacaaacactgatactattcctgtta

SEQ ID NO: 4895 - DNA, 1175 bp, Homo sapiens
ccatttttaaagaaatgctgcttagctttttggactagaatggtattttagtttaattctcatcagccactattagaaagaatacagatgtgaatatatgaatgaactttcagcatctcatctgtctttcagtaacaagagactaatactctttctcctccggttacacaaaaccttgtgagaagctgctattcttaggtatgagttttggatgaattttagcctttgtctttccaaaataattatttggtttacattacaaaatagacctaagtatttcttcgattcggcaccatctagatgtacctatagttgtgacagtatttgaaaaggccaggcatggtggctcatgcctgtaatcccggcactttgggaggccaaggcaggcaaattgcttgagcccaggagttcaagaccagcctgggcaatgtggcaaaaccccatctctacaaaacattcaaaaattagctgggcgtggtggcaaacacctgtggtctcagctacacaggaggctgaggttagaggctgcagtgagccgtgatcataccactgcactctagcctgagtgagagagcgagaccctatctgaaaaaaaaaaaaaattttttttttaagattttctttcatgcacacacatacaaaaaaaaaaaaagaaaagaaaaggaaggaaggaaagggcagaggaagttattttagaacaggaagctgccaatgtactgggaaagctttagaaaattttgctagtagaagatgattcattctaaagcgcattgttgcctcatgtaaaagattctccagagtctctcttagcttacaaaataattgggttttgatcacagcgaggctgaacacagatccctttcagatggatcaggcttgagttctcaagggtaaccatgagtccagcagttgctgtagctgtcattcctcaccccacagcagtgactgtaacgtgttcatctgccactctccaggagccttcaactttgttaaatcattgtttgttcaatttaaatgtagcacttcatgcccacatcatcatccagcaaccccagatccaaggctggaactgaggcccctgactgcaaacatttacacacatcctcaacctaatttcgtcaaagtagtttgtataacccggttttattaaagggtgattcgtgtaccctgagaac

SEQ ID NO: 4896 - DNA, 1152 bp, Homo sapiens
cattaccttctgggtgctgtgatgcaaaacaatgagtctcacttttccaggaacttgtgggattgagaaggcagagaagcaatgggtggtcaagatgtagtatgctaagcactctagcgggatcgtcttcaggtccccatgggacagacgtgggggcaaggaattaaactgaaggtccatgaaagcttcctgaaggagctgaggctgtagctgacacttgaaggaaaaaataatttgcaaaatgtagttttaccctatttgtttgctaaatgtatcagataccaagcgtttgcattttacagatgaaaaatgtaaaaccttgagaattaaggtttcatttcagtgactttagcctggcctatgtcaagtgtctgctttcctcagcctgaaggaagcccatgaaactagagctctttttcttagtgtcagtgccgccaagggttgctctgagcttcacatcactcccatgcttttctgcctttaacagtttcacaaccaaagaggagctggggaagacagtgcctcagctactgactcctgggctgatgggcgaatcttcagaatcctttagtgcctcagaagatgaaggccacagggaataccaagccaatgactctgactcggacgggcctatcttgtacaccgatgatgaggacgaagacgaagatgaggatggcagtggagaaagtaagactgttttcaagaggcagggaggagcgtgggtgataagcagaagcagctgcagtttataaagaataaaagcctcattaggaaccagacatctgatgttttctttcccctcatcctcctttctcaaattagaaatgtgtatatcctaaagtttagcttttgatgggaggcctttccagaagatgatgtcacatggctggatctggcctttgtcgatgagctagatgagctagatgtgctagatgtgcatattagtatttgtgctgagaatcaaagctttctaataacagagacctttctcactatgaccaaagagagcccttccactctgggcctgttgttgaagaaagaaagtcagtgcagattcataggcttactcattggaggtgtttgaaattttcactcgcttttgtactggggtttatagaaaggggaaggaggaatgagtcaagaatgccaaat

SEQ ID NO: 4897 - DNA, 1187 bp, Homo sapiens
tacttagtcgttgtgacgccattcttctgcgacggcgcggacctggagcttccgcgcggtggcttcactctcctgtaaaacgctagagcggcgagttgttacctgcgtcctctgacctgagagcgaaggggaaagcggcgagatgactgaccgctacaccatccatagccagctggagcacctgcagtccaagtacatcggcacgggccacgccgacaccaccaagtgggagtggctggtgaaccaacaccgcgactcgtactgctcctacatgggccacttcgaccttctcaactacttcgccattgcggagaatgagagcaaagcgcgagtccgcttcaacttgatggaaaagatgcttcagccttgtggaccgccagccgacaagcccgaggagaactgagactctgccttaccaccgcagtgcggggcacctctcccagcgtttctccggtttgccaatcctcttaagtattcctgtctccaaaggaccggctctccatggctcctgcgcctcgtgctttccgcgtacagaagtgcttgcccggggagtcccgcctgacctgccttcatgtggacccttagaacagcactgggagaccagcaggactcctgagaactgtgctggtggagaggtcctagagccggcgagcgtttgagaagagggcatggcgctggagtgagatgggatttggcgtctcgtttttggctaattgattgtcattggctttttccataaagtttagaaatcgttcagtctcttggtgtgaactttctgtgttagggtggaaggctccggaaagagctgagcgggaagtgggtttgggtgagggagcgcatgccagtgtccatggccaggcacttagatccgccgtgtctacctttataattaattccccgactgccacttttcccaagagcgttattttcaggcccacaatgccttcagtattgaaatttgtggttattgtatcccatcttctttttctcctgttttaaaactctttgcagtctttgctgtcattgtcctccctagcctctttaaaatgcatccttttttttttcttgggaatttgtggccatgtctccagaaatgacaagctggcaagcgagttcatccattctacattcaacaaatatttgttgagctctatgtgacaggcattttcccgtgttcttggggctta

SEQ ID NO: 4898 - DNA, 1319 bp, Homo sapiens
cggccaggcgcagtggctcatgcctgtaatcccagcgctttgggaggccgaggacggcagatcacctgaggtcaggagttcaagaccagcctcaacatggagaaaccccatctctactaaaaatacaaaattagccaggtgtggtggtgcgtgcctgtaatcccagctactcgggaggctgaggcaggagaattgcttgaacctgggaggcggaggttgcggtgagccgagattgcgccattgcactccagcctgggcaacaaaagtgaaactccgtctcaaaaacataagcacataaataaaataaataaaagttaatctgcaaagaactttagtatgtctgtagaattaggttcatggtaaataatgggtaatagggggatttaaaaaagcatgctagatctactaatactggcatggaaaggaattcagtatatttagctaaggaaaaacaaaacctgtaaacaatataaataatatcatcttgtatttattaaaaataggcaatataaattcatattttaatactcacgttagtaaatgcacataaacaaaaaaagtcagtggggagagaagaccctgttgaacttgactctattctggcacagtgaagagacatgagaggtgtagaataagtgggaggcccccttgcagggatgagtcaggggactggggacagtgctaggtggggagtttgactggggcagtacacctgtcaaacagtaatgcaggtgtcttaaggtgagctcagggaggacagaaacatcccatggagcaaaagggcaaaagctcacttgatcttgattttcagtacgaatacaggccccatgtaagtctgaaatccaggaggacagtcaaatcataaagctccaaaatgatctcctttgactccatgtctcaaatccaggtaatgctgatgcaagaggtgggttcccatggtcttgggcagctccgaccctgtggttttgcagggtacagaccctcctggctgctttcacgggctggcattgtctgtggcttttccaggtgcacgatgttagctgtcagtggatctaccattctggggtctgaaggatgatggccctcttctcacagctccattaggcagttccccagtgggaattctgtgcgggggctcccacctcacgtgtcccttccacgctgccctagcagaggttctccattagggctctgcccctgcaacacacctctgcctggacatccaggcatttccatacatcctctgaaatctaagtggaggttcccaaacctcaattcttgacttctgtgcacctacaggtccaacaccatgcataagc

SEQ ID NO: 4899 - DNA, 1177 bp, Homo sapiens
acatggatgaagcaggaaaccatcattctcagcaaactaacacaggaatagaaaaccaaacaccgcatattctcactcataagtgggagttgaacaatgagacacattgatacagggaggggaacatcacacactggggtcgaggtgggtagatcacaaggtcaagaaattgagaccatcctggcgaacatagtggaaccctgttgtggggctaggggagggatagcattaggagaagtacctaatgtagatgatggtttgatgggtgcagcaaaccaccatggcacgggtatacctatgtaacaaacctgcacattctgtacatgtattccaaaacttaaagtataataataaagaaaaagaaaaaatagttggaaagaatgaacaagacctactatttgatagcacaactagtcaataataacttgattgtatattataaaataactaaaagagtgtaattggattgtttgtaacatgaaggataaatgcttaagaggatggatacctcattctccatgatgtgattatttcacatagcatgcctgtattaaaacattttggattggtcccatggtgtaatggttagcactctgggctttgaatccagcaatccgagttcgaatcttggtgggacctttcaaaggagtacattttggccaggcgcagtggctcacgcctgtaatcccagcactttgagaggccgaagcaggtggatcacctgagttcaggagttcgagaccagcctgaccaacatggagaaactttgtctctactaaaaatacaaaattagccagctgtgacagtgcatgcctgtaatcccagctagttgggaggctgagtcaggagaatctcttgaacccaggaggtggaggttgcagtgagccaagatcgtgccattgcactccagcctgggcaacaagagtgaaaccccattaaaaaaaaaaatttcgggccgggtgcggtggctcacacctgtaatcccagcccttttggaggccaaggcgggtggatcacgaggtcaaaagatcaagaccatcctggccaacatggtgaaaccctgtctctactaaaaataaaaaaattagcctggcatggtggtgggcgcctgtagtctcagttacttgggaggctgaggcaggagaatcacttgaacccaggaatcggagattgcagt

SEQ ID NO: 4900 - DNA, 1173 bp, Homo sapiens
agcctgtcaacactcttgtcctggttagggctgaattttctggcttactttctacctagatctgaagcatctggccatgcctaccataggaaacaattgaaagaacaaaggcaaacaaaacaaattcgtttcaaatgacatcatgtggcttacagagagagaaaaatgtgtctagcatagccctgttaaatactgatgtctgctgatttaggaaaagctccttgtaaggaaagatagaatagagatgatgagactttgttggctttcctttataagttgacacgtgagtaggcgaaacattagtggctaaaagataaaacaattatccagtttttagataaactttgtaaatattcatttgcctttgggtttcactaattactgtccaacaagagaacccagggtgataagtaatcaataacacaacacacttaaaagcattttcttcattaggttgcatgtaacctaatgaagcgtacagttcttactctgttttttgggttttttgtttgtttgtttgtttttgttcttgtttttagtttcctcaccaaactgctaaaaatttatctctggcattcatttactggaatttagggcaattacctgagcataggtcagataataacttgtgtctgtccatatttaaatacaatagatgttacttatcaggcaccaaataaagtcagttttctattatgcaaattaactatcaaacttgttttaaaatatttaacctagtacatttaatgtactagggctgccatagcaaagtgccagagattgggtggcttaagacagctgaaatttatcgtcccacagtttaggattctagaagtctgaaatcaagttgccagcagggccttgctctctctctctgaaggctccaggggaggatcccttcttgctttcttggttgctggaaacccttggcattctttggcttagagatgcatcactctaatctccgcatggactgtcacatggcattctccctatgtgttccgtttgtcttctcttttataaagacaccagtgatattggactaaggtccgccctaatcccataaaacttcatttgaactacatctgcagagaccctatttccaaataagatcacattcacaggtgggagtggtggttaggactttgacatatcttttctaggaacatagtt

SEQ ID NO: 4901 - DNA, 1099 bp, Homo sapiens
ccctctatcacccgatgtcataaatggtgattttatgtttttagtgtaattgaacaataggatgtgggtgttggagatttcaattatgttagcacaactttatgcatccgtttgattgatttgcttttaaaatgtgattgtaaaatattcccttgtctcacaggcaagactcggaaagctagcctcctatctgccaagtcatccaccgagcccagcttgaagtcttttagcagaaaccagttgggcaattacccaacattgcctttaatgaaatcaggggatgcactgaagcagggacaggaggagggcaggctgggtggtggccttgccccagacacgtccaagagctgtgacccacctggtgtgactggtttgaataaaaaccgaagaagcctcccagtttccatctgccggagctgtgagaccctggagggcccccagactgtggacacttggccccgatcccattccctggatgaccttcaagtggagcctggtgctgagcaagacgtgcctaccgaggtgacagaaccgccccctcagattgtacctgaagtgccacagaagacgaccgcctcttccacgaaggcccagcccctggagcaagactctgctgtcgacaatgcattgctactgacccaaagcaagagattttctgaacctcagaaattgacaactaagaaactggagggctcaatcgcagcctctggtcgcggcctgtcaccccctcagtgtttgcccagaaactatgatgctcagcctcctggagctaaacacggtttagcaaggacgcctctggagggccacagaaaaggacacgagtttgaaggaacacaccatcccctgggcaccaaagaaggggtagatgctgagcagagaatgcagcccaaaattccatcacagcctccacctgttcctgccaaaaagagcagagaacgccttgctaacggactccaccctgttcccatgggccccagtggggccctccccagtcccgatgcgccatgcctgccagtgaaaaggggcagccccgccagccccaccagccctagcgactgtcccccagcactggctcccaggcctctctcagggcaggcgc

SEQ ID NO: 4902 - DNA, 1224 bp, Homo sapiens
aaaatgtagccagtagttatctctgggtgaagagattatgagcaagtaattttttttatgtgtatttttaatatattctacattgaataggagttacttttgtaatatgtaaaaaaaaaagttactaaaaataagggtgatgtttgtgaaacacataaagaaacgtacgcaaatcataagtgacagcttactgaattctcacaaagtgagttcacctatataacccaaaccaagctcaaacaggatagaccaggtccccagaaacccccctcctcaccctccaccgcctctaactgcagaggggagtgcctgttttttggaacttcatatgcagtcatgtgttgcttaacgatgggaacacattctgagaaatgttatgtgctagactttgatatgactgacagtgcagcgggtttgtttccaccagcatcaccaccaacaggtgagtaatgcagtgcactacatcacaatggctatgacatttctaagccataggactttttcagctccattatcatcttgtgggcccatcattgtatatttggctcatgactgcaattggaataatatagtatgtctccttctgagttcgtggctgcttctgctcaacattatatttgtgaatcattcatattgtttcttttggctgcagtttgttcaatttcactgctttacagagttccattgtttgcatataccaccttccattttactgttgattgatggacttttgggttgtctctggtttggcactattctgaatagtgctgctgtgaacattgttttggttaacatcagcgcatatttctgttggggagtacctaggaatggaaatactgatttgtatggtatgtttctgttcagctttcatagacactgccaaacagttttctggagtggttgtaccaacacacacttacacttctatattttccagtgctgatcacaagatttctccaagatactttcaactttcctgaattatttgatgctgtcatattgggaataatttttatctctgttagttgaatatcaaattgatgttctagaaaactcttgagtcattacctacattttttaggtgagtggtgtttgatggctcaagatgaaccttctctttcctcagaacagctttaagtttcttatacttcttgtgattgaagagcaggtgaccatgtttttcttctagtaactgcattatttgaattttgagagtatcatact

SEQ ID NO: 4903 - DNA, 1219 bp, Homo sapiens
aattaaataattatagattatacggtattcatgatcaagaagtgctttggaattttatgcacctaatgaatgtataggtggggaaagttgatctataaatgcacatgtatactgtaagggatatgaatctttactttcactgaaccaccagaccttaaaattttataggagcagagcatctcaaagtcttgatgtctgtaatttcataaagtatcattaacacattaagtttcaactaaattgaaattaattgtttcatttggggagattagcatttttctatttcagtggcagaatactgatgtttcaagggaatatattttgaggataacagtcataatattaatagttgttgttattatatttaacactcattgggagcttcttgtgtctcaggaatcttgttaagtcctttagatgtactatttcatttaatcctaagaacaaccctgtgaggaagatactattattatgtccattgtacagataaggaaaccaccaacttagagatgattcataacgcttctatgttactgagctggtcgctagcagcactcaagtgattgaacattcaacccaggcccaggtgacttgcaaccccgtgctcgtaagctcttaactggtctctctctctctctctctctctgaaaagggcaaaatctaaaacatgattatctgagggagatggggtagctagaaaagtaggattctatgaaatgttattctgctgaattctcaagaacacagtgtttctggaaagcttagtggttctgttgaggtgatgttcattgatattctaaatgtgttactttgttttatttttttgttggtgggggaagactttactagttggaattactaaaatcgctttaataaagtgcttgcaaagactcaatctggttaacagtaaagccatttgtttcagtcatgtcagcaactttggttttcataagggttttaatgaatcggagagtggaatttaagaaagcaaacaatccaaggaatactccttatttttctaaaatagcaaagcaaaaatgggaaccctttccagtttagttacagcaagtatctattggagttttagaaattcttagagtacatcatttatcatatagaacaaaacttgattaatgaacactttttaaaagtctttttagggtcctattattattttagttgtttagatataaaaatattttatgacatattcactgtt

SEQ ID NO: 4904 - DNA, 1354 bp, Homo sapiens
ctaattttcttttttccttttagtaattaagcacgatcatgtccctttttaagccttacctgagaggaacaatgccttaaaataaaaaagcattaatgagatgaaagtatgcacagaataactttcctctacttattctgtactttgccctcatgagttccaatgttgtgtgaagacaggcagatgctgcacagtgaattgcagatgatattacagaagtgatgtctgtaggtcacattaaatactgacttgagcagtgggtgacacaacacagtgtttgtcttccacagggaagcttaaaacaaaagatatttttaacccactgacagaacaacaaggttaagcttcatctgcttggtgtcccacagaacttgcacaagcagttgttattgggaaagtacagtctcaaaaccagcaacagcagcagtacctacagccctttttttggagagaagtttaaatgctttactgttggggcagtccatttctaatcctgacttggtgacagtatcatgtgtatttataaaacaaggctagccatatttaggacaactgaagaaaagctggaaaaaaaaacaagcaaacttgaacactgaagcaacctcaagcatctctttattttgatgatatatttttgtaaggaaaatattcagatgatcaggaatgtatataactgaaatcaagaaaaagaacagtatgcatttaaaaagacagaattatgaaattatatgagtgcttagaatggggctaagggaagtgctgaaatagagcaaaggatggaagataatatagactaccacccactgtaaatgtttgcaagtggctgtgttttaaatgggattattacagttgatctctatgaatgtcagagccctaactttcaggctttgcattttgtatatgggaagaaatatgacaatcctaggtaattaaaccatagacccaaagcccttacgtttgatgcaatttatttttaaaataggccttgtttttcagcttcatctgcagttctatgtgaagattgataaatcagtttttacttgttttattaataaaacgtaatttggatatcttgagttgatggttttgtgatttagctgggtaaactatctttgtaacagataagttatttataaaaattaaaaaacttatattctaatgtggattttgtgacttgttttcagtttgtgggacaggagataatttatacatcagcagatcatttaagcattaatggaaatcagggaaaacttcttctctagagtctccttgtgacattgtgatactcagctgcatttcttggactgtttttatcaatttccctagacttcttttttcatagtttatgatagtt

SEQ ID NO: 4905 - DNA, 1169 bp, Homo sapiens
cccgctcagcctccctagcccggagagccagttctccccgggcgacctcccgcctccgcccggcctgcagctccagccgcggggcgaacaccgccctagggacctgcacggcgacttgctttccccgcgcaggccacccgacgacccgtgggcccgtccaccccgctccgaccgcttccctgggcgctccgtctgggcggagccggcctggggcgacggcgccactgggggactttcagtgtacgcgaccgaggacgacgagggggacgcgcgcgcccgggctcgcatcgcgctctacagcgtcttcccgcgtgaccaggtggaccgcgtgatggccgcgttcccggagctctcagacctcgccaggctcatcctcctggtacagagatgccagagcgcgggggcgcccctgggcaagccctaagggaccaacacgcacttgcagggaatggcccagcctcgccttgcgtcttggacgggtggacctgtggttgccagcctggacctgagtgggcccatcatggtgcccccttttctttaaagatggtcagggaagcctgcttcctcctcctgagcggggttgtgggggcctggtggcacttggtgatcctcactgaggccggggcctgctgcggggaggtccacccacttccgtggagggaatgattttccatgtgcacggagactgcgggtccaagctgcagtagaacccacaagtgggtcacaaaatcaatttagtgggtcaccaccacaaacacagtggactgggacagggcaaagcgcaccctgtgccatcaggctgagtctgaactcttgttacctatcctgtgtccccacccccttggcagccatgtaactaacctcaatgtgggtcgtagtcagaagtttaaaaaagactatgaatgctcttgaatttcattgcttcaggtaatgtttgaaatatgtagtcaggtggccaggggaggtttgctatctggaagttttcatgttagctattgctaaccccacccgcaagggcagcccagcctccaggtgtgggctctcctgtgctctgaattgtgtggctgtcctatgctggggacaagtggtaggagcgctttgtcccagggccaccttctggggccttcacacacatacccccaccacacaaacacacacacacacacaca

SEQ ID NO: 4906 - DNA, 1207 bp, Homo sapiens
ggtctaatgaggggccgtaccttccaagatttcactccgcccctcgacgccgcgcggcgctgcgcgtgcgcaaacgcctttccctggcgagccggatctcggagcgtccccgcgcctctccgcggccgcccggggaggggagggcccgtcccgcccctccccgtctctccccgcccctccccgtccctcccgccgaagctccgtcccgcccgcgggccggctccgccctcacctcccggccgcggctgccctctgcccgggttgtccaagatggagggcgctccaccggggtcgctcgccctccggctcctgctgttcgtggcgctacccgcctccggctggctgacgacgggcgcccccgagccgccgccgctgtccggagccccacaggtagggcagggcgggcctggctggccgctttacgactccgactctccgggaggcccgggctgtccacagtgacgcttcccacatcccaccggcgggcaggggcgggggtccgggcccccgaaggaggtgtggggagaagcaccccaggaaatgggggcggcgtgggaggccgaggtaagaggaaagggacccactggggctgcgtcgctgtgagtgagcctcgagccactccacaccgactctccggcggcccaagccggcgcgcgacctgacggggctttgccgtcgaagcgcgcggttgccggtgatcaggccttcgtaatggcgccttcccggggtagagccagcgcttgggcaaggaatgtttgtgtgctcgggaagtgtggaagttgcccacttcgcgcatttccaggccacttgtgcctgctcggcctgcgatcgcgagggtccgccgttccgaggctgcggggctccgccgggctcaggtgggcagagggagagacctggccctcgcgcgacgtaatgtttttgtcggatgttggaggagaagttctcacggcggggcgcgatcggcggtgtccgcatcccctggggactcagcccggcctctgggggcggggcccagcagtccgggttggagagtcctgcaggtgcttctgatgccagctgaggtgggagaatcgaggcatcctaacattaaaacgtggctgatgctcaccattcctgccgtagagtcgtgcctacctaggccagtatcagccttttttcagtagaatggtagggaaaagtttgaatattttaaagagcaagtgttctg

SEQ ID NO: 4907 - DNA, 1218 bp, Homo sapiens
gtcgttgggttttattcttattgtattattcgggctccaccgacccaaatattagtcaactgggttgggcgaggtaggacggatgaagcccaccgtctaacaatctggacatctataggagcagatccgccgctcgaaacagctgacccagcgacgactgcggaaccactagcagcgtctgcacagatcgaccccgccatcccgccgtcccgctcggtgaccggagacacagccgggaacgcgactgatcaggctaccgagccgggccgcagggcgaaagcggtgcggtccgaggcctcagaaagggacacgcagcagcggaagtggcgctgactcagcccggcctccctgcagtcccctggcagcggtagcagccacaggggcgggcggctgggccacacgcctcccccgccctcggccccacccggccgcaccctaagccgcgcggcgtcacagagcgcatgcgtgccgcgggggatgccgggagcgcgcagtggcggcagcggcggcgacggcagtaacagcggcagctacagcggggacgcgagcggggcggtgacggtgtgggaggtggtctcactcttgggaaaactgctgggcaccgtcgtcgcgctgaaggtggttctgtacctgctccgagtgtgcttagcgatggcctggaaatccggcggcgccagccactcggagctaatccacaatctccgcagtaagtgccacctccgcccgttgtagggcagctggggcaggctgggcctggaccgggtccccctgggccgtccggaacgttctgtctgtccccgcgcgcctgttggagggcttcggcgcagagttgccccggtagtcccgaacggcgtgcgcttgcagtcgcctccctcgggacctgtcactcgtcgacgacgtggactggaaggggagagaaagagccaggggccgctgctggtgggggcaggggcagtcgtctccctgcaggccctgggggagggagtgcagtacaggtgatgctgctgtcactcaggtccgcgtccgggtccggcttgtgaggggcgtgccttcggggtgggagcgtgtgggctaggccttatggagagtgggctggcgctcaggagaccccaccctcgtcccctgcatttttctcaccttcctcctccataatcaacctcgctgcaagctttccctcttatgcagcctcccccgccctccgttttttcccctggaggg

SEQ ID NO: 4908 - DNA, 1197 bp, Homo sapiens
ctttttgaaaaccaacaccatcacagcttgttttggactttgttacactgttattttcagcatgaaaatgtgtgtttttttagggtttctgattcttcaaagaggcacagagccaaattggtagaggaaggatgcaaagtataaatttgtgtaatattactttaacatgcccatattttacttggaaatattaaaagaaagggttctgtaaaatggaaaacttagtttgtgaattgattttgaggagtggtttttcttttcttggacacttaattctgttctgatattaatttatcagattgcttttgtgcattggataacaccaccattcacaagttaagattcttggtatttggatatctgttagatgctactaagaaaatagagatgagctttctttttaaagcttttgatgtggtgtcatagaatagcatgttgtagatacaatcagctgctttgttaccttaaaactaggcatttgtaaatattaaaccataagatggcaggtgatgtcctgtaaacactcagctgttcagattggacataactgacttagttcttcccttctctctctctcaaaattataggagacttgtagtttagtgtggttttctgtttctaatttgctgctgataatgtatatgaacttaacatgctgtgtaagctgtgtcctagttcttgaacagtttatgcagtgctgctttgccaaataaagttaaaagtaaaagaggcattggttgtttttgaatatagaaggaagaacagcaagtccaccagatagggagtgtttacgatcatgggaaaaagactgtttctctggttgtttccttttgcgaagtctgagtaagtaattagcattaatccaactgtacattgtagaatgtgactacactgctccagggccaggaccgtacttcagtcgtcatttctctttgactccctagcccagggcttgccctgtagtagctatacagtaaatgctggtgagtgagtgagtggtgaatgaatcgacttaaagtcaggaaagaacaggattgagggtgaacagaccaaaacccatctctcacctatacaaagatttattaatataatgactatagctgaatttctaagaaggcagtagcactttgggatcttatttaaatgttgtgatttataacttttataagaagtagttctggaactgaggaaatataa

SEQ ID NO: 4909 - DNA, 1148 bp, Homo sapiens
tttctttccctgggcctcccgagggaggtctgataacgcaagaaggatgagaatgtgggcgggagatgagggcgggaggaactgcccggacctgtcagccttgggtgtagcacctgcaaggaggacatgattctcctgcggtgacagcctgaccgggccccccacccaccaaggcaggaccacggcgacctggggagcatgctgccagcagctatggtgggggctttggtcagaggatggaggaatcgaagctctcctcaaagggctgagtcaaaacttcttatccgaccgagccaagatggaattgcaattcagggtatgtttgacaccttgatgtgattgtgtggccctttgtaaagggttcagagggtgatcatgagcttataagcttttctccaccttcaaatggaattgacaaatccagaatctgtttttttcctcaggttatcataaattgtgactaattttacttgtgggaggtctattttcctttcctaatcaaagacttcagtagtcacgtaataccttcagtagtcacatagtaaaagattattactaccttctttttttccagagcttttactttaagatggaattcttgttctgtggtatttgtgtttgcctagtaggatgaaaaaggtatactggcttttggcaaattttagtctaaattgcatcactttattatgtctggaatgggagatgtggagagtacttaatttctgggttttctcagtaattctttttattttctgttttgttactatcgttttgaggcaacaatagaactagtgacaaaaatatagctttcttgttaacttagttcaaagggttattatggcctttttctgaaataaattttcattagaatgaaatactttggaaatacctgacctcgttctcttctgtctggaccttggactccttaatggtacttactagaagggagctctttggtcttgccgacgatggacccatgggaggaacacagtgccagctgaggaagcaagtctgagcatagaagtcatagactcccaggggctctcagagctggcctgctgcccctccatgctctcatctgaccccacgccctgagagtctcctagggagtaaacacgagtgttcttgcatttcaacaaatatgtatt

SEQ ID NO: 4910 - DNA, 1194 bp, Homo sapiens
ctgatgtaacaaatgggaccaaggagaagctggtcttccgtcttaggctcagaaaacagtatcaaaacagcaactctgtggctcagagtaatttatagcatcattttaagctaatgtaattctatttagtgtggaagaggggaagagccctgggatgctgatgtgctgggggtcccgagggaccttgagactttctctcgtatggctctgaagggagacattagaacttactggaggctgggcgtggtgtggctcatgcctgtaatcccagcactttgggaggccgaggccagtggatcacttgaagtcaggagttcgagaccagcctgagcaacatagtgaaacctcatctctattaaaaatacaaaagttagccgggcatggtggcaggcacctgtaatcccagctacttgggaggctggggcaggagaatcgcttgaatccaagaggcagaggttgcagtgagccgagatcacgccattgcactccagcctgggcagcaagagcaaagctccatctcaaaaaattaaaaaaaaaatgtagtggaaagaacatggactttggagtcaggattaacctaactcaaggacaagggagctgtttttgtaaaaaaaattcttggccggatgcggtggctcacgcctgtaatcctagcactttgggaggctgaggcaggcggatcacctgcggtggggagttcgagaccagcctgaccaacgtggagaaaccccatctctactaaaaatacaaaattagccgggcatggtggcgcatgcctgtaatcccagctactcaggaggctgaggcaggagaatcgcttgaacccaggaggtggaggttacggtgagctgagatcgcgctccagcctgggcaccaagagcgaaactccatctcaaaaaaaaaaaaaaaagaaattcttaattgcattgcacttacaggctgtgtgactttgaggaaataagctctctgattaattaataagattcccaatttctttgtgggtaaattgggagcaaggctgttgggaggaatgactgagatgatacctcggggcagtgcctctttgatggtagctgccaataaatgctggtccacttcctgcattcctccctccacttccttgttgccatgtcacctgcacacaaaacagctttcagactccatcttggcacaatatacatttatatttgaaaa

SEQ ID NO: 4911 - DNA, 1214 bp, Homo sapiens
ttgagaatctggtaaattaggaattcaaaaatagttttaacactttttacttcaaagaaaatcacagtgcaagcaatctgagtggattcatcaaaagttatacatgaatattctgcagagtctggtgttgctgaaagttttgatttgtgttctgctgagacacaaccatgaaaatatgcacttgcttgtattccgaagaggatagttccagtgagacttggacaatgagcagaaaaaatttttttttgagacgaggtgtcgctgtgtcgcccaggctggagtgcagcggcgcgatatctgctcactgcaacctctgcctcctgggttcaagcgattctcatgcctcagcctcccaagtagctgggactacaggtgcccgccaccacacccggctaattttttgtatttttttttttttagtagagacggggtttcgcagtgttagccaggatggtctcgatctcctgacctcgtgatccacccgcctcggccttccaaagtgctgggattacaggtgtgagccattgtgcccagctcagaaaatttaatagtactagatctcgtgtgtgtgtgtgtgtgtgtgtgcgcgcgcttaggttgaaggtggaatttaacattgatttaaaaaaaataatagtaggaaaaaataaatgcggtttgagtccaaagcagcatttttcactaattttatgaaggaagtccttttgagtaatgtcttaaattaggaaaatggcgtacttttacatgttagacattaaactctagggcagataaccatgccctgtgtgttgtgtatcaagcttagcatatacataggaaaagatgtattgtgagagtgtcttacatttcgttggtttggtcataaagtttatagaaaatgcttgttttatagttggttgttattgagatgagagtccctcaaggaactccctatgctttagggagctttttgttttaaacctactggttagacttgtgggttttaatgttttcagctgtggttgtaagaaacacattttaaattgcacctagtatagacatacatgtaaaacaaacaaaatttttacgaagtagtacttgtattaagagtgatgtactctgctatcttctatttcatttttttaaagttgatattgctgccttaaattgattttttcaaccactaatgagtcaggacccactatttaaaaaatactggtgtgttctcttgctgt

SEQ ID NO: 4912 - DNA, 1400 bp, Homo sapiens
ctgtgccacggcactccagcctgggcgatagagagacactctgtctcaaaataagtaaataaataagccacaggtggtggtacatgcctgtcatcccagctactcaggaggctgaggtggaaagataacttgagcccaggagttggaggctgcagtgagctatgatcgcatcactgcactgcagagtgggtgacagagcaagacctcatctctaattttttaaaatttttatgtatatacactacctgatgaaattataaattaaatagtttaaaaaggaagaacatatagcagattttgaacttgttgcagtggtgaaattattgatagtttttctcttgttcctctgcattctgattttcttgaaattgacttctattcgttgtgttactaaaagaatattgatttatatttttaaagtgtgaataggagttgaaaaaagtcttaactcctattcaagtctttctagaaatattgctcaagaagaagaagatagttttttttttcgtctgggctgccaacatgccatccagactgaggaagacccggaaacttaggggccacgtgagccaccgccacggccgcataggcaagcaccggaagcaccccggcggccgcggtaatgctggtggtctgcatcaccaccggatcaacttcgacaaataccacccaggctactttgggaaagttggtatgaagcattaccacttaaagaggaaccagagcttctgcccaactgtcaaccttgacaaattgtggactttggtcagtgaacagacacgggtgaatgctgctaaaaacaagactggggctgctcccatcattgatgtggtgcgatctggctactacaaagttctgggaaagggaaagctccccaagcaggctgtcaccgtgcaggccaaattcttcagcagaagagctgaggagaagattaagagtgttgggggggcctgtgtcctggtggcttgaagccgcatggagggagtttcattaaatgctaactacttaaaaaaaaaaaaagaagaagaagaagaagaaaaatggaatactggaaatgtgagaccaaaatgagaaatcccagagcatattggtgtggtgataatgacccagcagacagggaaagcaggtgaaggagagagaggaggtaattgctgtgtgaagtctttgcggaggaaagagacaataggatatcaagaacgggtcttccctgggagcatgaatatttcacctcatccatttctacaggagtgaaggcaggatatgtaagttctgatatagttaagtggatagatcctgtagtggaagatgaagaatttcaattctgatagtctgtatttccaaaatgacatttgagactagctcatcagctaatggggaatgggagaatgagagagtatgga

SEQ ID NO: 4913 - DNA, 1238 bp, Homo sapiens
gtaggctcggagactccagcccagccacgtggtggaagatttatggacagaaaaaggaaagtgacgtacagaaaatggatgtgaggtacagaaacaaccaaattggttgcagcttggtgggcgtttgccttatttgaacacggtttgaacagttagcccttgattgcccaaaacttggtggttggcacaaaagtaggcttcagtctgtttacatcttcatttaggttacagttcactatgtacagagaaacctttaggctgaacataaaatacgtaaaaaggcagctttaggctaaacttgatttaacaatataaagacttgaggcaaagatagtcccacaacttgctcaagaccacagaaatatgagaaactcagaataaccctcaagtactcgggctccagactggatgctgttaacctcccccagactctcatgtctatattgcttttggcctatgacttttttatgtgtgtgcatgaaattgtgaacttcttttcagtgataatctcgtactcttattttatcacactttttagttccttgggaatagctcttgagtacggccataccaccatgaatgtggctgatcttgtctgatctcggaagctaagcagggtcgggcctggttagtacttggatgggaggaatacgtcttaaattttataaacaggactcagacatctatttttatgcttatttttaaatgtcttgataaaatgttatactactattacattcttgggaaaaatctcacttggtttttttttgtgttatacttttaatcaccagattttgtttgctaaaatgttatttagaattttgcatgtatttttcattggcctgtgattttttctttttatataacatctttttaaaggtctttattaatattacactcaagtgttcttctgttttctatgcgctgaatccaagcagttaaaatccatgggaaatatttttccttgatattttctaagaactattcatgtaatattatattgactgctcactcagcccctttccctaaagcctggtaacacaattaactcatgattccccgataaatgctattttctcattcctccatttttatctatatgtaaggctcttggctttgaatttggtttctatctctttgtttggttaagttcatcttggtaaaacagtaacactctcagcatttgttctcagttctgtgagttagagttgataaactttctcagtaggacagacaca

SEQ ID NO: 4914 - DNA, 1173 bp, Homo sapiens
caggagtttgagtccagcctgaccaatatggtgaaaccctgtctctactaaaaatacaaaaattatctgggcatggtggctgtaatgggaagctgaggcaggagaatcactggaacctggaggttgcagtgagccgagaatgcaccactacactccagcctgggcgacagagtaagactcagtctcaaaaaaaaaagaaacatcacaccgtaccacattaatatgtacaattgttatatgtcaattataggtaagaaattaaataaaaataaactataaactatcttgtagacaataatgtatcatcaaactgaatattctgctctcatgtacttcctatacttatattgactcagtttgaatctggtcccaaaaactcacaaaatataagactgtcaccaacatcacataagcaaaaatcattaacttgtacatgtagagtaataaaatgacgtttcacattaaaaatattattcatatacacacacatacaaagattcaaaagaaaacaaaaagctaatggaaaaaataggcaaaagatctcaacagatacctcaccaaagaaagtatatacaaaaattaataaattctgagcagccatcttatgttaaagaaaagaaggcatataaatagcaaaaaagcgtatgaaaagatgctcaacatcatgagtcattagggaattctaaattaaaacaataaaatgttactacccacctactagcatggcgaaaatccaaaacacagaaaacaccaaacgttggcaaggatgtgaagcaacaggaactctcattcattgatggtgggaatgcaaaatggtacagccactttgcaagacagtttggcatctcttatacagttaaacatactcttaccatacaatccagcaattgtactcattgctatttaccccaaagagttgaaaacttgcatccatgcaataatctgcacccacatgttgctagcagggttattcataattttaaaaacttggaagctacaaagatgtctttcaataggtgaatgaataacaaactgtgatgcatccatacaatggaatattattcaatgattaaaaagtgacctatccaggagatcgagaccatcctggctaacacggtgaaaccccgtctctactaaaaacacaaaaaattagctgggcgtggtggcaggtac

SEQ ID NO: 4915 - DNA, 1210 bp, Homo sapiens
aaccgttggcgaagcccccgccgcgccgccccaccagcagcaccaccaccaccaccatgcccaccaccaccaccaccatgcccaccacctccaccaccaccacgcactacagcagcagctaaaccagttccagcagcagcagcagcagcagcaacagcagcagcagcagcagcagcaacagcaacatcccatttccaacaacaacagcttgggcggcgcgggcggcggcgcgcctcagcccggccccgacatggagcagccgcaacatggaggcgccaaggacagtgctgcgggcggccaggccgaccccccgggcccgccgctgctgagcaagccgggcgacgaggacgacgcgccgcccaagatgggggagccggcgggcggccgctacgagcacccgggcttgggcgccctgggcacgcagcagccgccggtcgccgtgcccgggggcggcggcggcccggcggccgtcccggagtttaataattactatggcagcgctgcccctgcgagcggcggccccggcggccgcgctgggccttgctttgatcaacatggcggacaacaaagccccgggatggggatgatgcactccgcctccgccgccgccgccggggcccccggcagcatggaccccctgcagaactcccacgaagggtaccccaacagccagtgcaaccattatccgggctacagccggcccggcgcgggcggcggcggcggcggcggcggcggaggaggaggaggcagcggaggaggaggaggaggaggaggagcaggagcaggaggagcaggagcgggagctgtggcggcggcggccgcggcggcggcggcagcagcaggaggcggcggcggcggcggctatgggggctcgtccgcggggtacggggtgctgagctccccccggcagcagggcggcggcatgatgatgggccccgggggcggcggggccgcgagcctcagcaaggcggccgccggctcggcggcggggggcttccagcgcttcgccggccagaaccagcacccgtcgggggccaccccgaccctcaatcagctgctcacctcgcccagccccatgatgcggagctacggcggcagctaccccgagtacagcagccccagcgcgccgccgccgccgccgtcgcagccccagtcccaggcggcggcggcgggggcggcggcgggcggccagcaggcggccgcgggcatg

SEQ ID NO: 4916 - DNA, 1177 bp, Homo sapiens
agtgcacacggatgtcctggctgacattctcaagagcatcaacaatgccgaaaagaggcaaacgctaggtgctttttaagctgtgctccaaggtcattgcccgtttctcactgtgatgatgcagcacggattatgcggggtggagttggggggacttcctgggccgggggacttttgcaagagaccccggtgactcaggattttgagttcttaaccagtcgagtgaaggattcaaaattaaccactccaagggaggattgaaaaaagaaccactctcagtggacaaaaagaaagaaaggggagagggtaacacagggatataagccctagtcacccgagccagcaacggcaacccttctgggtccccttccaccacgtggaagctttcctttcactttgttcagtaaactgcgctgctgctcactctcctggtccgtggactctttttaagctgtaacactcaccgtgaaggtccgcagcttcattcatcaaagttagcgagaccacaaacccatcggcaggaaaaactcctaactcagttacattggcaaatttgaaatcattgatgatcacagagctgggaaaattgttgtgaacctcacaggcgggctaaacaagtgtggagtgatcagcctcagatttgatgtgcaactcaaagatctagaaaaatggcagaataatctgcttccatcctgccagtttggtttcattgcactgacaacctcggctggcatcatggaccataaggaagcaagatgaaaacacacagcagggaaaatcctggaattctttttctagggatgtaatacatatttacaaaaaaaaaaaaaaaaagatttttctctctccttggttttaagaaatttaattatgatgggactggtgtggttttctttgtgtgtcttttggttgtgttttattgactttcatatctgtagatttacagtttttatcaaatttggaaaaaattcaagtcagtttttttcttcagatatttatcctgtctcctctttttttttttttttaaacagcagctctaactaaatatatatattagacctaccctgaagtctctttctctttgtgttttatttttcctttgtgggctgtgtcttcaatttcaggcttattcgttttcatttaaaaattaccattaaatctatccagtgaaaaagtg

SEQ ID NO: 4917 - DNA, 1176 bp, Homo sapiens
gaaaagcttgcacccctggcagagtgcagatgtctgcttccccacctccttggtggtactgaggattaccatgtcaaaaatctttgctgatggctggttattttccaagtactgggatacatctttaaggtgccacactttattttccccctcaaatcatctttagataaaaatgccaaggtgatactaaggttaaggaaagatgaagactaaaacgccagagcagggcagctagcctgcaaatccacctgctggtggccacattcgcaggttgttggtgttgactgtttacaaagagccctgggggacagcagctggggactgggggctggagatgtggacatctgtcccaggctaactggggactggaggccgggggtgtggacatctgtcccaggctaactgtcatccctcttttgttcctaacgcagacctgtgctggcgatcgtggaggtggaagttcaggaagtcgatgtgggtgctcgggagagggttttccaggaagtgtcctccttccagggccccctggatgccactgttgtagtaaaccttcaatcaccgaccttagaagagaaaaacgagtttccagaggacctgcgtactgagctcatgcagaccttggggagttatgggacaattgttcttgtcaggtaactgctcccctggctgatgtgggttccaggggatgtcgatgaggatccgtgagagctgccaggtcgttcttggcattgacttggagtatcatttattccaggatcaaccaagggcagatgctggtaacttttgcagacagtcactcggctctcagtgtcctggacgtggacggtatgaaggtacgctgtacttggccacactgtggagtggggtctgatcaatccctctttttatgtgggcatgtcttcttcctcctcttgccctgacctgtgccttttttttttttttttttttttttttttttctctgagacaaagtcttgctctgtcattcaggctggagtacagtgatgcaatcacagctcgctgcagccttgaactgccaggcttaagcaatcctcccatctcagcctctcaagtagctgggaccgcaggcacgtgccaccacacccagctaattttttttaaattttgtagagagaggatctcactctgtagccccggctggagtgcattgggacag

SEQ ID NO: 4918 - DNA, 1983 bp, Homo sapiens
ctgccagccatcagggacgaatgagttttaaaggcccttactgctttgtgtcttgagggaatatcttttattaatcgtgaaaaaatcaatccagataacttgcctgagtcatttcagtctcctttttgaggatgcctgcttaaacagcgaccatggtctctggaggggtagagtctcacattcggagttcagtctcttagaaagtacagttcagtgtggaagaatggcagttatgatttcattcagatgtgcccagctgctgacaaattgaatacaacgatcagtggcaggcagaactctcatttgttgtgtgttgtcttgagtctggtgaggtgtatcctttcactattggattttaccattcagtgcagtcagtagctccatttgatgtaagtgtaaagatgggtctctcatttcagtttcagcaattattcttaaaacctttattttccagtgttttaaagtttttaaattttatatctttttttttttttaaacagatttgtaagactccagggcctcccagccgtgaataatctgatggttcctgaaatgactggggaagcagacgcttcgtatggcagttgaagagtgtgtgtctatgtgcatttaaaaccttctttctgtacttacacattcacacgggaagacaggctcattcttgtgcacacttgagagttttacaactgatgaaaattaatttaagaatcagatggagcaacttgacaccagtgggctcaggagcccggggagaaaaatacatcactaatggccagttttccatatggtctgcacgggtaaagaaagtctgcaaaaagaagaaaaaaaaatttgcgcagattaaaccacaaaaatattctccagtttaaagaaggaactaagtgagaaggtgactgagaaagaagtgtgatttcaaacattgcagcggctcacacagtgtttgttgcactttatttttcagtgggtttggtgatttggacggattaaaattctagactgaaaagtaactcctactgtggttatggctagaggaaagcaagttcaagtatgatgggacaagtttgaataatgaactgattcctttgcctatcttaattaactgtatttgagaaattttaatttattattcccccccttttttcctgcatctataggataatattgtaaaatagcaattgaaaccaataattattaaataaatatcaaggaaaatccaagcaaagctttctttttgttggactagtggtgtggtgtttggagacagtctctgaatgtgaacaggaaagcacccatcagcaaaacactatcactctctagggagacagctgggggaatctgactctggcttctgcttttgttttaagggattaacttccctgtcaagtccaagaagacttgcgtatgagaagattacctgatggacttaattctaagattagcttttttcatcaagatggaaaaagatctttaggagcagaaaaggggagtgctaactgggggagcgagaagggagacgagcaaaagaaacaaaatcttgccacgtggctctgttttgtcagcaagaggatttaagactcacccagggcaaacactgggaccactgtaagagcgctggaacattctgcctcttgagtgaaggggccttctttctagcctctatggcactgaggggtgcgccggctggtggaggagcagtccgatggagccctgcgttccccggggacacagggccaagctttgaggtggaaagtttctggttctgaaacaacaaggagagagtctgtttttcttcctaaaatttggactcttgtctgcacaaactctggtctgttttgcacggtttgtgtgcctttttttccctttatgcaatctttttcagctttagcagcagaaatttgtctagttcaggaaacatgctagagggtggcttcagaaggaagatgatcctgtgtattctgtctctgcatccgaacttttgaagag

SEQ ID NO: 4919 - DNA, 1213 bp, Homo sapiens
gtccttcaggaggtattcctgaagaaggcattgttatcataggagatgacagctccgtggatatgttactgccccttgtgttagggttctctagaggggtggaactaatgcggtagatgtatatatgaaagggagtttttgaaggagaactgactcacacgatcacgaggtaaaatcccatgataggccgtctgcaagttgaggggcaaggaagccagtggtggatccgtctgagtcccaaaaccacaaaagttgggaagttgacagtgcagccttgagtctgtggccgaaggtccaagagcccctggcaaaccactggtgtaagtccaagagtctaaaagctgaggaacttggagtctgatgttgagggcaggaggcatccagcacgggagagagatgaaggctggaagactctgcaagtcattcttccatcttctccttcctgctttattctagctgcgctggcagctgattagatggtgcccacccagattgagggggggtctgcctctcccagtccactgactcaaatgttaatctcctttggcaacaccctcacagacacaccaggaacaatactctgcattcttcagtccagtcaagtttgacactcagtattaacgatcacacccctgaagaccttccagtgggacaaggtgtggaggcagaagacagtgatatgaatgatcctgaccgggtgtaggcctaggctaatatgtgtcttagtttttaacaaaaacatttaaaaagaaaaaaaaaattaatagaaaaagcttacagcataaggatataaagaaaaacataatttggtacagctatatgtttgtgttttaagtgttattacaaaaggatcaaaaaaagtatcaaacttcttgaaaaactgaaaagtttaaaaagtaaaacagttacaataagctaaggttaattcattattgaggaaagaaccatttttttaatgaaatgagtgcagcctaagcatccagtgttgataaagtctacagtagctacaaggtaatgtcctaggccttcagtcactctccactcactctctggctcacccagagcaacttctagtcctgcaagctccattcatggtaagtgcccttttatagatgaaccactttttatcttttatactgtattcttactgtatgttgtctatgtttagatagctttagatacatgaatacttgccattgtattacagttgcct

SEQ ID NO: 4920 - DNA, 1195 bp, Homo sapiens
tttagaaagcaaaaaattcatattactacgtatttgtctagaaaatggtctggaaggatagacatgaaatatgaattacgattatctctaggtgaaattctcagtatttaatgctatctttatattttatgatttttttaaaatgagaatataatgagaaaaacctataatcagaagaaataagaaatctatttctatttttggtatagaatttggtaagttaaaaatgtatgtgagaaattaaaaatataagttcattagccatgaaatatttaccctttttttgtgtgtgaagtgaaactgatgggtctgaagtgcaggttttgacatagaccccctgggtgctgggttggaatctaatggaaaggcttttactttgctgggcaattaagagattttcaaatgtgctgaggccaatgtggcctaaggaccttaagcgttttcctggctccaaggtcattacagagccaggaaggcacctttgtaggtgtgatgtgcctggcatggtctctaacactgaatttttttcttttgtagaaacttctattaagacaagctttcccatgactgttaaagtcgatggtgtagctcaagatggaaccacgatgtacattcataacaaagttcacaaccggacaaggaccctcacatgtgcaggggtgagtgtgtggggtgagccccacagtcagtcctcaggctgtgtacacgtttaattacagagccactttccagtctaaaagatagcatggtaagaggcttcgagaaattgttcttaagtgaaaaaaatggagtcataccaaagatggcatgaaaaaacttacttatttttacagttggatacccttaaaaattcttataaacgtacacatgcattcacacatccgtaaacacacgtgtacgcacatatgcatgcacacacatatactgctagccaccctgagcatacacggtacttgtttttactgtgtgtgtgaccttctgcccagtgtgtccctaatgaatgttatgggctgcctcctcatacgaacgtctgccacaggctgtggtcactgggtttttttgttttattttgtttagagacaggtttttgctctgtcaaccaggctggagtgcagtggcacaatcacagctcactgcagcctcaaactcctgggctcaagcaattctcctgccttaacttcccaagtaactggga

SEQ ID NO: 4921 - DNA, 1198 bp, Homo sapiens
acatctgcacttggtgctgtgcacacagcctttgctttgactcggagtggagggtggagagagcaggatggagaggaaagagggctccatgtagagagtgacaggttaaaaggagagaaagaagaatgtgtaattcactctgttcattattataacaatcgcaaaattgggccagggaggacaaattaggccgcggcatctgcattgacgtgtcttagcttacgtttcccctgtgctctagtgttatatatttatggaaatgtcaggcttgcgttgcactgttaactttcttacacggtgacttattttcagtcatccaaagtagaaagattctaattggtgtaaatcatatattatgtttccaaaaatacccatttggttcattctttctaggaactgtgtttggctggcatctgactttctctgggcttttggcgagttccctggagacaatgagttctgcccatctgctgttgaaacgtgttacttcatgggttatttggcgggagcgtgagtctcgctttctttaaaggcaaatctttctgtgtatttgcagaaatgtgcggagattattgtggctcaccttggctacctgaactacactcagtatacagtgatagtgggatttgaacacctgaagctccccatcaagggaatgaacttcacagtaagtataccagctgactgcacgtttccatggctcatgttctagttcccattctttgttcaatgattgaaatacatctcagcatctaaataatgttaatttggacagtggaggacttgtaaagtttttaaaaattataggaaaactacagtttcttaagtatatagaactaagaatagcttaaatatcatagagattgggcaaaccttaggtgtctgagatttagaatagagagtatatagtgtgttcagctgcaaggcagtgaaggggttagcagacacagcacccccttctctggcccctgtgagtggtcgtcagtctctgcccgaactgccggtgagtgggagggcactgttctaattgttagactgtcctttcttgtgtccagctgaaatctcccctttccactcattaggagtcagtataaccagcatagtgatgaggagtgggggtttagactggacggtgagctgggttctcacgctgcctccatcattgactcacgtgattttgttgagcctcagttttctt

SEQ ID NO: 4922 - DNA, 1165 bp, Homo sapiens
aagcctttttattcaggttaaaagttgtactcccatttcctaaaataaggactgaactgagaaactctagctacagctacttggttttccatagagttaagttggctccttagatgctgaagtctgtagttatgaccttgctttcattagtaattagcacctgggcaggtactaaccaatgaatgccctttacacctggcaagaaggaatgggtggggaggccagattgtttcaatctaaagggcactacgttgtggtgggttacgttttttggtagacagacactgcctacaggcaactaagtcattccattaactgtcattatcaatccatgtgtggccaagcttgaattgtcctgctggtttagcttcctgatggggaacaacagctgtcgcaacgcacagtgtctgcagctccatcatgggccccaggacgtcccacagcagctaacactggtctgtactcggaactctgccacctggccagtgacttttgtgcgtcatgttcctgggaatagtatgactgtccatgattcctaggaaagctagaggaataactgaggatgaggagctagcactttgacccctgtggggagtgctggttatagtggttatcagggttgtgacaagtggactcttgtgagttccaacactggatgattttattattcctattactcaggcagtaaaagactagtacatatcctggtgttatataattatatgaaaacttatcagaatgagttttataactagcgtacccatgtttttgttattgtgctgcagataaaatggcgcactgaaatgttactgaattatgtgacaatttttgttacaattctgtgcactttttacaagatttgtggagcttagatagatggctggcctttggcatctgaacattttcctgagcccgatagacaagcagattttttttgtttgtttttggagacagggttctcatgcctgtaatcccagcaccctgcctagttcaagaccagcctggctggcaacatggtgaaaccccgtctctaccaaaaatacaaaagttagctgggcatggtgatgcacgcctgtaatcccagatactctggagactgaggcaggagaatcgcttgaacccgggaggtggaggctacagtgagccgagattgtgccactgcact

SEQ ID NO: 4923 - DNA, 1192 bp, Homo sapiens
ctcagcctcctgaatagctgggattacaggtgcatgctaccatgcctggctactttttgtatttttagcagagacagggtttcaccatgttggccagggtggtctcgaactcctgacctcaagtgatccgtctggctcagcctcccaaagtgctgggattacaggtgtgagccactgcacctggcctatataggcttttttcttaaacctatttagtaatgttttcccaagtttattttttatttttaattttttccccaagtttatttttctatttttttttcatggaaaaatggggtaacttagcagtttcaatattgaagactgaagtttaaaaaaaatttaaattcaaggtacttttaaaattcagttagaaaagtaggctttaaaaattattagagacaagagtaccaaagcggtgtgtgtatgtgtgtgtgtgtatgcatgcttgtggattggaaaaactttggagactgattacttttcattatatatgtgtcacagtgaaacagcttttatgtgtcatgtaagattactgcttgcctctctaaggaaggtcgtgactgtttaaatagacgggcaaggtggaaccttttgaaagatgagcttttgaatataagttgtctgctagatcatggtttgtattgaactaacaaggtttgcagatctgctgacttatataaagctttttgattcctactaagctttaagatttaaaaaatgttcaatgttgaaatttctgtggggctctatttttgctttggctttctggtgagagagtgaggaagcattctttccttcactaagtttgtctttcttgtcttctggatagattgattttaagagactaagggaatttacaaactaaagattttagtcatctggtggaaaaggagactttaagattgtttagggctgggcggggtgactcacatctgtaatcccagcactttgggaggccaaggcaggcagaacacttgaaggagttcaagaccagcgtggccaacgtggtgaaaccctgtctctactaaaaatacaaaaattgtttagctctgtttttcataatagaaatagaaaaggtaaaattgcttttcttctgaaaagaacaagtattgttcatccaagaagggtttttgtgactgaatcagcagtgcctgccctagtcatagctgtgcttcaaaaacctcagcat

SEQ ID NO: 4924 - DNA, 1152 bp, Homo sapiens
ccggacagctctgccgccggccccgccgcgctcctagtcccgccgcaacccctgcgctcccctttatttgtgggtctcgctgccacaaaatggcgctgagggaggaaaccaggccccgccgcccggccccgccccgccgcacggctccgctccgccctgccccgccccacagccggtccgaacgcgccgcaggccagcgccactgcctcccgcctcccgcctcccgcctcccgccagcctccccgctccgccatgttcgccttctggcccactcacaggagagtcgcctttcaggcgtggccgcagtcactcgcccgccgccgaaccccgccaggagaggaaaggtgaagggagggaggccgtcggcctagcccgatcggggcctcgaggcacaatggagcagctgctccccggtaacactccccgtcctttcccaggagcctggcgcgagctccgcgggccccggagctcagcaagctcagtaagggaagcggccgaggggaggggcgggccagcgaggtcggaggtcagccccagggcatcacgggaagggaaggtggaagtactcgccggggccacctgcggctgcggggctgcctcgtgcggagggatctgggcgaaggcggcgcgtgattggccgctctgtgttcgtgacgctcatccgtgatgcttccgcgtgtcggaggaccaggtgccacctcaagagagaggccgtgggcggcgagccgcgggcgtttactcttagcagaagctcacctgtaagttttgagaacttagaaaccgatgccttccctctcatcagtcgtgaggcgcagtctcctggccgctgggttcgttcctccttgacatctctggagacgcatcgaggagctattgttctctggcgtcggaggttgcgctgtgtccgcggcgttgagggccccttgctaactggaacacggggaaggcggccctgtgaggtttagtgaactcaatcaaagaggtcctgcaagtggagtagactccctgaagtaagactgccatctggaccgccgagtaatggcggtgttacctggagaacgtgaaacagtctctaaacacttactagaagagcacgtaattcttttgattggtctgtccttagccggctttatcaaacctgttcatccccaa

SEQ ID NO: 4925 - DNA, 1235 bp, Homo sapiens
tgtgtcttcgttaactgtgattgctaatctctccctgcttcttttggtagaaagactacctacaagatctctagtctgatttaaaaatcaaccttaatacttgaatgaaatgctggagttaataggccacctaatgaaattgtaagcggccgttaaataattctttcttaattgcaggattggtcttgatttgagcaatggtaaacctcgagacaacaaacaagcaggggtgtttgaaccaaccatagttaaagttaagagtttgaaatttgcaacagaagctgcaatcaccattcttcgaattgatgatcttattaaattacatccagaaagtaaagatgataaacatggaagttatgaagatgctgttcactctggagcccttaatgattgatctgatgttccttttatttataacaatgttaaatgcaattgtcttgtaccttgagttgagtattacacattaaagtaaagtacaagctgtaaacttgggtttttgtgatgtaggaaatggtttccatctgtactttggtcctctgatttcacatattgcaacctagtactttattagtttaaaaagaaattgaggttgttcaaagtttaagcaattcattctctctgaacacacattgctattcccatcccacccccaatgcacagggctgcaacaccacgacttctgcccattctctccagtgtgtgtaacagggtcacaagaattcgacagccagatgctccaagagggtggcccaaggctatagcccctccttcaatattgacctaacgggggagaaaagatttagattgtttattcttctgtggacacagtttaaaatcttaaacttgtctttttcctcttaatgtatcagcatgctaccctttcaaactcaaattttcattttaactgcttaggaataaatttacacctttgtgaaaattcatccctgcctatcttacctcgttccttttatgccaagtaagccaatgtctttttttttttttttttttttttttaaaccttgggaagtaatgaactcagtcctagtaactagtatttctttaactattacccacatggccaacacctagaagatactatcttaaaattggattgtgaaattcactggtaagctctcagggttacttgtgcatctttaccttctctgggtttaatccaagttctttaactattgcagcagagacagctgcaaaggcttcattgatttcaaatatgt

SEQ ID NO: 4926 - DNA, 1240 bp, Homo sapiens
cataaaatacttttattatccctgatcctatcaaaggtctttttacattggaatattgacagaaaacagctcaaaaacatttatattctcttaatgctttgtgctaccaacacatttatagagccatttttcatgtaactggagaaattttgttggaaatttgtgaactgaatttgttcatttctaaaatgacagttccatcttaggataaaaggagttaccgtgtgctgcctaactaaattctaaacttgtaatatagcacttttaccacaaatgctactgagtccaaggatattaaaatcatgaaagagcaatattcacagatcctttgtaactctcttattagcaactattctgtcaaccctggccaatttggaaggtgaagaaacttttgaagctgcaatgttgggacaggcagaagaagtggtacaggagagaatttgtgatgatgagctgatcttaatcaaaaagtaagagccactttctaaaattgtaaagttataccgattttgttaagtaaaagtaggttttcttcccatttatttgctgcttgtagtctcacagtgatacgagcagttatacgcatgggataaaataacattgggccactgtaaattgagatgaagtaaccattttcatctcttctgcagggactagacattgtttctgtatagtatatctaaatatcctgtgtaggcaggacttaagggaactttatgtagacttattttattaaaatgccattttttttgagaaattgatggtcttggcaaaaaaaaatttttaaaaatgctattacaagaattgtacttttgttttgaacagtactaaggctcgtacgtctgcatcgattatcttacgtggggcaaatgatttcatgtgtgatgagatggagcgctctttacatgatgcactttgtgtagtgaagagagttttggagtcaaaatctgtggttcccggtgggggtgctgtagaagcagccctttccatataccttgaaaactatgcaaccagcatggtaagaacagtcatttcttgtcttagaggcctgagagcagtagctgtggacttcaattttttttttcccttttgtgaagtcacctaattttcttcttttcctaggggtctcgggaacagcttgcgattgcagagtttgcaagatcacttcttgttattcccaatacactagcagttaatgctgcccaggactccacagatctggttgcaaaattaagagctt

SEQ ID NO: 4927 - DNA, 1240 bp, Homo sapiens; identical to SEQ ID NO: 4926

SEQ ID NO: 4928 - DNA, 1134 bp, Homo sapiens
ctctgacgtctccttcatgggcacctgggctccttcttctgtttcagggctccaaggtcctggccaagaaagagctggcctatgtcccaattatcggctggatgtggtacttcaccgagatggtcttctgttcgcgcaagtgggagcaggatcgcaagacggttgccaccagtttgcagcacctccgggactaccccgagaagtattttgtatgtaggcaccagagcagctgtgtcccaagggctcctgcaggactgtgaccgtgggacccccatgtgacttccacaggacacgtgactgtgtggtcctgtgcgactccagggctgtgtgtgaccatagggctgtgtataacctcagggatgtatgtgaccatggggccgtgtgtgaccgtggggccacgtatgactgtggggccgtgtatgaccatggggccgtgtgtgaccccagggctgtgtgtgaccccagggctgtgtgtgaccatggggccgtgtgtgatcatgtggccatatgtgaccctggggctatgtgtgaccccagggctgtgtgtgaccccagggctatgtgtgacctcagggctgtatgtaaccatggggccctgtgtgatcgtgtggccatatgtgcccctggggctgtgtgtgaccccagggccaggcatgacaccagggctgtgtgtgaccccagggctgtatgtgaccccagggctgtgtgtgacctcagggctgtatgtaaccatggggccctgtgtgatcgtgtggccatatgtgaccctggggctgtgtgtgaccccagggccatgcatgaccccagggctgtgtgtgaccccgaggctgcgtgcgactcctgcctccttccttccagttcctgattcactgtgagggcacacggttcacggagaagaagcatgagatcagcatgcaggtggcccgggccaaggggctgcctcgcctcaagcatcacctgttgccacgaaccaagggcttcgccatcaccgtgaggagcttgagaaatgtaggtaaggaagagtgcgtggccctgggcctccccgtggcagcgaggaagacaagccccagctccggatgggcagagcttgcttcctgccagcacttcccagctgacttgaggctaggagctcag

SEQ ID NO: 4929 - DNA, 1176 bp, Homo sapiens
tggaaggggtaggctccgggggcggggggggagtgcaaggcgggcgggggaaaggtgcagggggcgcctggagggaggcgaagagaggctctgctggtacaaaaggaccctcgctttgtgctgggccgggtgagcgtccctttctgggctgtgatttcaagctgctgttcctggcttcatttacccacccacccagccccctcccggggctaaagcattttctctgctatagacgaagctgggcggggggtggtggtggggggaatgttcctattacatattgctctcttttgtgtcatgcaacatgttcttccgtcgctgacgtttctatggcaaccacaaaaatactacacaatatgcagccccgatatacattgatttatttgtattttgtgtctagtttgcagctttctgctctgcttcttgctttggtttgctaaaatccagcatggcttgtggctacccctcctcactttcattttggtttttccctatcacaggaggggtgggggaggggagttgtcaaggaaacaggcattggtaattacctctctatttacctaattttcggcctatgaatttctccatatcgaggaattaaaaaaagaatgctttgatgtttatgtaagtcttcagtgtctggtctttttttagaaaacctaaacacttcttaagataagatattgatcctgtggtcaagctaagggggaattaattccttacaggaggtgagatcattgaaataaagttttagagagcattggagaattcgcactgataaatgtgatattgcctgcccaggtttgcctaaaagcttaaatatttaaaagatgggtctttgctctcatctgcacttatttagctccaaatcttaagttcaacaagtatgagtaacaaattaactgccgggcaggattctccgtttttcgttttcgtgcattgttcttagatggattagccacgctattcactctcttcaaggtgagggttgctagactttttcaaaactgtggaaggattaactcatctgtgattagtcaacgactctcagttggaaaaaaagtatcttgagagaagggagaatgtgtgtgtttgtgtgtgtgtgtgtgtgtgtgtgtgtttagggaaatgggaggcgggcagggagaacagggcacatcttgagttctacgttaa

SEQ ID NO: 4930 - DNA, 1178 bp, Homo sapiens
agagttgtcaggtccacgggaggagagtcccggccccaacacgctctcctgcctgagatgcctgaagagctggaggctgttagaaggcaacgaaccaaacattctcccaggaaacactaacttgggaaactccattaaaaaccacctgagtgaatcaggaaatggttaagaggtgactgagatgatgataaaactatcattaccagtctttcttcacactaaatacctgctttcggaagcttgaattttatgatgcaacttgccaggctcagtaacaacaatggtttgtgttacttcctaggtacacaatagctagactgtagaactgactgtagaaattagcaactatctcagacaaatacatgacgattatactgatagaacaacattcaccttagccgcagagagcatgagacattgactcaggcagactgactctctccacgcacccaaggctgaatgacagccataaaaccaaggctctgaaataaatagctgcggaggcctcgtggttcagccgcaccgccatcggtctagggctgtgctctggccgttggcatgtggagcatttgctgccaggcgtagccactttgcacacatggcgcttgagtgaactcaggccagatccaagctctttccgtacccagcatttgtcggaatcaagccgactgcagaaatcgccttgccatgtgttccccactggggccaggtaatctcgctgaagcaacactgagtggaatttaaaaaaaaaatgctgacagaagaaatcaaatagtttctttctggaccagaaaaggcatatttttgattctcaaatgctgaactaaaaaatttcaagagctttaaggcccaagtaaaaggattttcacctattaagacctgtaacctttgacgtcatcagtcacagctaaagctggctttcttctgattgggttgcagtgatgtcatccgctgtggtgagagagaaagcgagccctggcggcctggctcaggtcttggcaggtttgtgcaggtggaactcactgcatttattattatcatgtttcttgacgacactaagccatcacagattctctgttggatgattctgaataaattttccttttttttttttttgagacggagcctcactctgtggtccaagctgaagtgtagtggtgcaaccttggctcactaca

SEQ ID NO: 4931 - DNA, 2060 bp, Homo sapiens
gtgccttattttccttcatggtcattcagtcaagtgtctcataaagatcagctcctccctcagaatacaagttaatgcatgttactcagtcgcccagtatgtgaaagaagatatgagggagacaaatgagttgatagtttgaattataggatttttgccacgttaccttgatgcaaatttgccaaatctgatactgtgaaaagatttgataacttttctaatgcctgactagtaagttttaaaacatcattctttaaaagaatagtttaatacttttggttattccaatcttcaatgttaacccaaaggattctgagataaaaattatgtgtcatctaaacttcagtttacagacaaaattagagctttgttttatttggagaagggggatgcattcatttgattttgttttttgtttttaattaattgaatataataggatacctagcaaatgttttcacaaaagtgaatctttgtgattttcattctagaaaacaatgttttaaatcacccaaatttaatcacatgtctttatatcataccagataactggtgtagtgtatccttttactgtttcaataacctctgcctcccccaccccttaactttaaaagaatgtgaaaaactagcatcatagtgcatataaatactcaaccacatttcagcttaagcttctaatttctcaagaagttgaaacagttagttatgtagttgaagcaatttgtgtgcaaagcctacatctaaacacttgagtgaataatcattaactgctcagtaccagacgtggcaaatctcaagtgacagtggacccccccccccgcccagcttatcaactcgtcccctcttccacaccttcccagcatcacagtcagaggtcagcaggaagctgagtcattaccttcttggtgacctcccccaccatcttgtctcacttggaaaccgttgtcagtttatttactatgcaatagacattcattgttttgtatccagctagctttggtttaatatgccactgctttgtctttctgttacacatacagttttgatttatttacaatatatgctgtgccattttgatttttatattgtttggttggttgaataaatttgcgacactcaaacacttgaggtgatagttgttaaaaacaataccagtatttgatccagtttcatctcaactatgttatacctggacattttagatgtttatcaaaggtcttttatggggaagaaagtaaatgtatgaaataataaatgtgtgacatttatagggaatgttggctctgaacaaacttttgaaaacttggttgacaaaattttggatcaactgaaaaaagcatgacttttgaaatctctgaatgccttggttctcagtattatcattctttattgaatttatttcttattaaaatatgtagtttttaagactttttttctgacagtattatgtaattttttagcgtgggtagatgggagtgtcgcttgtatgttatcgtacagctgacatgtatttttgtctattctttattatcttagtttcatgctatgtatgtaccataaccaacctattgcctatgagaaacatgtaagataatgtatttacagccattgttacaagtttataatgtatttttctatcttgttttatatgtatgttatataacattcaaaaagaatttttttcttgattgagaaaaggatacaaaatgcaaaatccacaattttgataactgaaaattgccaattgttttgcagtactttattatattgggtgtcttgtcttttttgggcttttagttagctaatgaatgaatacattagacacttttgggttttagttgggattttacatagcttgcattttaattctttggttctttgctgtttctattaacccacagcattattttaataaatgttataataccaacctactaactctggactttgtctgtttattaacctttatatgtttaattaaaataaacaaataaagacaaaagaatgtaaagtcttgagttactggactaaccctgaagaacgtgaccacagataacata

SEQ ID NO: 4932 - DNA, 1177 bp, Homo sapiens
gtaacttttgggttgtggggtcattgctatgaaaaggggcggtaatgcctgggggttgccatggcaatagtaaacagacatggcacactgatgggtacatcccctgacctccgtccctgtgttagcagggtctcagtttggtccagtatctgaaccctgcctccagagtcaagtcccgtctcctacctcactggggaggttgggccctgttttctgatctctgtccccagctacatctagatgacaacacctccttatagactcctccagttatcttgggttcctacaagagcgtgtctgggatagggtccaagatgaactcctgcacggtagccccttgctgctgcctggtgagctctgggtcctgagaagggaaggggaggtgccgtggctgttgtaggcctgcctgggggctggaaccttagggaccacagctgccgaacaccccaaggacctctcgctagctgctctctcctgtatctccaggctgtcccagcctcacccaccatgtggtcggacgagattcagctaccagcgtatcagcggtggagtgaggccctggatgcgaaaagctccagatgtgtttcccttctgtgttctcagtctgatgtgctctgacatatttgcgcctacctagttatccagagacattgatttccttggcggggaagcacgttgggaaaaggaacatttactgattaatggaaggaaatatttgagtcacacattgtccttagatgaatcattgatttattcccagtaaaatctgacttatttaaatggccacacaagtaactaataaagtaatttaaaatcataatttaaactaatgagatactttaaaaacatatttctaggtctctagagtggaaggaatgtggtctgtagattataattgatcatggggagcaaacactttgcttcctgtttactcactgcttgcttggaaatacattggtacatttctggctcttgccaaaatgtaactctgagttaggagagcatcacttcatgtaattgataaagttaaaactttgtgcacttttggacatctgcaatatgcaatactctccaacacagaggcacacgtaggtatgagttgtcgtggaaatgcatgtgtttccatggttaagggcttgcccctgccctgtagaaagagtcatgttgcatgttgtga

SEQ ID NO: 4933 - DNA, 1196 bp, Homo sapiens
tgctccagctacttcccttcacctcagatttgcaggagttccaaagcttgattccaggctttgttgacaaaacacacactctcatatagtgcccttggggtagaaaagtggaaaaactcttgaggaggaaaattggccttataggaaaattatagatgcatttaccctttaacccagagctcccctttctagtaatttaccctgaagacctaccttcataaatacagtaaatacaagattattccttgcagcattattcatacagccagttattgaaaacaacctaagtgctacccataggagaccagttgaataaactacaggatatctatgcatggggcactgcagagccctagaaagaatgagcacaatctccatgaaattcaggtaatttccaggatttactttaaagatttttaccaaaagactataaatgaagtatagtatactcatactgtgccctatctacacacagttgaccttaaacagcatacatttgaactgtgtgagtccacttatcaatgcagatggaaaacacggtacttgcgggatgcaaaacccacctatagggctgactttctgcattcacaggtcctacaggagcgactgtggggcttgggacttgagtagttgcagatatgggtatatggggttgcagagggacatgtcttggaaccaatccccaacagaccctgaggtacaactgtatacatgtggatatatttatgtgtaatgctacctttcatgtaagaagtgagggcaagtaaaaataaatatttatatatttgcttaccttgtaaaaacaaaacaaaataaacaaacaaaaaaccaacacatagatggaattcctcggaagagaacagaaacccctcttatagggaagaagaatgagtagcaatggggtgcgaaagctaaggttggcatgaagactcctcagaaggcaccttcaaatgatgttgtgggcttctgagtggcgtgtccatgtgctaaaccccagaaattcccagctctgtccactgaaagggtttcaaaggctgacacccccatagtcataagaaaacatgcatcctgagcttggtgtgtaagccacactccccgatgaagggagccagggagcatccttggagcagtagctggctccaggtctggagcaggcgacatacaagatgagcctggggtattttgttggtccagga

SEQ ID NO: 4934 - DNA, 1126 bp, Homo sapiens
tattagtcttgagctccagccaagagaacttaatgaccgttgtagtgctgtgcaataggtccctcacttttatgaaaagacaaaacttgttttagttttttgttataaatgacttgatttgtttcctagggctaatgtaatataagtaccaatattgggtggcttaaaacaacacatgtgttgtgtcacagttctagaggcttaaaaatgtgaaatcaaggttcgcggagggctgtggctcctgttctagcttctggtggctgctagacccagatgctgtttggcttgtagatggattactccagtctttgcctccatcttcacatggacttctccctgtgtttctctgtgtctcttccccccagcaaggataccactcattaggttaggacccaggcccaccctactctttgaatggactcatcttaactaaatacatctgcagtggacactgtttccaaataaggtcacactctgaagtactgggagttaggggtttcaacatatttcatttgtgggatacagtttgacccataacttttgtgcttgtccagagaatgaattctaaggcattgccatggtatgtgtgtgtgtgtgtatttttttttgagacggattctcgctctgtcaccaggctggagtgcagtggcggcgattacagctcactgcaacctccaacttcctggttcaagcgattctcctgccccagcctcctgagtagctgggattacaggcacgtgccaccacacccagctaatttttgtatttttagtagagacggggttccactatgttggccaggatggtttcggatctcctgacctcatgatccgcctgcctcggcctcccaaagtgctgggattacaggtgtgagccactgtgcctggccttatattttttaaatcttatttgttagtttttaaacaatacttaaccttagttatttagcttcattttgaatcttcaacttagccaaatccaggtgatacaaaacccaagtaactgaagtttatgtacgtaacataagttcgtcttaactcatgataagggtttttaaagcagattcccgggtatacatacgtatacagatggtccccaatgttacaacagtttgatttatgctttt

SEQ ID NO: 4935 - DNA, 1197 bp, Homo sapiens
ctggaaatcaaatttcgattggctcttttgttttgattttcctcaatcataatttgtgtacatgactagaaaatcacttacataaacccattctgattctccttggacacctattgtgggccagcctctctctggacaagggacagtcacatccccagccctgcctctaggagtttgctctctgctgggaacaacaattacctttgttagtgccattgttaccacaacacatgaccttccaagaggaagggacctggtttccagaaaagagagatttgatcctggcaacaaggacccgtggatggaaggccactgcagagtgtgagctggcagatgcgttttcattttcggttctttgcttcttaatggaattgacttttagtaatctggtatccacattgctctgagtttataaaaatgggggaaggggcaagaaagaacatttcataacatgtgtgtgcttggagggaaaatcgctttttgaaagatcataaggtatttttacagctcgctgaactcagaagctgaaacgcaaatgcgataagaggtcccagctgttggtgccactgtgggcgtgcctcgacttccctggctgcgccgttggttctccaggtggaagatcgggatgcgggagggaattcttggaatggtcagctgctgccttgcttgccctgccacttaccctcccctgctcttgctcctccctccttccacttgaataaatgaaaggtatggacgtcttcctcaacccagagctcagctgaggaggccggcagaacagcaccctcttcagctctcaaaccgtgtcgagctgctgaggtcaagaccaacacagcaacactgacttagagaaagagactggattgaatttaaaacgactggagcaaaatacctatttcacatgaagaacacgtctggctatggatacactgtctcctcgggactggccctgggttttgtagattccaaagcccaactttacccaaagttggtcaggctcgggggagaacccatgctgacggtctcaccagagacgtatcgatgaagccgagcatctgcttgccagtctcccatgaatatcacacatggtaggaagattgttctggtcatgtgggactgctttatcccatgcagggccttatggaagcatcatcgtcatcgcgaggctggacaaggcgttactgtacagagtaccac

SEQ ID NO: 4936 - DNA, 1169 bp, Homo sapiens
atttgggtggggacacagccaaaccatatcagaggtcaatttaaacatttacttgcactgattaggtgcttactgtgtcacagtcaccatccttaagtgctttatgtaatcatcacagccttaacaagcggatacctcattaccttcctatcgcaggtaaggaaactgaggcataaagaagttaaaatgcctgaacaaaagcacacagtgggtaagtggacacgcaaggcttcgcacctcattgatctgacttcagattccatcttcttggcatggtgcccacctacgcaccacagagctgtataagggcagaagagaggagtgtgttctgctgccaccagcaagcactgggaatcatcttgaagaaaagcggggtgagctgtacggagcctttcggggcagattcaagagcagaaagccgtgtctttcttactatggacactcgggaactggagaaaggtttccttctcaaatttattgactagaactcagttccaaatcaacatttcaaaaaagtttcttatttctgtgagaggcaacatatattatatttctactaatgtggcattaatgcttgtttttttcttttttagtccctgagtggtttcaaatgtgtgttttcatgtacaatttatagttctgaagagtgtgtcatttccagatatttcctgactgtctcatcaatgcccacatcattaaagttaatttcatgcctaaggaatctacactaccttccatttggaaaatgttctgcagattctagcaaagtcaacagccaaaccgtgaatgtaaaggctgccgtacagactacagaagtaggcagcttgccattgccacgctacctactttacattcaagtgatttatataagagccaaaaaaatgtgctccacatagtattgatctttcactgccatgcagggatgagctgtccagatgataaattaagacaatgagaacataagggattggcttcaagatttgtggttgccgacggaatttcttcagcagaaagagaaggaaactgaactacggaactggtaggatattattatttttactgtaaacgatccaagcctgtcaggcctgtaacttccaagtgcaatgtattatgatctacagtgtaaaacaaaagattctgaatttgagtcagtaatagctggtttattc

SEQ ID NO: 4937 - DNA, 1309 bp, Homo sapiens
gccctggacggctcctgtgtggcatcccccgtgcccgcacgctgcccgcgccccggagaggcgccctggacggctcctgtgtggcatcccccgtgcttcttgtgctcccctttcctgtcatctttacacactgttgaaaaacctgaagatgttggcctttttcaaaacattttttaggtgagccttttaagttcatttcacaaagcctggataaagttgctgtttttataatttgaaaaagataattttgaaaacttagattttttttttccttttgacaaagttgaccgctgttgccttgtcttctcacccagggcatgtgggacgtgctcttggctgtgaagctgtggggtgtgtgcagagagcctggggcctggggttcccagaggagcatcttggggaggcctgcacagtaggatcctgcccatgtgccctgagctgatgtgccagccgtgtgaaagtgctctgacaccgtgggccgtacggagggcctccagaggggatgttgaaggcaggagacagctgtgccgggagcctctgcaggccgtggagggcccgtcctgtgacgtgtctgccctccctgctccacctctggtgttgctgcttctgcgtcaggacccttgctgcagcgccatgtctgcatcttctttgcttttgtagctttggatcttcagtttgatggatggacaccattatcgtcgtgtggcacgggttgacctaaggaagaagacagagactttctccacaagaagggttaagtctgggctgtgcagccagccaggtgggttgctcagaccctccctcaggcctcccacttggcccagatctttcaccaggcgccatgtcaagggccctaggtcacacaggggagagagagatcccaatgtaggagaagccaagggctgcaacctcagaaaaccactgaggccctgcaggtcatgtgaggggtgggccatcagcagatggaggcacctggtgtgggtggggacgggggtgagaggctttggtgaacagaagagcagaggcaccaaggcagcagctttgcagctatgggttgctttcctgcagtgggtgaccaaggagggcaggtcatgctgatcagaaaggtacactgcatgactcagatgccacctgcacctacccagcaccctccacgtccccacctggcctgtgaatcttagacgccacctacacctgcccagcaccctcacatcctcacctggtctcctgcgcatcacagatgccacctgcacccgcccagcaccctcgtactcacctggtctcctgcgcattgcagatgccacatgca

SEQ ID NO: 4938 - DNA, 1121 bp, Homo sapiens
tcttatctttggctgtttttcaagtagaaaagtaagtgtactgtgagccttttatttgagatgctgagagctattaggatgagtatttcagttttcttgtcaatagtgatactctgatgatgttgcagttatttgaagtagaactgattgtctaaaccagacacacataggagtgtgctccattggtcttgtggagagtgctgcacattaacccctccctcaactgtgcaatccacttgagactggcttctctaagccacagttgttatctgctgtgtaaagtcctggatgccagcactgtggcttcttagagagggcagatgctttgtatatcgagctgcagcattcatcgtagaaaatgctacaaagctgtctctcttccccttctctcatgtttccctcttttcatcaagatgaaggctgttgggtaagaaaaactaagtgatttaacaaatcattatgatttaaacttagaaataaacctagaattttttggtgtcccttttatcataggtgtttaatgtatattttaatgattgtagaacttgaattgctctagaatgtgaatgactacccttgtgttttactccttttggcttttgttttgtaaagaatctcctgtgaggagttctgtttttagaatttaatattgtttggttacttccctgactttagtgaaagatattagagtatttactatgccagtatctaacttaaactattagtattaaataagtatatcttttacatttagtacaggtaccataaccaagagatttcttagttttgatggattaagagagagcattctgctgtatattatggcaggtacagatatgatcataactgaaccagaatttggattatagaagtgcacttcctagctgttttttatttaggtataggaacacacaatgagaaccttatgtttagaatgtagcagtaacaacagagggtaactacactgcaagacttaaatggtttgagcatgtgacactatccttttgttggggggagcagggtataaaaatatacatacaggagattagtttaatagtaaagttttatatgtatgtttaacttccatgatatttattattttgtagagacatttgtgattg

SEQ ID NO: 4939 - DNA, 1099 bp, Homo sapiens
aaggaaaattttagagtaagctgatgagaaagttttgccaagtgaaattgttaaacaccttgtatgtcagaactgtgattgtggtaaataattcacaagaacaggctgaagtaagtcacctttccctcaaactaactagaacacgttctaacatgttcatttacctttcttcaagtaaaaaaagcgacattaagttagtgtatttcatattttattaggaaatgcttttatgtaattaacttaaaaattcttttttttttttgtagcctatagcaagcaaattttaagcttaattcagcaagggttggcttccaagggtggctgcaataggctgcagctatgtgatttttgtacttgtttttacatatatagcttatgtaatttctttatataaattaatgcttaataactgaaagcaagtgagctccaaagatgaaatttcagaagcagtatacatgaatgagtgtgttctactggtctgctaagagctttaaatggaagtggccgctcaaagcacagtgtcctgttaactcttgagtgctaagtagatctttgcaacagtaagcttgattgatcatgggttaaaaagagagaatattgaaatagatgttttaatacaggctggaaatcagctattcaacactatcattgatttagtatacaagaaatcatatggattaactgaacttaatagtactcaagtaggatatgcaaaatttatattttacataatctgtgaacatttttagtacctaaaaatgtttcaggtatttcaaagatgggaacaaccagtatctagtcatcatacattaatgtgaacatgcttattaaaagttaacctctttataaaaagtattaataaaccaagatgtgcctaaatattagggtacttcaagctaaaggtcatagtttatatataaaaagtacgagattcaaggaagtaatgtatctgatgctttgcttaataagattcactagtgcttgcccttaattcatagaacagtattgtttaggttacattaacctgaaatttaaagcataattattaggattccggcctataaatacaataattaaaatctatactatattattgcta

SEQ ID NO: 4940 - DNA, 1116 bp, Homo sapiens
tgaagctgtgtgccgtaatagtagctgaagcggataattgtgtttttgtgacttatgtcagaaaacaaagttgatgaaggcactgatatggaatcagttttatataatatacttagaagaaggaggaatgatttttaacataacttactttagtctccactggaaaaagctttcttacatttagaatgatctttttatttttaaaatgataaagctttaaaactttctttgaatattttccatagttttcaaaatccagactcaaatttgtcttaattccaaagaatctttgtttttgccttttaaactccaggacagctcctctggcaatgtatctgaaggggaaagccctcctgacagccaggaggactctttccagggaagacagaaatcaaaagacaaagctgccactccaagaaaagatggtcccaaacgttctgtactgtccaagtcagttcctgggtacaaggtagaagaaaaaagcccctgactcagcttctttactgaccagcctctccctgaaatattttaacttgactttcacgattgtggagcttctgcctgctgtacctcactagctgttcttctatggtgtgccctttgtccgctgctttcttttttgctttatttccttggtggcttttctgtcacttttggctatggtttaccttctgttttctgtatatgtacaatttataagtctttttttttctttgaaagaataaccaggcaagtatgggtttttaaaacattatttcataggcagaagtttatattttctttccttggagtaaagatcataattatttggcattttaaatgccccagcatttagtgtagctaaagctgctgagctataaagtatgagtggatatactgttagactaagttgcattttttttagtgcctttcattaagaaagatctgggtttaatctaaggattatttgatccatatgctaaatttagctaactctgggatagaaaataataaaacctgttacttacattgtagtgatttttagcataaccttggtaaagagcctatatgattctatggcaagaattaaaacatacttgttaacttgttgatctgattatcctcagagtaaaggag

SEQ ID NO: 4941 - DNA, 1242 bp, Homo sapiens
gaagaatcttcaggtcaccaaagaattgaaattttaagccccagattgtactgagctgtacctgtgggaaaaggaatggccagggtattgatgatggaaaagattcaaatgaggagttagaaggcaagccctctgtgggcagccgtcttccagaaacctcgaacttatgtctgtctccacctgagaaaggagaagaaaagctggtggtgacccctgctcctgctgggccatgccatggctctgaagatgccccgtgttcttaggaggtgctcacccctggcacctaaagacatttccttctggttgttgctctttaaaaacaaaataagcccctgaacgtgcttgcaggccagtttgtgtgcctgcacttgacgaattaccttgaccaacgggccaaaggcacagagctccaaggcatcatctttccttaaaatcctgagtgtttattaaaaagggacatggtctctaggtatcttattacatttgtatttcttacatttgaaatatcctaaccgctcccttcggtttcttcttaagaacatttacatctaattatttttcgtgcaagtcttgtaggacccacatgttttcctagctttggaaatcgatttttttcattcctcttatgaggatttccctatgtcagtaaacattaactttctatttcttccatttttgctcatttgaaacccctgctgcttctagatctatttctttgcacttgtataactttgaaataaattcctcatcccttagactaagagagtgggtgtctgtgaaaattgttttctccttcataatacctaaattctagtttgtcagtaaaatatttgtgtttggttaacaagctcttatttaagccattgagttagtataatctttattacctttgaaaaaccagagagctgaattttttgtcattctaagttgtaagtaacactgcagtcaagtcttctgatgaaatttccatatatcaaattgaaaataaagcaaaatatatttattactcataactaatatactttcacatttctctgattatttgtaagacatttcagcatgtggatgtggggaagggtgagcctgccccagaaacatctccctgctgccaccatggccacggctcggcagtctcccttcactgactcctgaaactccacgtaaatctaccatcacccaccccttctttgaccgttccctgcaccttcttgctcacagaaagctggtgtttcccccattcct

SEQ ID NO: 4942 - DNA, 1100 bp, Homo sapiens
ggtgcagcaactaatggaactgtcatctcgcctttctggctgagcaatgtcattggtacaaattatggctgcgtcttattgggaataagcatgagttgttttgtgtggcagttcaaacacgggtaaaggaaatcaatggaagcgagtaggaggactgtgcctactgtttaccttagtctctcgactcattgtctatattctgttctgtaatgctggggctaaaactacatttctcagtctagtttgtgttgctgtaacagaatatctgagactggataatttacaatgaacagaaattcattttcttaccattacggaggccagggagtccaagatccaggcaacagcatttggcgagggtcgcgttgccgtgtcctttaatgatagaaggcagatgggctgagaagggaggcagggcacagacaagaggggtcaaacttaccctttcatgacaacattaattccgcccatgaggtcggagtccgcatggcctaatcaccctcaaagtttccacctcttaatactgtcacactggcagctcaattttagcacaagttttttggaggggacaaacactcaaaccacagcactctgcaaactgcacttgcaagatagctggcttttattacttgcatttcccttcatagcaggcttcttattaggttctgccaatgggagctcctaggagtttgaaagatgagaagagaggagcgacttcctcatattctcctgtttctgtcaattggctccagccccagttgagtcccacccacttcatgctgagcaccagtgccaaggaaccctgctctgagcactgcttgccttaggttctggtaaccttccctctctttttttgcaccatcatccccagccacggacgggcagcttctttagttcctaatatcggggttgtttcacctcgcattttacccttccagacttccaacacctatgtaaccaattcatctggttaaattccctctgtttgaattaccagtgcagtttttactttcctgtctggaccctgactgacacaaatcccatctcacactgtgaatcttagagcctgagtaacataagcctacttaacaaatgtctga

SEQ ID NO: 4943 - DNA, 1211 bp, Homo sapiens
cgataggctctatcatgttataacctcagtgcatagttaggctataccagctaggcttgtgtctgttgctctgtgatgttcgcatgatgatgaaattgcctcatgatgaatttctcagaacgcttccccatcattacgtgacacgtgactgcatttcaaaagtaacaagaggctgggtgcggtggctcacacctgtaatcccagcactttgggaggctgagatgggaggattgcttgagctgagatgtttgagaccagcctgggcaacatagtgagacctcatctccactaaaaataaaaaagttagccaagtgtggtggtgcatacctgtggtcccagctacttgggaggctgaagtgggaggagcacctgagcccaggaggttgaggctgcagtgagctgtgatcaagactctgtttagaaaaaaacagtggtgaaatacacattaaacttcaaattgcatatttgtaccattgcctgataacagcaggctgagggtggagtagggagatttcaggccgcgtcacagcatcaggccagggtggctcacacggtgatgtgttggctccgcttcaggtgattcccaaggactacaaaaccatgactgcgctggccaaggccatctccaagaacgtgctcttcgctcacctggatgacaacgagaggaggtaggcagactcgtcccctgccccggcatcaccgccgccctcctcggcctccgggaggtgggcaggtcccgccacttgcctgggcatcactgcctccctccctggcctccaggaggtgggcagcccccgttgctcgcctgggaatcacagctgccttctccggcctccgggaggtgggcaggccccgttgcttgcccaggaatcaccaccgccctccttgccctccgggaggtgggcaggccccattgcttgcccgggagtcaccaccaccctccttgccctccgggaggtgggcaggccccgttgcttgcccgggaatcaccaccgccctccttgccctccgggaggtgggcaggccccgttgcttgcccgggaatcaccaccaccctccttgccctcggggaggtaggcagcccccgttgctctcctgggaatcaccgccgccctccccggcctccagggaggctttgccgtttctctgactcatgggccatggaatacagaacgctcggcgccaggagaagcgtgtcacagctctcagga

SEQ ID NO: 4944 - DNA, 1362 bp, Homo sapiens
cggcttcgcaggcgtgtctctctcatcatatggcgatggcttcgcaggcgtgtctctctcatcatatggggatggcttcgcaggcgtgtctctctgatcatatggcgacggcttcgcaggcgtctctctctcatcatatggcgatggcttcgcaggcgtgtgtctctctgatcatatggggacggcttcgcaggcgtgtctctctcatcatatggcgatggcttcgcaggcgtgtgtctctctgatcatagggggacggcttcgcaggcgtgtctctcatcatatggcgatggcttcgcaggcgtgtgtctctctgatcatagggggacggcttcgcaggcgtgtctctctgatcatacacgtcagcacgtgtggcaagtgtgttgtttgcatctctgtgtggctctaaatgtttgttttttgagacagggtctcgctctgtcacccaggctggagtgctgtggcgcaatcctcccacctcagactcctgcgtagctgggaccacaggcatgcaccacggcacctggctaatcttcctgttttttatagagatggggtctttgccatgttgcccaggctggtcttgacttcctgggctctagtgatccacctgccttggcctccacagggctaggactgcagccgtgcaccgcctctgtgaatgttctgaacgacggggcatttgtcagctttgcgtccaccccaagacttgttttgaaatggtgaggttgaaactcacaggtgtcccttaaatgtgatgtgcggtaacttgagttgttgaggttttgcttgtgaatttctcattcttctttccctttttcgttccagagcgccgccctgtgctgggctgccgggagctcgtcttcaggaacctctccaagatcctccctgccctgtgccacgacatcaccgactgggtggtggggacccgagtgaagtcggcacagctgctcccagtgctgctgctgcatgccgaggaccacgccacgcagcacctggaggtcgtcctccggaccctgttccaggcctgcaccgacgaggaggcagccgtggtccaaagtgtaagtggccgtattccagtcgtggtcgcggagctgtaactcgagcttaagatcccgcctctgtggtgtgcggggcccgaggctgtactgtagccaagacagcgttcccctcacccccgggccgcaggccctccccacacccagcccctgggaacaactgatctcctttctgtgcccgtaggtaacagcgtgttgagggtgaacccttcatgctcattttcaagcacactcgggggtgcagtgccaggtgcatgttgtgtagacgtgttgtgtagacgtgccgtgcaccagacagacaggg

SEQ ID NO: 4945 - DNA, 1133 bp, Homo sapiens
aacgtgtagtgactagttccaatggggagatgaagcagcaggtagtaatcttataactctgtttttataaatgcattacttttgtaggatgtttgaacaaagacaatccaaaaacttcagtgtgtttccaagaaagctctaagcagtgaagcagccagggttagagagttcttagagaatgctgcagggtgaggcactggcgctcagacttggctgacgtggagtctgggcagtgggagccccagcctggctggcgagagcatggggtcccaaggctgtgcatggagagggaagcatggtaaggggcgcccagccgctcatctgcattcggtttatgttctggttggcccttttgagacaattagaagatccagattagttccagagatcacatgtgctaattttgggaagccttggtattggtgtttgttctgttttgctcagctagtgagagtggttaccaggcaacagagaggcatctgctgctgctgaggcttgtgccttgctgagcgggctgtgagaagatagatgggctttcctctccttccctcatgttctgctttcctccttaggccaggtgctgtgtgtgctgccgtctgtctgtattttcttcaaggataagctttcaccttcagtcagaagatggtatctgcatatatctggaggcattttaggaaataaactgtgaccagtgccataatgctgatttattaaccattgtaacctttacattttttaatgggttttgttcttatttgataagctgagctcaacagcaaaaatgtgtgtgtgtgtgtgtttttttttttaggtcttgatgatgatggtgatcttaaaggtaattattttagtccttttatcttcatatacttttcaaaatagaagttttagttaaatatctgcagactgtgataaacaggttccatctactgtttgaaaactttaggtggaaataaagctgccattcagggaaacggggatgtgggagccgccgccgccaccgcgcacaacggcttctcctgcagcaactgcagcatgctgtccgagcgcaaggacgtgctcacggcgcaccccgcggcccccgggcccgtgtcgagagtttattctagggacaggaatcaaaaatgtaagtc

SEQ ID NO: 4946 - DNA, 1213 bp, Homo sapiens
tcttcttacccttctagcaggtctgatgcttattccagccgattttgcagccctggctctgccatgttggcctccctcaattgcttgtcaccaagacccctgtggtttttgacaaggcgctgggcatggatgggtctttccgagctccactgtgaatcacctcgccctctggtccttgggcctgtcctggcttggtggactcagccgctggagctgggagtggggcgccctggagagtggcagccccgggctttggtgactcagactctgctgttcctacctgaggtcaggagggtttttttttttaataaatgtgacccgggctgggcgcgctggctcatgcctgtaatcccagaactttgggaggctgaggtgggcggatcacgaggtcaggagatcgagaccacggtgaaaccccatctctactaaaaatacaaaaaattagctgggagtggtggcgggcacctgtagtcccagctactcgggaggctgaggccggacaatggcgtgaacccaggaggcggagcttgcagtgagctgagattgcgccactgcactccagcctgggtgacagagcaagactcctactctgtctcaaaaaaaaaaaaaaaagtgacccgatttgttgtgcggccttggtcagcttcaagagccctaaaacggttgtttcttttcctttttttttaattttttttttgagacagaatctagctgtgtcacccaggttggagtgcagtggtgcgatctcggctcactgcaacctctgcctccccagttcaagcgattctcctgcctcagcctccccagtagctgggattacaggcgcctgcctgtaatttttgtatttttccccggctaatttttgtatgtttagtagagacaggattttaccatgttgaagaggctggtctcaatctcctaccttgtgatccgcccaccttggccttcctaagtgctgagattacaggcgtgagccaccgcccctggcctaaaatggctgtttctaaccacccgtctagcttgtcattgctcagatggcctaggaaccacacccctcccgtgtttggtcctcaggagaattcagtgaggccagaggacgggttgtgttggatggaggtggcggcaaggctgctcctgggatgctgcagggcccctgcacagacctttcggttcttggtccattctgcgccctcccatggcccacacatctgca

SEQ ID NO: 4947 - DNA, 1192 bp, Homo sapiens
aggtgagtggggagggcatgtccacctgttccgtgttcgcacctgcagactaaactcaccgcaccccagggtgtggagcgactgcgtgctgagctgcaagtgaaatggagtgttacactgtagcctttacgaaaatgagcagtgaaagagttttttatatgcttttaggaaccacgcaggaatggggggcctcaggggccacgcgtgtcggctggattcccaaggtgatcttcaggccggtggttttcagcctgttgggattaggaccacttgaagggtcttaattcttttattggattaaggtattttaaaattgtttaaaacaaatacatgcttgtcatgaaagtttaggtaatgcagatatatggaacttctgtcaatatggtggattggtcaacatgggaaatcgtcccttctgcctcacacacataaaaatactggaagaggctgggcgtggtggctccgagcactttgggaggctgtggcgggtggatcacctgaggtcaggaatttgagaccagtctggccaacatgttgaaaccctgtctctacaaaaaatagaaaaatgagctgggtgtgatggtggggcgcctgtgatcccagctacttgggaggctgaggcaggagaatcgcttgaacctgggaagcagagttgcagtgagccgagtttgcagcactgcactccagcctgggcgacagagcgagactccgtctcaaaaaaaaaaaaaaaaaaatgcctgggagaaatatcacagccgaattttctagcatagttaattcaaaagcaggtggtaaagaagagacccagcagccgctccagtgaggggggtgcacactggatggcccccatcggcatcaaagcgggtgcacacggtaggggcgtgtgtgtcagcagtgacacggcaacccgggtgatctcagacactcaggcggcagagagtggaactcaactgccctcctagccgagagccacttgtccttaaaatgggaggtacaaaatccttttagctggcggagacacatggcagggaagctggggtggatagaaagccatccgcacagaatcagaaccccaggcagatttgcactgcccccgcctcatgggaacccccagttgacaagtcagcacacccgtgcgtttgggccgtgagattcgtggagtccgcagcagataggtgcaaagctgcccaca

SEQ ID NO: 4948 - DNA, 1199 bp, Homo sapiens
aggaaaattgggccgttttgaagcactatcgagttctgcctgtcttgctaaatcatctgtgttccaactgtgctctttgaactgttgaaggccagaagttgttttgcgtttgatcacctataaccgccaaccccccatgtgtttctgcctgtgtttaactggtcacagggagcttggggctcctccggttcccatccttgggagaggcaggcccatccactcagtacccacggcaggcacctggttctcatctctgacgccccgactttcccttctcagcctgtgtcgcctttcctgtgatttcctctccttgccttcctgggatcctgctagttccagcccatccccactgccgctacgccacttggaaaccctttctcgtgcagtggccaccttaccgtccctggcttcacttttgcgtcttgcaactattcttcactccagcacttggagggatctgcctgagatgaagcaatgaccacgagaccctgctcaaagctgtttgtctgtccctgccgatgtcacgatgaagtcctcatgtctccatgtggctgaccagaagcctcctgccattgcctggctctcccgcttctctgtcaccctcgcctcagcctctgcaccagccacaccgaacatgagttctgtgctttctcccactccctctgccctcccacttgccctcccctttccctgttacggcccactccagccccgaacacttagtggctttgaacagtgcttggtaatttttcaggattctgcaggttgcctggggccaatctggtggcagttggggatgggacatccaggatggctttatgtgcacgtgtgctgccttgttaatggccaggaggcagggctgccttctttcctcaggggctctctctggctaggacgagctgcttcacgtggctgccaaagcccatagggacaagccctggcatgcaggttccttaagcctgttggttgtggttgcagtagctgtggccagagcctggcccgggtgtttgtggaagggacgacctgagggcacgagtccgggaggcagggccccttcggatgcattcatcatttagggtttatctgcatcctgtctcgtctcaggaagccttccgcaacccctccacccagactgtggtccagcccctgctccaagtgcccccggtgggcctttgtgctctcagtcctggccgacccct

SEQ ID NO: 4949 - DNA, 1219 bp, Homo sapiens
catcacattaaataaggtattaaatagccccatttatatagcaatcaggcaagagaaataaagtgcatctggattggaagagaggaagtcaaactatctctgtttgctgatgatatgatattatacctagaacaccctcaagactcctctagaagactcctagatttgagaaaagaattcagtgaagtttcaggttacaaaatcagtatacacaaatcagtagcatgctatctgccagcagcgaccaagctgagaatcaaatcaagaactcattcccatttacaatagctacaataacaacaaccaaacaccctaggaatatagttacccaaggatgtgaaagatctctacaaggagaacaataaaacactgatgaaataaatcatagatgacacaaacaaatggaaaaacatcccgtgctcagggattgggagaatcaatattgtgaaaatgaccacactgccaaaagcaatctacagagtcagtgtgattcctaccaagataccaacgtcatttttcacagaattagaaaaagatccaaaaattcacatggaaacaatgagcccgaaaaggcaaagcaatcctaagcaaaaggaatgaatttggagggatcgcattacctgattcaagttaatctctaaggctgtagtaaccaaaatagcatgatcctggtataaacgtgcacacagacccatggaacagaataggaacccagaaataaagctacatttttacaagcagctgatctttgacaaaacatacaaaaacatatcactggggaaaggacgccctggttaataagtggcgctaggaaaattggatagccacatgcaaaagaatgaaactgggtcgctcgctctcaccatatgcaaaaatcaactcaagacttaaatctaagacctgaaactataacaactctagaagataacattgggagaactcttccggacataggccaaggcaaagaatttatgcccaaggccccaaaagcaacagaaacacatttccttttttttttttttttttttttttttgctgggattacaggcgcctgccaccatgcctggctgatttttgtatttttagtagagacagggtttcaccatgttggccaggctagtcttgcactcctgttctcaggtgatccacctgccttggcctcccaaagtgctgagattacaggtgtgtgcctccgtgcctggcctcttttttttttttt

SEQ ID NO: 4950 - DNA, 1232 bp, Homo sapiens
gactgtggtttcagcagttctgagacaagagccttccaagtcgggggctggggagcagagtgcgggagctcctgagtcctgggggcctccgcgcctcacagcatgggcacatgtgggacagaaggcctaatggggtgcctgagggtggcctggttgctgtccccccagggtgggaccatgagcgagtaggggtggcacacgggctcagctctctgtggccggggtggctcctcttgcgggactcaacgtcagccccaaggcgatgttcagggggtccctcagccttttgaggtggtgccgtttagggccgccatgcctgtctatccaggggacggactccgcctgctgttcccgcgctgagctacaggactcccgagtgtgagccgcggttcctctgttgcagcgcagccgtgtgtgctgtggagccgaggccgtcctgcaggaagccgcgtgactcccgcctcctccctgtgctctctggctctggactgtgactgcgcctggattctgccattgcgacacatttttgtgcctttcagcccctggtgtctgcagtgggggatttaaggcacccgcttccacttctttcttgtttggagttttctgttggaaccgccggcgttggctccgaagacttagcgacgccactggcggcaccttctcctgcgcccagtgatgtttccacggtgcctgtacacagccgagcagcatttccgttgaaggacttgcatccccattgcgggcagtgctggacgtgtcccggagacccaccgggagggcgccgccatgccttgtacccccaccgtgcaggttgtggccggttttctccgcaggttgaacatggaaataaaagcaaacttgtatgaaaaaccggtctttctcctctctttgaatgtagatagagaccttgaacttggtgcctgcctccctccccagtggcaagggcctgcttgccaagccagacctctgcagggcgctgtcccgtccggtcgtcacgcacactcggccaccctgtgtccagcgatgcactagtcatgccacagtctcttctgttgcgttgttttctgtgaaagatgctggtcattttccctggtgagaaccctgtgacttttccttggagttagacacattgggaaacttgtattgagaatggtcagttctgcccgttttttcattttgagatggagtctcgcactatcactcgggttggagtacagtggcgcaatcttggc

SEQ ID NO: 4951 - DNA, 1174 bp, Homo sapiens
gattaccaaactgaatccaggcagtgccatgaccctgggtgtcccttggttcacatcacccaccagacagctgcggagagagtgcagggaggggctgggaccaaacaggccagaaaccagcagaaaagaggcagaagtgaggtgggtgtgcctggggcacgaagccagcgccggggggatttcagtggagccttacagccaggctccgtgcggactgtgatgccagagaggcgtgcagcctctgggcaagtcgggagagggcttgggtggtccccacaaggcagaagaggtggaagggccagagaagaccaccaagaccaccgttcccgcaggcctggggtgagtgacctgactgagactagcgggcagagccaagcagggctaaactccaacccagggcccggtgttggacaaagtagctttttctttgctcgtttgtctgtgtattaagaagagactaaaatagccaaacgacgctggtcgcatgcgctggctgtggtctgtctgctgaatgtctatttttgtctcctgacgagacgtgaggaccatgcccttgatccctccgatggaccagaaacccccttccttgcaaaaaaaaggcaattgaattaggaaaagatagcccaacctagctcagatccaccaagataagcacagcaaagcttggctgcatttttgaggaataaaaacctgcagaaagcaccgataaccttcaagatctgaatgagattctattataacccgtctaaacgattgcaaaattcctcctttggttttggaagcagcgtttgctctcccgtggctcggattctctgaggaccagggagttgacacacaaaccccgccatgggtccgagccagctatttctcaaggctcccacctcgccaagctcccaagggcctgctggcagtgcctacgctgtgccaactaccctgtctggtacagaccacggctgggtaagcacccttaaaagcaacagaaatgacgtctggaagctgaaatgtgaaactgtcaagatggcttaggagaggaaggagtggacccgctggtctttggcattttgtatttagaattattctaactttatacataatgtataggccgatcttttggaagggataaggttttcattcttgtgcaactcattattctcattattggccttttaaataa

SEQ ID NO: 4952 - DNA, 1582 bp, Homo sapiens
agccgaggccggagcagctgtctgggagtcaaggctgcagtagcgtttcttcatggggtgctccagggggtgccacagaccgacaggcagcccaagggcctggacacccctccccaggcaggtgctgccccaggaggactgtcctcgggaatgaacctcccgcgggctttggactgaggtccctgtggcctcggtctcctccccatgaagtgggagcgaggctccccaatggtgcttttggctttagtgtacgatgtttgctgtgcttcccgccgtggagggcagagccaccccacatcaggatcggacgtgctacccctcccggtcccggccctggcccagccagcccagccctcgaggctcgatgcctgtgccaaggccaggggcagccagagggcagctggatggccacgtgcaggggtcaaggctgggccctgcagtggggcgggccgccagccccagcagtttacagacgcatggctcttcctcccagagcagccggcagctacctggaccggaaatgtcctcatcccctccctggggccaggctctgccctggccttcctctgtgaacccctcctttctttgtgctggtgtctgggaccaaaaagggggaatatgggagggcagagtggggaggggagtccatgggcctggggccccaagccggggcgtctgagctccccaggcatgaccaaacctcagtggaggggcctctgcttcaggccccgcctggctgacattctgagcccccctcggaggccccgccacagccaacctgcccagtctttcctctgggcttgacccgccaggggagttctccaggcctagggccaggagagaggccctggcaccctggcgtgggtgcccgccaaacgccctgcgaccgctcagaagcacaaatgctgtccatggccgtgaggctgcctgccaggtgaatggacatagcgtgagaggcggtgaggccagggcttccagcctcgtgctgtctcgggactcctgaccgtggtgtgcgtgtgtgcccgtctgtgactttctactcaccaaggttgaagaaaggaaacggggaaaatcaaaaggggttcaaaccccacctcagtaggtggaggggagcgcctgccattggttgtatttttgttctgagttttcggtgccgtgttcctaactactccatcccatgacctcgccacacctactggggcatctggctggtgcctgctgccatggccagcccccactctcaccctgcacagggggtcttgcagcccccaggcccacagcctcgttgggaggacagggtggccctggggacaagagggaggagcccaggggcttacctcactgagagtgctccccagcaggcatccactaccccagggccccccacatgtcatggcaaggttggtagtgaatgggcctggttgggagcagcccctggcccattgcccacccacccatctcactatgcaattcgagttccaagcaacatttgctcctgccctggggccagctctgccccagccctgagaggggtggtgaggcagccccctggaccccagaaccccagacaagggggcaggcg

SEQ ID NO: 4953 - DNA, 1190 bp, Homo sapiens
cgtgtagctcgtctgttaaagtctgaccagaagtggccgggcgcagtggctcatgcccgtaatcccagcaccttgggaggctgaggcgggtggatcacgaggtcaggagttcaagaccagcctggccaagatggtgagacccgcccccccactccccatctctactaaaaatacaaaaaattagccaggtgtggtggcaggcgcctgtaatctcagctactcgggaggctgaggcagagaattgcctgaacccaggaggtggacattgcagtgaactgagatgacgccactgcactccagcctgggcaactgagcaagactgtctcaaaaaaaaatctggccagaagtccagtcgagggaaagtttatcgccgcagagacagatgtaggggtggtcaagagcgtggccctctgtgaggaggatgtaaagtcctccaggcccagctccggggctctctggtactagctccaggcgcagagggagtctctgagaacagggttgctggggacagccgcggtgcctgacctgcaggcctccatcgttgctgtctgcaacttcagcctctgccctgaagctgtggggaaagctgatctgaatcgtccccgagagcttggggagcgccgagggggcatgcagggctgtggccagcagcgtgaacccctcgagactgtggcacccctcctcctcctcagtccgacagctggctcccaagggatctcccgcagcctcggggtgatgcaggagatcttcgccaccaatgtgtttcccatctgtgctcctcaaagaaggtcagtacaaactaggccgaggacacttggtcaggtaggagactttgaaactcgggcatcaagaactgaaccagacctgcatctggaaatcacacgaatgaagttggttctttgtggctctcccgctcacccaggctgtctggatgcacccgggtgcatgttgccacattcccctgcaaacaggtgccagcagctcttgtgacttagctgtgggtgacaggtgctgagcacgcgtctgcagcagggcccccacacagcccacaggcaccgtgggctgtacactctgtggtgctttcttattaggagtcaacctgttcaatttttttttcttcttttataaaatgtactcaagtcacatataatttctacaccactcacaggttgtacaactgccatgcaaat

SEQ ID NO: 4954 - DNA, 1113 bp, Homo sapiens
ataaataaagttgtgttccagaggcttttattcaaaacactttttatttttaaagcatggcatggcagcatatacacctaaacacatgcatgtgagcatgagaggcctcgctctccaagatcagaagctgggaggggaaggaccttgacgtgctctggagaccagcggtgcccatggggatggcaggtggaggttctgtcctcacaacccctggggttatcgttccagccagaaagcgaagagaccactcacaggaagcaagggcaccgtccggtcctcggcgtggtgtgaccagagctctcatgctcaggcctccaccataacttgctcttcggcatcacggggcatctctcttcttgcccaaacaagcagctttctggaaagaggagtggggatgccacttagcaccattagcccatgtgtggctggtgggggcttgaactgaccacaagtgggaaaggcagagagtgcgccagaaaaacacctgccctgagcacacagtgtgctccgactgtaggctgagctctgggagcctggatgtcctcacgtctccatgctggatgatgtagtggctctctgccctggggacacagtcgaatcacctgaggagctctcacccgggcagtgtgctgagccgccaggcctgagacaccaactcatacaggtttctccatgtcccaggcggttctgatgtcagccagggttgacagtcactgaagaggcaagctgggaggttccttccaggtttggggacatccatgtttaatgtggtgaggattgtatttcaccgtgtaacgtgccaccaaggtcttctcactgtggccagcaacctgcctcgagaattgcggggatggtgggttttctttggtgatttaagggcagagatgaaatccttgctaatctttcctcacgcacatgcagcctttccaaatctggtagtgccatttctctgtaaggtgcatcacatgtgcttagcagtctctttccgaaatgattgcttgaaattcaggaggctttgctttgaagaggacaggccactttaagacttgcttaatttgcacagcagccccggggagagatggtcctgaaatatgggatcctggtgtttccttg

SEQ ID NO: 4955 - DNA, 1211 bp, Homo sapiens
aaaaaaaagaagcccagacagcaagcagcccatgcagagtccacgtggacaaggatcaaggttcccagccctccctggctgagatcccagccaatagccggcagcactttgcagccacatgagagcactgtctgggaagtggatcctgcggccccagctgagctgcccgagttgaccccgcgtggagcagagacaagctttctctcccaggctctgcccgaactacagaatccatgagctcaagaaattgttgttgtttgaagtcattaagttttggggtggcttttacacaacacacaaccagaataacgtctctgtggcctggggcaaatgcttaacctctcccgacctcggtttcctcgtctgtaaagggaataggattcaaagccttccaaagtgcatttcaggatgtgagggtaatctggctgcaacagctgtcacccccattgatcaccagagttgatttggctgatctggttggctaggcgggtgtccccttcctccctcaccgctccacatgtgtccctcctgaggctgcatacttggtcaaagaggatgaccatccccgagagaggaagaccggtcttccatcaagggtacagaagtagccgcgctcccctgctagaacctccaaacaaactctcaaggtgcaaagtgcatttcagctcaaatagtcaatgcactctttcaacaatagtgaatcagtttcctggttttatcataacacgtaacgccctttctccagtttatcaaaaaattccctaaaaggaccagaatgctttgtcagtccttcttaaacatcaatgtctacatgactcagctggagatcctgttcaatgcaggaggtcacagatggggcctagaaatctgcattttaatgtgatttttcttttttctttgactcaggacagagtctcactttgttgcccaggctggagtgctgtagtggtgccatcatagctcactgcagcctcagcctccctgggttcaagtgaccctcccacctcagccacccaagtagctgggactacaggtgcacacctaccatacctagctaattcaaaaaaaattatttgtagaaacgaggtctcactatgctactgaggctgttcttgaattcctgggctcaagcagtcttcttgcctcagcctcccaaagttctgcgattacaggtgtgtgccaccagcccagattttttgcttttttttttt

SEQ ID NO: 4956 - DNA, 1199 bp, Homo sapiens
ttggaagccacactccatctgtttcacaatcgctgttgttaaacaggtccatcgtattcaaagtgggagcagggatatgcaaaggcagaaataccatgaggggagcatccttgggtgccatcttggggtggctactatggttctctgtgagactttgcttgatattgtgccctcccttggccaccttctcttcctggtcctgcttccctactttccaattagtttttcctaagagcagtttctaccaggggattttcactttcacatgaattcttccccaaagatctgcttctagagaacacagcctaagacataaaatatagatgagcagcccacccattttctgattagccctctggctttctgctggaatgggagcactgctgtgagcctcaccctccttggctgtggccctgacccactccatgggggcttcattctctcctttgtctcaaaagtcattggctagggccccattagaatacagccaccacccagaaccaatgataccctttaccaaacactcagctgacatcaccccatttaacataacttccaactcatcctttatagcagctactattgtctttattctacaggagaggaaactgagatttaggcaaattaagtaacatgtacaagtttgcattgctagcaccagagccatgacttgaacccacatctggaaggtccaaagctcatgaccttcactttcattgtgtttgctttttggtcattctctgcacctgctgccaagctgtgtctgcacgtctgactccccacccccccccaacaaaggatagaatcagatggggatggagctgatgttgaccacaattcttcgcacaaccatccatccaaccctgttttcagggtcctctcccactcctcacccactactcctgacttcctgcccctccatacccacagtggaaactcttagcatgcatctgtgcttcctgcctgaaccagcccaaagctgtggtcaccctggtcagggcagatagatggagtggttaaccccaccctttgccacgttgccacctgggttcaggaagtcaacatccctcatgccaccaggctcctggcctgcctgtagcagatggaaaggtatcttcttggtcaaaagattttgctcccctgaaaatgcacttgagcctaagcaggttggcactggggtttttctttgaggacaaggt

SEQ ID NO: 4957 - DNA, 1179 bp, Homo sapiens
gaaatacaacatcacaggtagtaatcgaaagcctggatgtctctgtttctgatcacactgtttgctctccctctccagaggtaaccatcatcttgcgtttagtatttttcattttcatttatgtttttataccttcccaacatatatattttatgtagccatcaaagatacattgtgttgttttgcaggcttttaaactttatatgaatggcatcgtagagttggaactcagcaactcgctttttcgggcaagagattttgttctgagaattatccatgtggattcacgtagctctatttccttcattttaactactatatagtgctccatcgcacaaatacactgtaatttatttatccattctcctaaagatatttaagttgagtgacaaagactactggttgcttcccaaatactttttccctcctttagtaacagatacgcaaagcaacaatgtgcccagctaaaagcctacatttctttacctcttttgcttccaggtgtggctacacatatattctggtcaccacaatataaacagaactttcaggggaggatatatgagagcgcttctccaaagagggacagactggggcattcgcttttgctcttcctccctccctcgccctcttctgttgattggaatgtggatttgatagctggagctccagcagccacattagaccatgcagtgatgctgaggatgaagcctccctcctcagtacgacagagcaggaagacagaaggaaaccaggtccctggtgactttgtggagccttcatcccagccttggattgattgattgattgattgattgattgattttatttatttttttgagacggagtctcactttgttgcccaggctggagtgcagtggtgtgatcttggctcactgcaacctccacctgctgggttcaagcaattccctgcctcagcctcctgagtagctgggattacaggcacccaccaacacacccagctaatttttgtatttttagtagagatggggtttcaccatgttggccaggctggtctcgaactcctgatctcaatccacctgccttgggctcccaaaggggtgggattacaggcgtgagccactgcaccaggcctcaacttttttttttaacttgagagaataaacctttctagagatacacttccatcactagcag

SEQ ID NO: 4958 - DNA, 1151 bp, Homo sapiens
tctgtaactactgtgcaatatgaggaagtctattagtctctctgagtctgttttctcacctataaaaggagggattagactagatgttcagaattgttctactctgattctctgatcttctatatgttgtcttcctttctgcccttcactagagtctgcatgtgtctcctgtctggggattctgtaactccatatgtcttagcttagaacctaattttcttcattttacttttctcagagtatttacaatgttgaagacaactaagatgcaatgtagtatttctccttaggtgctgccgtctaacacatgatatatttactctagcctaaaaatggttcatgttcaaaattttaggttctgtaaaacaaattggtgccataatttatcagtataagcctgaaatttggagaaataaattttcttaaaatgtgagatgcttatttatatacatggctggaagaaggggcaaggctaacaaatctggaggtaattaatgcagtgagaaacttaaaaagatatgagaaaatggcgatggatgagaatgtttatatttactgtacagtgaccatcagtaatgaaagagattagtagatgtctgtttttgtgcttaacataatgttatgttggtttaattgtcttcattaggggcttttagtaaaacaaagggtctttaaaattaacacagtaatttttcactttaacaggcttaactggcactttattgatatacagacaatgtctagtgaagataacagctatcaattaaatagtccaatttcttgaaaacagatagtcaggtaaatctatttctgatttttggagattaggtagatgaacatgggtaagactatagtttctgcagtgtttttggctttggttcattttcaaaaaaattttttttaaatggataaggctaggctttagagttgtgggttcaaagaatgggctagaccctggggtccatattattacgtagaattagtctttgtgcagtgtttggttgccttttctcctttctataactctccatggtattctagacctaattctttaccttgagggggttggaagctctcaagtgtgtaagcttaattttacaacgatgaatagtctttccaatgagaaaaaaatagagggagataaccacgta

SEQ ID NO: 4959 - DNA, 1197 bp, Homo sapiens
gcccagggaagacaggctttggggagcccccatcacaggctgaggacaacagatgcagctgccccctgagaaacaacagcctccacgtgtgcacctcgggaagaagtgagtcacagtcttctcagtcacacccagcacctgcttaatggccacttcttccagagccagcctttgaatatgaaaaaacaataatcaaatgatcttcttcccaggagttgagtcggtactcctgattagctcagggccaacactaaaactagaaagctggaggctttctgggagccaggctgcgtggtggctgatgtggccacataacattgtgatttttgacccttccttttctaagtcatgctgagaacccttgaagccccctgctgttcttctgttttccattttctccttccagtactcattaaaaaataaataaataaactgaatgtgtaattaagcactatgttttgtgtcctttttatgacaggttcatcaattctacatgcatttactgaatgcttactaaaggcagggctgtattttacatatcattctttgtgaagctactgttttcacttcggttctgcagataggttgggtgttgaagaatttgtagctgaggatagactttgcctctgcagctatccttcctgatcagactagacatatacctgattttttttttctttttttttttgagatggagcctcactctgtcacctgggctagagtgcagtggcacaatctcggctcactgcaacctccacctcctagattcaagcaattctcctgtctcagcctcccgagcagctgggattgcaggcgcctgccaccatgcccagctaattttttgtatttttagtagagacagggtttcaccatgttggccaggctggtttcgaactcctgacctcatgattcgcccgcctcagcttcccaaagtgctgggattacaggcatgagccaccgtgcccggctcacatacctcatttgaccctgtggtgtgaagttgctattcctactgttgttaactgatggcagaacgtaggtttaaggtaaccaacggggctagcatgcttgttgctgaagtatatgaatgcgggaaaaactcctggcctccccactatgcccttggctctggtcagtgctgggtgcagcgtgcctgccatttgcaaagcaaaacctgtaatcccagtccgcatcatt

SEQ ID NO: 4960 - DNA, 1194 bp, Homo sapiens
gccaagcttttgcttcctcccctgcgaaacagagatgatactatttacccagcagagcaaaaaggaagcccacatctaccccagacagagaggggactccatcatatcctgtggactccccttccaaggccctgacttcacaagtgtgtgaccccccgagattcggggcagaaaattctttctcatccatggggtgactaggactggtgagcacagccactctagaaagggagatgggtgtacatgtatttgtagtaggtacgtgaggtacaaggcaattttgttccactgatgtattgcacagtggtgaagccaaagctgggagtgcgtccgtcactggagtgatgtaccctgtacccgttaagtaatttctcatcgcccaccccacacccttgtgagtccccattgtctgtccttccacactctgcatccatgtgcacatgtgacttagcacccacttattagtgagaacaggcagtctttgtctttctgtgtctgagttctctcacataactcagtggcctccggtgccatccaggttgctgcaaaagacacccttttattcttttttgtggccgaatagtatttgaataggaaatgttacctttttttttttgccttttcagctctgggtccccttttcctttgccattcaggtcatcccagccctcatccccatgcttcaattacaagctgcccactgtcaccgtctcatgtcgggcagcacaggtgattacacaaaaccttctagcagagacaggcttgtcaaggcagtttcgttaagaaaagctgtgtttgtattctggcaactatcaggaaacgaaaaggatcttttctcttttgtttatacccatccgtcctaaggatagtattttctcctactccctaagagctcggagggtaagaatgactaccagttttgcaaatcttcaaaacagctcctaaaagagagatgattttcactgtaccacaggaaaaccaagccctggaaagcatggttaagtacagtgccaaaggcactgggccactcaatgaaatgggatccttctctggtgaagtcattgcccagtgtgtggcctgtggaagttactcattaaatactgggtacctaacttacctaggtccacatggtaatggaggcaggacccaaacgcaaatctgtcagccaccaaagcagccacctggctcttgcca

SEQ ID NO: 4961 - DNA, 1116 bp, Homo sapiens
tgggagcaggcgatcctgaccgggtgtcacgccgcctgggagcaaccctgggcctatgcactcttccctccatccctccgaggccgcggtaattatgaaaggaagtacggcccgctcgttctctgtgtggtttgaggagccaggaagaattacattcattcatcctttcctcattcagccagcatctgttaattacctacgaagtacagagatgcgtaagacatgacgtgtgcctgcagagtttctcatcagggaggccatgttagcgacgtgtctcccaaagcccactgggtcaccccattaaagcaaaaaccatgcactgatcatgcccctggggaagctgtgctgcttctcaccttcatggttttgagagcaaatccttttttggtatagaatcgttttgaaactgtttacttttgaagctgacacgtttgatacctttcctaagctgtgacggactgtaaatctctccctttcctccctggttcctctctagaccttcctggtgccccatccaacctggtcatttccaacatcagccctcgctccgccacccttcagttccggccaggctatgacgggaaaacgtccatctccaggtggattgttgaggggcaggtacgtgtgtcgttagactgggagctggcatttgcgaagagcagtgttggggcctgtgaatgagtggtacccctgcagatgatggcttggggtgtcggggagatgggtgtgcttggagagggagaaccaggggctggagatagcccagataccagggcagaatgtaggaagacaaagaacaagatgtcaggccggggtcctaccaggtgataagacaaggataagaagggttaaaatgaaagttgtgattcaaaataggtacccaaaattggatagtgtcgttgattgagtttttaaaaattctatatcacaattagctactaaatatactaataggattaattgcttggtacagcttgtgtgtcattagctatgcattcattcaacaatatttttagagacgattgttctatcagcaggcactattctgagcacgggggctattgcagtagacaaagctggctgagtttctgctgtcgaggagaaaagtgctgtctg

SEQ ID NO: 4962 - DNA, 1148 bp, Homo sapiens
tttaataaatatgtgtcatgccactttggacatgtgtgattctttggccagcctcagtatgcgagcacgtaggctagcgctcagcacatgagtctatggaacccaggggaagcaattgcagtttcgtagtagtttgtgtcttaattaagggagcccctagaccttactctttcactttacctaggagtttggttcctaaactcaccattcaaatccagcaacagaactgactgaaaggaacctttgtctttcgtgtgaatgctcgtgaggggccatccttagagtggaaatgctcctgaggctccagcgaatcaagaccctcagacccccgggctgtccccaccccatgaccacatgttccgcaggcaccctcagcgctgtgccctgcgtgtcgcccaggcaggtgtttgtttttgagcgcagattctgcctgtggccatagccatgtggagatgttcacgcatgtacttccctttgtgatttcagccgatacggaagatgtgtgcattgtagagagattgttctccagcagcctagtggccatcgtcagccttaaagcaccaaggaagctaaaggtttgccactttaagaagggaactgagatctgcaactacagctactccaacacgattctggctgtgaagctcaacaggcaggtgagcgctgccccagctgggtgtgggcttgtctgttgctccctccagcactctgggacaagcccaccccaccggcatgcccctccgtcattcccttgctgcctggccccacgttgccgggcacagatccttgcctacagagaccagctctgtttcctcacccaccagctttgctcagcccattccattcacgacaaatgcccgggcctctgccacactgctcccatacaggcgtccccggccccacccagagggtggatggcagtctctttcacctattacctggttttgcttttataaatgttacttaaaaaaaatatatttggccgagcacagtggctcacgcctgtaatccccacactttgggaggccgaggcgggcagattgcctgaggtcaggaatttgagatcagcctggccaacatgatgaaaccccgtctctactaaaaatacaaaaattagccgggcatggtggcaggcacctgtaatcccg

SEQ ID NO: 4963 - DNA, 1323 bp, Homo sapiens
ggccaatgggctcccctccggcggcagcactaagacccatgcatgagatcctccagccacagccttggctatgtgagccaccttcttaaaaaagccaactcgcactccagtgggagagcctgtggttttgcacccacgcagggctgtgcctgctcgctgccactcccatctgtgaaccggcacttccagttcatgagcccaccctgagagtctcctagtgtcattttttttcctggtgttatttttgagctcttaaccagcttgagagagtttgtggcccgtccatgagggagcctctgtttactgtgcaggcatcattttgacatttatgaatgtcagagaacaaatgacttcatctcgagctgcctaaggctgcaaagagttcattagaaagcaatcagaattcagaacgtcttagtacaggcttcagtttataaatatacaccagtgtttccaaaacacagtcctcagtgtgtgtcatggggtctgtggtgtgtccccagcctttgaagggtgacttcgtcgtctctttgcagcctacacagacgacctgggtgctgtgggtggcgcctgcctggaggacgaggccagcgccctgcgcctggatgaggacagcgagcacccgcccatgattcttcggactgactgaacttgacctgtgacctctgacccggggagcagagaacactggcttcacagaggactttgtgcattgctgctatgaactttgacctgagtcgggggagaggatggcagagactttattaaaaaaaaaaaaagattgtagtggtagtctaactccataacgctgaggaaatacatcattttcacttcagtggcttttaaatcctgcttatgaattttagctttttgtttgtttgttttctctttttgccaaaattaactgtttggtgaagcccgcaaaacctcctcgctttgcatgcatgaacgtgccaagccagcataggggagctagaagccactttccagccacctgccgttgggttttttcatatctgtacataatgccgagtgcgtaaggaaaccgtggcgtcgcgcacagtgggtctgcttgtcaaggccagttctgcagtgacaggcccaggggctgcccaccaggtgtgctgggcagacttcagctgggacagaagtccgatctccctagggccccacctggaccattttccctccgttttattttgttaattaaattctttccaaattggatcgctctgggatttcttccatggtggacttttgtttctgatcttgttttccctgtggatattggaggacagcgaggttctttctgatactaaaaac

SEQ ID NO: 4964 - DNA, 1088 bp, Homo sapiens
tgctggagcatcagcagccctgcccagtgggtcagccctgtcctggggcctggggtcgggtgcagcagcccccgggctcacccaagcccctcctctctcccccacacagcactgggaccagaagtccagccgcagcctcccggcggccctgcgggtctccagccagaggaaggacttcatggaggtaggtggtggtggtggtggtggtgggcgggttggggatggctgcttccttccgggcagctcagacagggcccggctcagcatctgctgctctgtcccccatggtctccctcagcctctgacctcctgtccctgccactctcagtgcctggctcctgttctctgtctctctggtctgtgcgtctgtctctgggtcttctctgctctcccagtgtctgtctctgagtctctggccattcttgccctctgactctctctgggtctctcccaacctctatctttcagtctctgtgtctctctgggtctctctcgatctcggtctctgtctctctgcgtctttggatctcttggtctgtctatccttgtctctcatttgctctccatctctcggtctctgtctctcttttgttggtctgtctcttactcagcctctgtctctgacttggtctctgtctcagtccctggggctccctctgcttctgtctctgtccctgtggctccctggggctccctcggcctctgtgccccccacctgccatcctgatatccccgcgtgcccgcagcgcgcgctataccagtcctcgcatgtggacgaaaatgacgtgcagacggtgtcgcacaagtgcctggtggtgggcctggagcagtatgagcagatgctgaagaccaagaagtaccaggacagcgagggcctgtactacctcgcgggcacctacgagcccaccacgggcatgatcttctccacggacggcgtgcccgtgctctgctgagcccgccgggccctgcgggccacctgtgccccgagggcggccagggacccatctccatcactgccatggcgcggagaccacgtgcgttgtgtgcatgcgagcgctcctgcaggcgtgtgcatggggccaggtgtg

SEQ ID NO: 4965 - DNA, 1135 bp, Homo sapiens
cgagggtgtcacgtcacccaaaagcaagaaggctaaagaggccctgctgctccgggaggatccgggggcggggggctggcaggagcccaagagcctcctgagcctgggcagctatccccccgcggccggcagcagcgagcccaaggcaccctggcccaaggccaccgacggggacctcgcccaggagcccgggccggggctcacgttcgaggactctgggaaccccaagagcccagacaaggcccaggctgagcaggacggggccgaagagtccgagagcagcagcagcagcagtagtggcagcagtagcagcagcagcagcagcagcagcagcggctcggagacagaaggggaggaggaaggcgacaagaacggggacgggggctgcggcaccgggggccgtaactgcagcgctgccagctccagggcggcctcaccggcctcctcctcctcctcctcatcctcctcctcctcctcctcctcctcctcatcctcctcttcctcctcctcctcttcctcctcctcctcttcctcttcgtcttcctcctcttcctcctcctcctcttcctcgtcctcatcctcctcctcctcctcctcttcctcctcttcttcctccaccacagacgaggactcttcctgcagctcggacgatgaggcagcccccgcccccacggctggcccttccgcgcaggcggcgctccccaccaaggccaccaagcaggccggcaaggcgcggccctcggcccactccccaggcaagaagacgcccgcgccccagccccaggcgcctcctccgcagcccacacagcctctgcagcccaaggctcaggccggggccaagagccgacccaagaagagagagggcgtccacctccccaccaccaaggagctggccaagcggcagcgcctgccgtccgtggagaaccggcccaagatcgccgccttcctgccagcccggcagctctggaagtggttcggcaagcccacccaggtgagcaagctcgcgcccgggcacggccgaggggccgggggccttgtgtctctctgctgggcccacggcttcatgctgtgtctccgtgtgtggtaacctcccagaaccccagggtggagggctggcgtcccactttatggatgg

SEQ ID NO: 4966 - DNA, 1135 bp, Homo sapiens
cagaggcaggtgaaggattggagcccaggctgggcagagcatgtgcactgaaacccactatactgttttgtcagatcttttaacccatgacccaccttccctctccagctaaagattaagaagaagaagatggccagcgaccaggagcagttggcaagcaagctcgacaaggccctctccctcaccaagcaggacaagttgaagtcgcccttcaagttttcggacagtgctggggggaaatcgaaaactagcgggggctgcggcaggtacttgactccttacgacagcctgctggggaagaacaggaaggcgctggccaagggcctcggcctgtctctgaaatcctccagagaaggtaaacacaaaagggcagccaaaaccaggaagatggaggtggggttcaaggccagaggccagcccaagtcggcccattccccgtttgcctcggaagtgagcagctactcttacagtaagtagcgtatgccgcgccacctctggtccgctgcttctctccttttctcccctcttctctccaccgtcctccttccccccccgcccctcactctctctctcgctctcgctctctctctggggcgcactacagtgcctgagcttggcatggcctccaagccggaagtggggggggaggccgcctgaagcggatatgcctgtgactggcgggtgtgatgccaggcaggtgcttgtgattggtgggcgcccgtgattggcggttgggagccgacctccgccggccctgtcttgcccgcccgccatttgcctaccggatgtcataggcgaggaagccttgtgcgtcatagagtttgcggctgtttggcctagagaggcctggagcgcgactgctcttgagggtcctagaggtgaccggactcccctacccacaggaagcatgccgtctgttgcggaccacggctttgtcgcgaagtgttggcggaagcagtgtttatggagcgcccaccgtgctcggctatggatgcaggggttcattggcgttactgtgtctgtggcagctctgacagtggtacccccatgttgttactggggatgatgtggcccgagagccagaggggagtgtgtgcgctcgggtgcggagaggcgactcggggttaaacctggt

SEQ ID NO: 4967 - DNA, 1170 bp, Homo sapiens
gctgtgggaggtgattctctggctggagggtgggtgtcctctctgggcctgcagagctcagcatatgagccccccgcctgtaagtcccccaccgccttgccctgtggcctctggaagtcccagtgcgccaccgacttcaggattccacctgcagatggggagaatggtgccgggccggatctgggctggttgggcggcaggggtggaaggccctcctccgagggtgcggggtgcccagggctgagggtctgctgtggggggcttcctgccgtattgtgctttctcaagccctgggtctggttgggttgatccaggaccatcttgcagcccaggggtggggccggagcaggggaaccctctttggtctcctggccagcatcagctccacacagctggggagaggcggcggtctcggggcggtgggtcggggcggtgggctggggcggcggcgcctccctggttgtctgcctgacggtcctcccaacttctctctgcaggcgaggccttcttgggcagctttgtggccagcgggatggggccctcggcctcgtcccatgggagcccagtgccactgccctctgacctgtctttccgctccccaacccctagcaacctgcccatggtgcagctgtgggccgcccacgcccatgaaggtaaggaacatgccggggtcggggctgagggctgctgggctgacgtcccagccactctggccacttcatgtgcccctctgttgtcatcgctgagctggggctggtgggtcccaggtcacctggcttccctgttgtttctcaaacgctcagggcttcttcttgtcactgtcacagggcatttgtatgagctgtttcctctcctttcagcctgacaccccatgccacagaccaccttccagtcctcctccggctcagctcagagaccccctcttccgcacccacttccatcacttgcttgtgacgacagattatctcatcattcatgaactacccgctttcccaccggagtgagccctgagttcagggcctagtgtgatctactcagcactgtatccctggtacacagtaggctcattaataattacaggagcaggccgggcatggtggctcacagctgtaatcccaacagtttgggaggtggaggtgggaagatcacctgagggcaggagttcgagac

SEQ ID NO: 4968 - DNA, 1189 bp, Homo sapiens
gtaagccaccatgcccagccgaaaattcattttctggaattaatgtcttttttttttttttttttttttcatttggaatttcttagaatatctggcttccagtttctctctctcttttttattaagacgctgggtctcgctctgttacgcaggctggagtgtggtggcattctcgtggctcactacagcctcaacctcctgggctcaaatgagcctcccacttcagtgcctcctaagtagctaggactacaggtgcgttccaccacacctggctaactgttaaattttttttagacatggggtctctcgctatgttgcccaggctggtcttgaactcctgagctcaaataatcctcttgcctggacttccctaagtgctgagattataggtgtgagttaccatgcccagccagccttctggtcccttgatgcatttttttcacttgtcatatctattggatgagctgctttgttttttttggagatttccttcctggaattttccatcttccttctctagtctggttggcccggttcttgggtgtgctggagagccattgttcttcagactccctttgcctctctcctgtgtgtctgattcccttgccttcccgtttcctgttttactcccttctttctgtagagcacatcctgcggtggctttctgtgaaagggtgagaggaaggcaacgtttttgggtcctagtatgcctggaaaatgcttttgttctaccttcacacttgagtgctatttgggaaatactttccctctaggaattttttttttttttttttttttgacagagtcttgctctgtcacccaggctggagtgtgatggtgtcatcttggctcactgcaacctctgcctcccgggttcaggtgattctcctgcctcagcctcctgagtagctgggattacaggtgtgagtcaccacacacggccttccctctaggattttgaaagaattgcaacatcaccttccatattcgactgctacttttcaggaatatgatgccatttttgattgctgatctttgtgtatgaacctttccccacctcccccttccttttcttttttcttttttttttttttttttgagatggagtctcactctgtagcccaagcgggagtgcagtggcacgatctcagctcattgcaacctccacctcctgggttcaagcgattct

SEQ ID NO: 4969 - DNA, 1181 bp, Homo sapiens
gcctcagtactaccagggactgggtgggggagaaagtggaggcagggcttagatgagtgagctggtgtctctgtgagtccttagctggtggggtgggttgcgggtacatgaagtcatgctccagcctaaggggcacgtgggcacgtgtcattgtccccagaatagttagcattcaccttgtgcctttgctgagagccatgcactgagcccatcctccctgccataatctgctgcgattgcagccttgatcattcccatttcccagatgaggctgtgggagctcagggggagctgagtctctcgcaaacaccggtgcttgaccttggccctggagccatgcagagtagagataagggcgccccttgtaaatctcccctctcccgcagaaggcatggcaggaagtggccgggtctgctcgggagcagccgagctggaggctcacaccctggagtcccccggccatgcagccagcttggcgccaccctccctctcgacctcctcccactgcagacctgttagtgttgggttgagaagcgcaggatcaaacccaggactttcaaatggcagagcagattgctagaagcctctgtatttcctgtctggtggagtcaccaggccctggatcggccgctttgattctcagctcgagccactgcgaggctccgtgcgtggggagcggggtggttattcatgctctgacccaggcatcctggagaaccaggacgggcgactgctttgagaaccagacgggcgacttttcagaatctccctgctttagaaatttgacgcaaaatgcatgtaaaatttgggctttcccactttttttttttaaaaatggtctcattctgtctcccagaccggagtgcagtggcatgatcacagctcactgcagcctcgaccttctctggctcaggtgatcctcccacctcagcctcccgagtagctgggactataggcacatgcgaccatgcccggctagtttttttttttttttttttttgagacagagtctcactctgtcacccaggcttgagtacaatggcatgatctcagctcactgcaacctctgcctcctggattcaagcgattctcctgtctcagcctccagagtagctgggattacaggtgcccaccaccatactcggctaattttttttttgtatttttagtagagacggggt

SEQ ID NO: 4970 - DNA, 1197 bp, Homo sapiens
agtagctgggataaaaggcgcacaccaccatgcctgactagtttttgtattttcagttgagatcgggcttcaccatgttggccaggctggtctcgaactcctgacctcaggtgatccatctgccttggcttccccaagtgctgggatgacaggcatgagccaccgtgcccacctgccaaaccgttttctaccgtggctgcacccctctaccagtcccacttagctggggactcttggctccaggtcagagtgcgggcaggtaggcagcgagaggtggggagcttccctcccggtggagcagctgctgcaagggggagtgtgcgcactgagggttggagacccgtaggtgccttcagccctttccttcctctccccaccctgcctctgtcccgcaggcgagcgaggacaaagtgaggcagctggtgaaggagatcggccgggagatccagcagctgagcatggctggctgctactggctgcctggctccaccgtggaacacgtggcccgctgccgcagcctggtgaaggtgaacctctcgggctgccacctcacttccctgcgcctctccaagatgctctcggccctgcagcacctgcgctcgctggccatcgacgtgagccccggcttcgacgccagccagctgagcagcgagtgcaaggccaccctgagccgcgtgcgggagctcaagcagacgctgttcactccctcctacggcgtggtgccctgctgcaccagcctagagaagctgctgctctacttcgagattctggaccgcacgcgcgagggcgccatcctctcgggccagcttatggtgggccagagcaacgtgccgcactaccagaacctgcgggtcttctatgcgcgcctggcccccggctacatcaaccaggaggtggtgcggctctacctggctgtgcttagcgaccgcactcctcagaacctccacgccttcctcatctccgtccctggcagcttcgcggagagcggcgccaccaagaacctcctggactccatggcgcgcaatgtcgtgctggatgccctgcagctgcccaagtcctggctgaacggctcttccctcctgcagcacatgaaattcaacaacccgttctacttcagtttcagccgctgtaccctgtcaggcggccatctgatccagcaggtcatcaacggcgggaaggacctgcggagcctggcca

SEQ ID NO: 4971 - DNA, 1290 bp, Homo sapiens
tgagcggttccgctgccctgaggcactcttccagccttccttcctgggtgagtggagactgtctcccggctctgcctgacatgagggttacccctcggggctgtgctgtggaagctaagtcctgccctcatttccctctcaggcatggagtcctgtggcatccacgaaactaccttcaactccatcatgaagtgtgacgtggacatccgcaaagacctgtacgccaacacagtgctgtctggcggcaccaccatgtaccctggcattgccgacaggatgcagaaggagatcactgccctggcacccagcacaatgaagatcaaggtgggtgtctttcctgcctgagctgacctgggcaggtcggctgtggggtcctgtggtgtgtggggagctgtcacatccagggtcctcactgcctgtccccttccctcctcagatcattgctcctcctgagcgcaagtactccgtgtggatcggcggctccatcctggcctcgctgtccaccttccagcagatgtggatcagcaagcaggagtatgacgagtccggcccctccatcgtccaccgcaaatgcttctaggcggactatgacttagttgcgttacaccctttcttgacaaaacctaacttgcgcagaaaacaagatgagattggcatggctttatttgttttttttgttttgttttggttttttttttttttttggcttgactcaggatttaaaaactggaacggtgaaggtgacagcagtcggttggagcgagcatcccccaaagttcacaatgtggccgaggactttgattgcacattgttgtttttttaatagtcattccaaatatgagatgcgttgttacaggaagtcccttgccatcctaaaagccaccccacttctctctaaggagaatggcccagtcctctcccaagtccacacaggggaggtgatagcattgctttcgtgtaaattatgtaatgcaaaatttttttaatcttcgccttaatacttttttattttgttttattttgaatgatgagccttcgtgcccccccttcccccttttttgtcccccaacttgagatgtatgaaggcttttggtctccctgggagtgggtggaggcagccagggcttacctgtacactgacttgagaccagttgaataaaagtgcacaccttaaaaatgaggccaagtgtgactttgtggtgtggctgggttgggggcagcagagggtgaaccctgcaggagggtgaaccctgcaaaagggtggggcagtgggggccaacttgtccttac

SEQ ID NO: 4972 - DNA, 1171 bp, Homo sapiens
ccatgattgtacaagtgtactccagcctgaacaacagagcaagaccctatctcaaaaaaaaaaaaaaaaaaaaaaagaaagaaagaaaatgaaggtttcagatgtggacatggcaagtcagctgcattgttcaccaaactttagttcttctcaaaaaatacactcaagggagtgacattacaaaaacatgacagtgtagggaattccaaaaactcctatctcccaccagagcaagaattaacctggcaaaaactgccagaggcaactttttccctttttttttttcacctttcacaacttcctcagggctgaaacagcctcccagtggattgtgttgaaagcatttggaggcatgtaccagctgcagctgcctgaggcaatgagtaacacatgggcaagccaagacagatctagaagactacgtacatgtctagggctcaacacatgctcagaaaaacccaagaccctaggctttcacctcacactgagctttaggttctgtattaacaggaactcaaaaactaagaaagttacagatgacctggctgagtcaactcagagtactccaactgcaaagatcaggatgggaggattggttctttcattttttttttttcctggcattgaccactaagctaatacaacagagacttcagtgaccacacataacaaggaatagtctttacaaaaataactttcttttttttttttttaagatggagtctcgctctgtcgccaggctggagtgcagtggtgcaatcttggctcactgcaacctccgcctcccaggttcaagcgattctcctgcctcagcctcctgagtggctgggactacagttgtgtgccaccacacccagctaattttttgtatttttagcatagatggggtttcaccgtgttagccaggatagtctcgatctccggacctcattatctgcccgcctctgcctcccaaggtgctgggattacaggtgtgagccacggcacctggccccctttttttttccttttgttttgttttgttttgttttgggatggagtctcgccttgtcaccccgtctggagtgcagtggcaatgatgcgatctcagctcactgcaacctccacctctgggcccaagcgattctcatgcctcagcctcacgagttgctgggactacaagcatgcacca

SEQ ID NO: 4973 - DNA, 1222 bp, Homo sapiens
agcctcacagcccaaagactccagaaccaagaaggagccctctaggacagaaaaggggtatgctgtcttctagcacttcaggtgccatctctgacaaaggcgtcctgagacctcagaaagaggcagtgagttccagtcacggacccagtgaccctacggacagagcggaggtggagaaggactcggggcacggcagcacttccgtggattctgaggggttcagcatcccagacacgggcagtcactgcagcagcgagtatgcggccagctccccaggggacaggggctcgcaggaacatgtggactctcaggagaaagcgcctaaaactgacgactctttttcagatgtggactgccattcaaaccaggaagataccggatgtaaatttcgagttttgcctcagccaactaatctcgcaaccccaaacacaaagcgttttaaaaaagaagaaattctttccagttctgacatttgtcaaaagttagtaaatactcaggacatgtcagcctctcaggttgatgtagctgtgaaaattaataagaaagttgtgcccctggacttttctatgagttctttagctaaacgaataaagcagttacatcatgaagcacagcaaagtgaaggggaacagaattacaggaagtttagggcaaagatttgtcctggagaaaatcaagcagccgaagatgaactaagaaaagagataaggtaaagttttaattttttactttttctctttttatctaaaatttttatttttattttttatttttttgagacagagtcttgctctgttgcgcaggctggaatgcagtggcatgatcttggctcactgcagcctccacctcccgggttcaagcgtttctcctgcctcagcctcctgagtagctgggattacaggtgcacgccaccatgcctggctaatttttatatttttggtggaaacagggtttcaccatgttggctgggctggtctcgaactcctgacttcaggtgatccagccaccttggcctcccaaagtgctgggattacaggtgtgagccaccacacccggccaggtaaagttttttcttaagagtattttgaggctaggtgtggtggctcacacctgtaatcccagtactttgggaggccaagccaaggagggaggatcacttgagcccaggagttcaagaccagcctggacaacatagggagacctcgtctctacaataaaattg

SEQ ID NO: 4974 - DNA, 1202 bp, Homo sapiens
cggcatctcccgtttttttgtggcataacagttgaccaaaataggttcaggtctccttgagacaggttttgaaaatgctttttaaaatttttttcctggaaaacaaatgaccaaagtcattgctgtacccacaaaaggtaaatatgtttcgattagtctttgcagacacctgattcttacactgacattcgagtctgggcgtgagacgtgagcgctaagacccttctggggtagctgggaactaggccagggttcacctgggcgcccctgaaacccagccgccggtagacgagcccaccagagcgcatgcgccgggggtacgccggggccggacacgcccaactcttcttgtctgataaagggcggagtctgctacagccccgcccccagtgaaggtgcgcgcgtggcggaggctggttttccgtctggtgaggggttacttccgggtcggacggcgctagctgcagcatcggagtgtggcagtgctgggctggccggcgggctgggctgcggcccgcgcgcggccggcgatgcaggggggcaactccggggtccgcaagcgcgaagaggagggcgacggggctggggctgtggctgcgccgccggccatcgactttcccgccgagggcccggaccccgaatatgacggtgagggatcggatcgcggcgtcgccgctctgctctctctgtccacctgcgtttctgggcggcaaaggcagccctgaggtttgcctgaggacctgggcgactttggctgcctccagggttgaaccggcggcccagccgcgcagtgcgagggggggcggcgggcgggccgtcgggtaaggtaaatatttattgaaaagaacgtctgcctctccctcctttgtttacatttctgttccttggtttcctctctggggactgaggccttcggatggctggggacatccccgaggccaccgtcttgcccccatgccctgggttttgtcattggttgagaacgatcttctttcattactgcaaggagactttgcaaactatacgctgaatagtttgggttaagagttgtaatttgtagctcttcttgtcttttgcttcattggagcttttcttgtcttttgcttcattggaaggagaactaaagatttcttatagtgaggcagcgtggaaataaataaacgtctttggtttaataaaaaggcccaagtttttttttgaag

SEQ ID NO: 4975 - DNA, 1208 bp, Homo sapiens
ttcccctgcctcagcctcccgagtagctgggactacaggctcccaccactacacctggctaatttaaaaaaaatttttttttagtagaggcagggtttcaccacgttagccaggatgacagtgctcataataataataataattattattattatttttttgagacagagtcttgctctgtcacccaggctggagtacagtggcgcgatctccgctcactgcaagctccgcctcccggttcacaccattctcctgcctcagcctcccgagtagctgggactacaggcgcccgccaccaggcccagccaattttttgtattttcgtagagatggggtttcaccgtgttagccaggatggtctcaatctcctgacctcctgatctaccctccttggcctcccaaagtgctgggatttcaggggtgagccactgtgcctggccagcactcatttttttttttgggacagagtcttgctgtgtcgcccaggctggagtgcagtggcacgatctcagctcactgcaagctgcacctcctgggttcatgccattcccctgcctcagcctcccgagtagctgggactgtaggttcccaccaccacacctggctaattttttgaattttttttttttttttttttagtagagacagggtttcaccatgttaggcaggatgacagctttcataatttttttttttttttttttgagatggagtctcactctgtcgcccaggctggagtgcagtggcgccatctcggctcactgccagctccgcctcccgggttcacgccattctcctgcctcagcctcccgagtagctgggactataggtgcccaccaccacgcccggctaattttttgtatttttagtagagacagggttttaccgtgttagccaggatggtctcgatctcctgacctcgtgatccgcccgcctcggcctcccaaagtgctgggaataatcccaccatgcccagccagcactcataattttttaagtcattgtcaacctgccctccttcgagtctgttatcctgaattccctccctggcaatgttggggaagctgtgggtggtctgtatttgcccttcagccaactccaggtgcagcacggcctccgtgcttcagccgactccaggtatggcacggcctctgcccttctactgaagtgtacttacccatgttggggctgtgtctgtacacacatgc

SEQ ID NO: 4976 - DNA, 2169 bp, Homo sapiens
gggagccggcagaaggcgcccgggccccaggagctgcctcccgctggtggtgtgatcagaagagagtggggtcgagtgtacattgccgtgtggtcgtgtttcctgtaggtgctgtaaaatacctggagtgctcggcgctcacacagcgaggcctcaagacagtgtttgacgaagcgatccgagcagtcctctgcccgcctcccgtgaagaagaggaagagaaaatgcctgctgttgtaaatgtctcagcccctcgttcttggtcctgtcccttggaacctttgtacgctttgctcaaaaaaaaacaaaaaaaaaaaacaaaaaaaaaaaacaacggtggagccttcgcactcaatgccaactttttgttacagattaatttttccataaaaccattttttgaaccaatcagtaattttaaggttttgtttgttctaaatgtaagagttcagactcacattctattaaaatttagccctaaaatgacaagccttcttaaagccttatttttcaaaagcgccccccccattcttgttcagattaagagttgccaaaataccttctgaactacactgcattgttgtgccgagaacaccgagcactgaactttgcaaagaccttcgtctttgagaagacggtagcttctgcagttaggaggtgcagacacttgctctcctatgtagttctcagatgcgtaaagcagaacagcctcccgaatgaagcgttgccattgaactcaccagtgagttagcagcacgtgttcccgacataacattgtactgtaatggagtgagcgtagcagctcagctctttggatcagtctttgtgatttcatagcgagttttctgaccagcttttgcggagattttgaacagaactgctatttcctctaatgaagaattctgtttagctgtgggtgtgccgggtggggtgtgtgtgatcaaaggacaaagacagtattttgacaaaatacgaagtggagatttacactacattgtacaaggaatgaaagtgtcacgggtaaaaactctaaaaggttaatttctgtcaaatgcagtagatgatgaaagaaaggttggtattatcaggaaatgttttcttaagcttttcctttctcttacacctgccatgcctccccaaattgggcatttaattcatctttaaactggttgttctgttagtcgctaacttagtaagtgcttttcttatagaaccccttctgactgagcaatatgcctccttgtattataaaatctttctgataatgcattagaaggtttttttgtcgattagtaaaagtgctttccatgttactttattcagagctaataagtgctttccttagttttctagtaactaggtgtaaaaatcatgtgttgcagctttatagtttttaaaatattttagataattcttaaactatgaaccttcttaacatcactgtcttgccagattaccgacactgtcacttgaccaatactgaccctctttacctcgcccacgcggacacacgcctcctgtagtcgctttgcctattgatgttcctttgggtctgtgaggttctgtaaactgtgctagtgctgacgatgttctgtacaacttaactcactggcgagaatacagcgtgggacccttcagccactacaacagaattttttaaattgacagttgcagaattgtggagtgtttttacattgatcttttgctaatgcaattagcattatgttttgcatgtatgacttaataaatccttgaatcatacgactggtaatactggtgtttttgagacttgatgaacaagttcctggtgtgtgtttgtttgccttgctttaaagtcctgggttgttggagacagtcattttcaatgcgtgtctccacacaggagggacagggagtgccacctccaggggagaactgggtgagcccaaatacggcaggagtggaggtgacattcatgtttggacctgtcgaacagtggcgaagctctgagggagaagcgcctatcggggtgtgtgtgcacatcctggcccagagctaggggctgaagatggagatgttgggaccctagactggccctggaagagtagaggttggtgaaccacatgcccttaagatcctttccagaggctgagtgcgtggcttacgcctctaagcccgacgctttgggagg

SEQ ID NO: 4977 - DNA, 1243 bp, Homo sapiens
cagcaccactaaccattccttacattcttttttgtatgtgtggttttctttttatttaacccgcagccgacatcgtagtttcttgttttgttttgttttacagagctgttgcatgacttatgttaccatcctaaaaaacactatattaaacatggaataaattgtctttttatgaattaggctttttgaacatcctgtgttgggatttttttgtttttcaattggcaacaaaagctctgtagggctgcagacatttaaagttcacataatcatctgtaagacattatgtattttgtggaaatactagaatttttttcctgattttgccattatatggatttgctattttttgattaatgcaaaagtatatgactttgttttttatgtgatacaccataaatattaaagtgttgaatactaacagtgctgactacaagaaggatgtagtattttggctttctgcattacaacgtcttctggaggaagggagcaggatgggtttcatttgtatctagtgtgtgtcttaacatctttctaaatcggcagtgtaactgcatagtttaacttcctgtctgtctccctcattttactcttccctccttgtcttatgttttggcttttgtgtatcagagcatctttctttgcagcatcctagtcttgcttcagtttctgtggtctcttttcatcctgcttgaagattcggagtgtggaaggaggctaggaagtctggtgcagtaggtgagcagacctcttgctgcccagcccagggtgggtggggcgcacacctgtctttgtgcatgcaaatctgatacacctggcgcatcctctggagagcacaacgcatggaaaggtctggaagctctgtgtagccattccttctgcagtcatcctacccaagtaaaagtaaccttggctatgttaccaccgttttggtcacccaggaggacatcttagcaagggtgcctgcgagggagtgtgggactgggcctcatcctcgccggcgttggaaaccaaggccttgtatgccacgccttatgaagcactgtttcacagttactttcacttcccgaataaaggttaccaggtaattaatatttttattgaggtgtttgtgtgtttttcaatgtaagcatcatgagaaataaagcaaagttcagatatttgcccagtaatggatataggaaaagctgctttccagccaggcctggtggctcatgcctataatcacagtactttgggaggc

SEQ ID NO: 4978 - DNA, 1197 bp, Homo sapiens
aaaattctttttcaccccattcaataaatatttaagcacctgtgatatgccagccatggtactcagggaggaagacagaatacagttattgttaaaaaggtagacagtgtccatgccctcccagacctctcagtctataggggacaaaggtagttacaaaacccagtagggtctgtcctgtgactgtgaagggggacgctgtgggccaagtggatactcttgccatttcttaaataatatggttctttttgagatggttcatccagtactcttagcccttcaaagagagatttttctggacatacaaatttaagaatctagttagtgagtggattttgcagaaaataagtaaagtctctctgccactttaagaaagaaaagcagaagatgccattttaagttcactgctttttaaagttgagcatttgactgcaaagtttgtgaaaggtcaattgctttagcatgtaggtgtccctatcagggcccatgtttgtctattctgagattcactgcgaagttgaacctctttcttggctgaatcagttgctcattgggtggttctagaactaaaatgattgctaaagactggtagattctcctgtgaagaatagtaaacctgttttaaagtgaaagattgttagaacttagagtactgttcttccgattgcttagagagctttgtgtacctccctgtttatttgaactagtctttgagtggattggcaatgaagaataatattcgtattctaacacgcacataatatatgaaaggagatgaagtatactacctatagttgtcttatttattattacctaacattttattgtgctgtttatttggatagagttcaaacttgttcgtgaatatggacctagtaggctggaaataaacttaagacccagtaaaaaagagttgtaacaaaagagttgctatgttttctgcagtgaggattccttatcactttgtgattcttagataaaatcctttccatccaggaaaaattatacttccagaatttaccaaactgacagaacaactaacatgccccaggccaagtaatgtcagttctgtaatcccctaaagccattccttcccataattgcaaaaactaacagggaacccccacaccctggcccctgcacccttgcctgccatgctatatgtttaaaattgacatttgcttgcaagagtaaact

SEQ ID NO: 4979 - DNA, 1216 bp, Homo sapiens
tgctgaaccaaaaagaaaatgtattgagaggatggtaaatgagttccattttggttaactggttgtgagattgccttcagggcctcccagtgaatagtggtttctgtagttcacaggtcttcacttacatcataagtttcaaacagtgcatgttctttaatatataatagctctttttcctaaatatgtataatcaattttattatgagaaagtataatcatgtcactctcctgccagggtcttttgcaggagacattgtaacatagaagttaagagtagcactggctttgggaccataggaatgcatttgaatcctgggaagttttggacataaaacctgcattaattctcaaagatttaatgaatggtagctgctgctataaaaatagtcacctttattatcacctgttagtttccctaatcctttcaggaaaaaaatatcaattatttaatacacagcttagtcaaaacctccttccctagcctagtttgtgtcaattatctaataagatgaattctgaccatttcttagacagattagaccttttcctaagtttgcctttgttggtatattttcctctgtgcccttttgttcctacataccagatatctgcctgcataacactaatttctttatattcatcctcttgtttttttaatatgtaaaatgagaacattggttcagatcatctctaaagctaaggtttttttcctaatagttaaaaaatatttcttagtaaaatagggtaataataccttcctcatatcattgaggttacatgagatacagcaaaatgcttagcacaacttattggcacatggcaaacaattagtggtgatgaatgttgcttaatagtgatttttttaaaatctctttagaagttatatagaatgggtttcagaattatttaagacatttctctgttttctacaagatcacctcagtttgagaattaaagccccatgacatcagtttcataatatctaccatatttagctgagaggcattactttgtgattaagatcaagttgatgttactactccctggaaaactgtgtagctctctgttatgcaatacaaggtttctagttctcaaatcaaataccatctttataaagagaaaattaaaatagcacctatcccttttatatatgtaactatgcacacatgggtgtgttagaattgggagttgaggtttatgtatttcaactgag

SEQ ID NO: 4980 - DNA, 1196 bp, Homo sapiens
ttgtcttcctcaagcagtttaggtgcatgatcttcatttacatagaatacttgggtctcagaattgatgcaacataagcaggtttttttggtgacttacaagagcaatagtttgaagctatctcatttaagcctctcataatgcataatcatgagtagttttgaaatttgcaacctgtgaggtagagcataaactcaagaaaatagccttgaacttgcagacttttgacacaagttctccacaaagtgtgaagagagccccaggcattcctgattggtcaatgggagagcctaactttcattgttttcttcagtacaaagagtatccaaaagctaagtttttgtattccactactttcagttcaataaaacctagagttgtttcatctgcgcctaaagtgtatggcacaattttcttaagaattaggggaaccaggtgcctacagttaaaggaacgtttcagttcctttcattcattcctgggtttttcttttattttctaagaaggttgaagaaggatgagtgatagagaagaaagcaacaccattgatttttttttttaagaaatgatatatatatgtatatgtttgtgtgtgtgtgtgtgtgtgtgtgtgtgtgtattctgtgcattattttgtcatgatctcaattctcttctttccaccaaagtttgtcgtaatattttctcctgaaggtgcattctggctcctttaaattagtcagtgttatattgtaggagactgtcatggaaaaaaggactcagtttactttcgtcattttcacaggggaaccttttaaaacaatcttttcagcagcagatacctttaaccctaataatctcaggccttgatgaaaatactatattttgtagattatggttaaagggggaaaattactagttccgtaagataaatatgagctccatttgacttctgatgtctggtttagcattacataatatgttgatcttacactctgcttttgtccaaataaaatgcaatagtatcaatatcaatttcagaaaaatggactgaatatgcttttttggtgatgaaatctcatgtacgatatttatagtgatgtgcttttattttctcatgagatactaaatattaattgtgttgtacatttgttcttagcatatattaaagttttgaaccaaatgtgttaaagcttacgctttgccatgtaaatttc

SEQ ID NO: 4981 - DNA, 1216 bp, Homo sapiens
ctccttcatcttttctctagctctgagctgtcaaacagcccatggtgggaaaatgaagactttaacatttaaatttaaaggaaggggtgtgtgtatgtgtgtgtgtagataggagggagtgtatttgaagctatatattacctgatttttctgtaaatctatcatattcctttaaaaaagtcttttttaaaaagttaaaggactgtgagtagaaaaattaatatttttcttttaaaatcttttgttaattataaaaatttatatacaaaaatataaaaagtaattttaaatcacctataatcttacactatctcaatgtatttacttctattcagacattttgatgattctgttcaaaacatttaaaaaactttagccatgtatataatttgaaagctgaaaatatcagaatattttgggaacagttttctattaaaacatttcttgatccattcttttcctttcccattcctatggcttccttgagacctttcgcagtgtctagcctctgttttctgccatgttattctgttcaccttagcttctttgctgttttctcttgccgcctttctctgttcctcacttctgattatctctcccttggatccctctctgtctgccttgcctctcctcatttttattgctagtgtataattgggttctacagctctactatgtctcacttcccccaaccttctggctcgtttcctcacctgataaaatggccagaacttgaactccagttcttgtggaaagtgcaccattgtcctcactaatatccagagcagggcatatgttgtcttccttctttaatccccactgcacccggctgttctttacttctttctctaaataccattattccaaggctgtcttggacatttactgaacaatttagggtaacagaggccttacacacagaacagtgtaagatttaaaattaaatgctttgtattcttgttcataaaagttacttggccatccttgccactaagaatgtttcctttttgccttagaccaggttttataaaaagcagtgatcagtgacttaagataaatgtctttagacttaaaatgatgcttcattgtatgtcacgaagagattagattctaaggaaggaattagaaaattaagtaaattttgtgctataatttttaaaagttcatttcaaaaatgcttttctattagtaaaaatcagggaagagaggtttaatt

SEQ ID NO: 4982 - DNA, 1180 bp, Homo sapiens
tacacattggggaaaaacgatgtgagaacacagcaaatggtggctgtttgcaagtgaggaaggaggcctcaccagagtccgaccatgctggcaccctgatctcgggcttctcagtctccaggctgtgagaaaatagatttctgttgtgtgagccacccagtctatggtaacagactaatacaggaagtaataaacatcttttgaggtaggaaacatgaatctgaggatcactactttggagtcttactgttgtgtcagttgttaacagtacctgataagatccttttcactgaggttcaagtgcaggttttttggtgtcttttccagaagattacattttcagattatagatcatttagaggtgggtgttttagaaatgttcttatctgttgatctagagctagagatatcctgagtccgtgtagtactagtcatatctgtttgtaattgagtggaatttaagactgttaatgaaatttccaaatgcctaaggtagcctgttattaatcaatcaggagagatgatataggtgtcccagatggcttggcccatagaaacattgaagctaacaataatactttaggccatggaagtttgagggttcctgagaactttcataattttagttttataatgccatagttcccttaattcttcttcaggactcttgataaaaaaagatggtgaaatttcttgataaaagacaaaacctgcttttcagcattccttaacaagaatgctggaaaaacaaatgtctctgtcagtagaaaggcagaaattcctcaggttgaaaaacaaaaccaagcatttttggggtcataattaatggccatgcattccactgtatgactataaaacacattgatgatccatctatcagttgatggatatttgagttatttctgctctttggctactgaaataatattgctgtgcacattcatgcacaagttgcttctaataagttagattttcacatatggttatataactagtagttgaatagctgggttatatggtttctacatgtttaatattttggtgaactgccaaatttctaagtgtctgtaccattttagaacctcatcagcaatttatgaggatttcagcttctccacatgctcatcaacacttcttattgtctgccttttgattttagccaccctagtgaatatgaagt

SEQ ID NO: 4983 - DNA, 1236 bp, Homo sapiens
ttcaaatatatattaaagccctttaacagagaaacattgtagaaacaggtgtattttaattatagggactacatttttatttaaggacatggatcttttctgtttttcaatatttatgctttaaggtttactaaaatgtattttaatgccacagtaacgtttatggtattaataacctgaatctcttaaagggaggcaaaaaaacccctcaacataatagacttgaatttagggtaaactctctattagtatgagtagtagctctttgggcagcatggtggagtagagacacccttggaattcaataagtattctgtattctttgtttgagaatcccacctctttgtccaagtaagcagacatggagattgactaacaccacaacaatgaacaatccattgtagtttatgactatacaagcctccagaatacaataagcttaggccccaggtacccaattttacacttaagaagaagtgatttaggatgtgagggcaatctggctgcgacatctgtcgccccactgattaccagggttgattcggctgatctggctggctaggcgggtgtcctcttcctccctcagccctccatgtgtgtacctcctgaagcggactggtcttcagtcaagggtagacgagtagctgtgctcccctgctagaacctccaaacaagctctcaagaaggagtgatttagactcatcaatttataaaatactttgctgtacaagttgggtaagctgagtgagatcatctatgatctatcattaatcattgttaacaccagttttcaagctctctagtcaaattacattttgttttcatgctaggagtaaattatttcagcatttttctaatgttaaacaattatctatttacatgagatttaaaaaataatcatttgcatccttttggtaaattataagctaaattaactatgtcatacatgtagaaagagacagtatggcaagattcatgagcaaacaacataactcctttgagaaaatggagaatggcatatttagaatcagtgtttacccagcaatactgcttgaattgttaaggataatctatcgatattgcgtgacacttacatgttgtaacaattattaaaatgagacaattgtgttagggaaagtaatgaatgtaaagtggaataactgcactctgcaggagttaaatgtattaagattgtgcaaggaacacttaaatgacaaattgacatacagatgaaca

SEQ ID NO: 4984 - DNA, 1122 bp, Homo sapiens
tatgaatctaggtgtatttgtgcttattgctgtccctctccctttctctctctctctctctggcaccacaggtccatattacatctccttcctattcaagtccccagttgagctgactggagttattttctaccaattacaagtgtcagggagagatagtaaaatgctcaattttgtcatctgcgacccaaacatctgtgttttagtcagcctccaggtaattcagatacatgctagagtgtgagaaaccttgggccagagcaattatccaggaaggaggcttctgagagttgttggcagccaacattgactgctacagctcggagatgagtgcaccatgggtgcagtcaatggaagacatcaatggcttccactacaggtgctaagtgccagctcctctctttttatattcacttagaaaattttactctaggacacaaaaaattctaagagcagaggagacaagtgtcctctaatgtgtcctaaaattgataataaccgtaaaaagttataggtcaaataggaaaaggagcactgtagaagcagagcatcttacagtatcttaagcatattacaatttacaatggaaaactgcagagtacattggtctttgaacagagcagtcagagaaattctaccactgaatagcatggcctcatgggctgagtgcttgttagatatgtgaccccgttgaagcacttctattgaatgtgtttgcagaacaagatagatggacactgtcaagacccacatgccctctcaaggggaacttcagagttctgggataggaagctcttcattcatggatgaggaaatccatttacacacaaaacctcagcacaaggttcatcaacaattctctgacacaagagagataacatttcttggaagatttggaaaaacaaatatcctaaaataatttattaaagaaaatagaagattttttgagaaaatttacttagtgttctatcttacaaaagatagaggaaaatattgccttaattctttctaaaaaactgactcgaatatgtcacatgatatgaattataaatgaagactcaaactatgttttattggactctcctatgtaaacaataggatgaaatgtaattcactggagac

SEQ ID NO: 4985 - DNA, 1194 bp, Homo sapiens
atgattccatgttttctctggagaacatgcaatccctgaggaatgattgttccataccaccgttaagagcgttactgtgttaactatgtttaccatcttgtctcttttttgccagatttttactttcaccttattttgtccaccaaacacttgtgcaccaggagacatgtatttgatttgtttctgtaaagatttggatgctctcattccgtgttttatatgcctagagggagacttagtaaacagtgagtgttaaagcactcctttcctaatatgcctaagaattacccagagagcttgttataaaacacagctcccccagagattctgattcagtagggccagggttgggcctgagaattttcattttaacaagtttccaagctgatgctctgactgttgtaccaggaccactggtgtaaagtgtatagcattcaagaagcaacagatgctatgaactccagtgacatgttcaagattatacttacctttgatttcatgtacatacccacattttacacatatggagtagtgtcttctctgcttcttttaccaagtttctgtggattccttttgtttgtcataaggaacgtagtgctctaaaacaagtttttaaaatgtaatggaaaccgttgctccattttaattttcatttttatctctctctgacacacagagcacacacaaacatatacatggacacacacacacctcccctttcccaacatgtccagaacttgatgatagcagaaacttgggcatatgattagccatgtcccccttggcaaatctaattacttaattgaatatcattattgaaagatttataaatcttttacataaataacagtggaataaaagcaaataaactaaataatgctagtcagcaaagaaaaaagtggtgatgggtcattttgcaaagactctctgtattaaaatctagatttgcatatttttaaggtagtaagaaacagtaaatccattgctaactttcaagcatcacattattgacttttaaaaataattttctcttcttttttccctgaagataagtcccatagactcagcatggtctaaaatgtgtaaaactaccttgtcaagtactgttattatctctatcatgggttttcttgtttgcagaaattttttaggttaaattctatcctgcatgcaaatttttctaaaaggagtttt

SEQ ID NO: 4986 - DNA, 1168 bp, Homo sapiens
tggtataattatatgtagcactgtgctgtgtagatagttcctactggaaaaagagtggaaatttattaaaatcagaaagtatgagatcctgttatgttaagggaaatccaaattcccaattttttttggtctttttaggaaagattgttgtggtaaaaagtgttagtataaaaatgataatttacttgtagtcttttatgattacaccaatgtattctagaaatagttatgtcttaggaaattgtggtttaatttttgacttttacaggtaagtgcaaaggagaagtggtttcatgaaatgttctaatgtataataacatttaccttcagcctccatcagaatggaacgagttttgagtaatcaggaagtatatctatatgatcttgatattgttttataataatttgaagtctaaaagactgcatttttaaacaagttagtattaatgcgttggcccacgtagcaaaaagatatttgattatcttaaaaattgttaaataccgttttcatgaaatttctcagtattgtaacagcaacttgtcaaacctaagcatatttgaatatgatctcccataatttgaaattgaaatcgtattgtgtggctctgtatattctgttaaaaaattaaaggacagaaacctttctttgtgtatgcatgtttgaattaaaagaaagtaatggaagaattgatcgatgaattaagtgaggtggaattcttttctttctgctttagcttctctctgttggacttagagctgggtattgctattttagtgtataatcaagctgtggaaataaatttccagcattaatgtctattggtagtcatcctcaaatcctttcttgaaatgtttcagtggctaatattatctccatggtgagaaaaagtttttctaaaaagagaagccattaatatttatttgggaaaaatatatacgttctttcccattacgaaaaattattaatttcttgttttacattctaggtagcatgtggtattttattgtcttactaggtttttagaccgagagagggtaaatggttgatctgtagagttttagagcattttgtaggtttgtcacttccgtgactttgcaacactagctaattttccaaggaaacagaattgtgccattttcacaatgtcctatgagctctggggtagcc

SEQ ID NO: 4987 - DNA, 1199 bp, Homo sapiens
tgttttttaactattcagtttaaactgtgagagacaccatgtcaaggaagcagtgtgagctagcgtctaaggattgtgaaaactgagcaagtgcccagaactagaaacttcccagccccctgaactcagcctcagggtaagcgagtttaatagtgcttcctttgattttcaaatctgtggaaggtttgtttcagtttttcccagacaaatattgttgggatagtgtttcttttcaaaaatggataggattcaatgctcatcagtgggaagatagtgactcctgaccattttcctcctagctggaaactacagaagactcccaagtatcaggaaatttggagaatttgtacaggaattatattcagagatagcaatttatttactcatcaaagagagctattggatagccaccataaagaccactcattaaaaaacaaaattgcatgatattcttaacattgtctttcactttttttaaccaggcttggtggagtttcaagatgctgatgaacttaaggtatgggccgagtggaaagaatttggtttaagttattaatagttgaattgaaattgtggccaaggatgagaactctaatctgattttatgtgcttctgctgtgatggattaaaggatttacctgaggccaaattggtatgcaggaatttattaaatggaatcataccccccccccttttaaaattacgcttttggtaaaagggaaaaagctcttggtaaatggataatactactaagccaagagaaagacaggattttgagtgaaaacataaatttagatgtcacaacattactaaagcaacagtgtgtaagatactggacgattttatttacttacttgcacagtttttgtaaacagtctagacagtactgtattttgctatttagtaatacctactgtgatacttcttttacaggtctggcgcttgaaagaatcagtgaagcttttcaagtagaggaggtatatttgaatatgtaacctttagtatctacagaatagaggttgcttttttttttttttttttgtccctttcacagtggtagcaaggttgaattttgagatggccccaatcatctataggaatattatttgacagttttggagacacaaaactgccttatagctgacttgatcctgtagaacatttctgtggaattcaattctattatttaaggtagtttt

SEQ ID NO: 4988 - DNA, 1225 bp, Homo sapiens
tctttctatattgtctagacatactaagatataatgaagatttttgagattttaaagaacagttgctgggcacagtagctcatgcctataattccagcactttgggaggctgaggcaggtggatctcttgagcccaggagtttgagaccaaccccgggcaatatggcaagaccttatctctacaaaaagtacaaaaattagccagacatggtggtttgcgcctgtggtcccagctactcaggaggctgaggtgggaggatcgattgagcttaggaggttgaggttacagtgagccaagatcatgccactgtactccaccctgggcaaaagagtgagaccctatctcaattaaaaagaaaatagaaagaaaagttgctagtaaaattattttgttttattgtttattttaggtaataatagacgtggatggaatacaactagccagagatattccaatgtcatccagccatccagtttctccaaatccacaccatgggggggcagcagagatcaagaaaagccatatttcagttcttttgattctggagcttcaactaacaggaaggaaggctttggattgtctgagaacccatttgcttcacttagtcctgatgagcagaaagatgaaaagaaacttctgtaagtgaaagttttcaggaaaattactatccatttgcttatgttttttcacctacaatctttgttgtttctctttttttgtaacatcttttcacaatacaatattttctttaaaaaaagaaataatgcattatttttaaatcagagtagcaaaaagaagaaaaatcacccacaattctatcactcatagatagccactcttttgctgtgtattaccctagattttatttcacttaaaaatatatcatctttctataatagtagagtgccttcctaggggtaattacgctttttccactttgtgttgataacactatattgtgaatatctttctaagattagtcctgcttaagttcattctaacttacaagtcctttacaaagtatgatgtaatttagaacaacttgtgaacttggaggtcattttaccatctcatttatttatttatttatttattttgagacggagtcttgctctgttgcccaggctagagtgcagtggtacaatctcggctcgctgcagcctccgccttctgggctcaagccattcttctgcctcagcctcccaagtagctgggattacaggc

SEQ ID NO: 4989 - DNA, 1236 bp, Homo sapiens
accttcgtaaattctacaaccttccatcatagagcctcaaagcatttgactcattagacatttgtgaaagggaggccagattgggcatgttctttgaaagacacttaagctttagaagtacattttaggaatgagttttcaggagtttcgtagaagtacatagctatgatagcagcacctttgagaactttcttgtcactgtgtataacagcatagcattgtcctcaggtagcagctctggtgaggtaagtagaaaccaaagtgaaagtctattccctagtccctgtggtttctccttgggtgaaggtcgatcaaggtgaaaatgggattgttagcagaaaagacaggcagcaggctttagtgggtagttctagcctctcatttttactttcctcatctcgtccgtccagtaagcttctcaacactgaaacatgacataaataagaaaaaaagatagggggaggaaataattgtgacatttttctgaccgtaatagatttttgttgttttttttgttgttgttgttgtttgtaggctttccagtcaataacagcagcagtgataatgctcagaactttagttttaaaacaaactctggatttgctgctgcctcttctggaagccctgctggttttgggagttccccagcatttggagctgcagcctctaccagttcaggtatctctacttctgctccagcttttggatttgggaagcctgaagtcacatcggctgcatcattttcattcaaaagccctgcagcttccagttttggatcacctggattttcaggacttccagcttccttggcaacaggtcctgtcagagctccagtggccccagcctttggaggtggcagttctgtggctggttttggtagtccgggctcacattctcacactgctttttctaagccatccagtgacacttttggaaatagcagcatatccacttctctgtcagcctcaagcagcatcattgcaacagataatgtgttattcacacccagagataaactaacagtagaagaactggaacaatttcaatccaagaaatttactctgggaaaaattccattaaagcctccacctctggaacttctaaatgtttaaaagggcaattttaaatacaaaaaagaatgatgtttaaaattgctttgagtgattcatacagagatgtatatatgcatacatgtatatattcataaggaatataagcttccatcaatagtgattt

SEQ ID NO: 4990 - DNA, 1160 bp, Homo sapiens
ttgggaaaacatgtttaccttttctggaagtgatttgctgaattggtgttatttctttaagtatttgatagaattcacctgtgaaaccacttgaataatttctctcagaagtttttttttttttttttttggagacagagttttgcttttgttgcccaggccggagtgcgatggcccaatcttggctcaccacaacctctgcctcctggttcaagtgattctcctgcctcggcctcccaggtagctgggattacagacatgcgccaccatgcccagctaatttttgcatttttagtagagatggggtttctccatgttagtcaggctggtctcgaactcccaacctgaggtgatccatttgcctcggcctcccaaagtgctgggattacaggcatgaaccaccacacccagccctttttttttttttcttatgctcaaattcaatatcttcagtaattatagtgttcttcaggttatttcatcttgggtcgtttgtagtgttcaaagaattggtcaatttcatccaagttgtttctttttttctttttttttttttttaataactacatcatcatggacaagttgcataaagctttgtagtattcgcttatcctttaatgtctgtggggtctctagtgatatctccactttttaattctgatactagtaatttttgtgttctctctcttaaaatcttcatcagccttgcagagctttatctgttttattgatttctaataacttcatgatgttgaagctgaatgagcttctctgtctccatgattttgagaggtgaaggtggctgggcttctgggtcaggtggggacttgaagaacttttctgtctagctaaaggattgtaaacacaccagtcagcactcagtttctagctaaaggtttgtaaacacaccaatcagcactctataaaaacgcaccaatcagtgctctgtgtctagctaagggtttgtaaatggaccaatcagcactctgtaaaatggaccaatcagcaggatgtgggtggggccaaataagggaataaaagttggccacctgagccagcagtggcaacccgccagggtccccttccacactgtggaagctttgttcttttgctcttcacagtaaatcttgctgctgctcactctttgggtccacactacc

SEQ ID NO: 4991 - DNA, 1183 bp, Homo sapiens
ggttcaaggcgtttgttgccatcagggactacaatggctacgctggtcgggttgaagtgctccaaggaggtggccgccgccatccgcggggccatcatcctgaccaagctctccattgtcaccgtgcgcagaggctactgggggaacaagatcggcaagctccacaccgtcccttgcaaggtgacaggccgctgcggctctgtgctggtgcccttcatccccgcgcccaggggcactggcatcgtctcagctcctgtgcccaagaagctgctcatgatagctggtatctacgactgctacacctcagccaggggctgcactgccaccctgggcaacttcgccaacgccaccttggatgctgtctctaacatctacagctacctgatcccctgaaggacttctggaaggagactgtattcaccaagtctccctatcaggaattcactgaccacctcgccaagacccacaccagagtctccgtgcagaggacccaggctccagctgtgactacaacatagggtttttatgcaagaaaaataaagtgaattaaagcctattactgtcaaaaaaaaaaaaaaaaaagacatgaatgtactgggtatgattcgaactggatttgtttcaagcctacaagtctctctctctgataagtgtcatcaaaaaacactgggtgaaataatgtttacttacttatttattcaacacatatttataccccaaagggagtcttgtggaggatagagatggatgtatactgtgggtccttgcctgccccttgagaggcagcctataaatgccattcatgttattcttaaaagtgtggaaaagtacccaagctgctcttagctttcttcttcctcctcctcctcctcctcctcctccttcccctacttccctccctccccggctccctccctccctccttctctccctgccttccttccttcctggctaatcaagtgaagcagtgggagtggagaaggaacgaagaaatctataactggttgtgatcaattagttgtaaacaccactgcactcagaccggcccttagttttctttaatgtctcattttaaagcttttgtttaggaatgtatcttttttttttttcctttttgagacagagtcttgctcttgtcgcccaggctggagtgcagtggcacgctctcagctcactgctgcct

SEQ ID NO: 4992 - DNA, 1149 bp, Homo sapiens
ctcacaaaatttaagaatacatttgactaataattgagcatcttgtcagtttttatgcaagcatatattgtatacctgaggaagatgacagttctataatttttttaaggtaaggttatttttaaattgcatttttgttctaacgttttgcaatttatattctttttaaaatatttcccataattcatcatgctagcttctgtgttcttggaatagtttttgaaaaatgcagagattcgaacatgagtccttaatatactaaacagtgaaagaatgatgatatctcatttctaaagtaagcatggttcacaccactttggcaatacactgcagtactttttaaaaaatattctctagtgataaaagtaaagacagggtactggccaagatcctaattctgacttctgactgtgtgatcttcgatgaaatttatatttccctttatcattactattctacttgttaagtaaggctaagttaatatttgtcttcgccttaaattctgatttgtaatttgtaactctgatgtggtagctgtgatatggtgaactgaaaaatccttattaggctactttatctgttctcttttagttattttaaagtgtacctgtttctgaagtaatgtagtgaatggtgaatacttttcaggaattcttccagttttaaaatagccccaaagatacagtttcagctggtggaaggtctgttctgctctcttagtcctaatcagaaagtcccttttatcttataatcccatactaaatccaaacccttagcaaatccttgctgccaaccagaccactcacaaatcaaacaaaatgtaagcaagcaatccagtactcggttacaccagaagactctgatctttgcccccgaaaactgtcctactttatccttatacctgaaatcactgcatacctgaaatcactgcagccctactgttttacccataccattaatttaaaaaggcatctatttctttatagaaagaaacattcacagtgaggtcttagtttgtgaacctcaaaatccagatattaatccactttagttattactttgtaattgcttctcagtcattggctgataatgcaatggtgtgataaatttgacttatctccacatacaaaagtcgatcagaagggatag

SEQ ID NO: 4993 - DNA, 1190 bp, Homo sapiens
gtggtcgccgatgccgccagtgctccagacgccaggccgagtggccctggtggccacgtcgctgcgcctttcccttgggggaggggcaaggccagagggggtccaagtgcagcacgaggaacttgaccaattcccttgaagcgggtgggttaaaccctgtaaatgggaacaaaatccccccaaatctcttcatcttaccctggtggactcctgactgtagaattttttggtttaaagaagaaaaaaataaagctttggacttttcaaggttgcttaacaggtactgaaagactggcctcacttaaactgagccaggagagctgcagatttattaatgggtgtgttagtgtgcagtgccttgcaggaatttaaactctctacccttaaagaaggaaatgtatttgtacaaaagccacagataatggtccttttactcaagcgacctgctggataaatgacagcctgcagggattgagtttggagatctagtctcaattctgcttccgatttagatgcagttcacttttgttttttaaagtaagttttattaatggaaaggaagaactttttccaagaaagcattttgaaagccactgggggagggggacatttatgcttttgggctgtggagatcctttaggtggagagactgctctctcatccctagtggaatggaggtttgggttggtgagtttctatcaatagcctgctctctatagtgggtcagtgactggcaccaaattgtagtcctgttccatggacattgccctgttttggttttatgagcttttggccaggcacaggacgcagggtggtagggaaaaaaggaaatggttcctgtgcccgtggtgctgacaggtaagggaagggccttctgatgtattttatgggatgcttcagaaacctgggggttgcttgtgtctctgggaagcccttggtaaagaaagccaccattttttttacttaggtatattccagtggtttatcatcgggagagggatgataatggaggaaggctcaatgagggagaaagtattcagctgcttgatgttagagcttaatggcaggacctaccagttgcttttcacagaaatgctgtgtattgatcctaaggcagcatgtgttctcttttgtgtggccattatccattctcccacttttccatcagtgactgctttgcttttgttcct

SEQ ID NO: 4994 - DNA, 1552 bp, Homo sapiens
atgtacttttaaaaaaatcccttactcagtccaaatgaggatgagagggtgaaaggaccctttatttaaaagaatagggtcagccacgaaataaaaatgtctatgaacccgagtaatttatctcctgagtaattctgctaactggctgcaaaggattaggatctgcttgtttaaaagactggatggatataaaatagaatcaactgtagtgttaggctgatcatgggaaatcaaagtaagtttgttttctcttgctgttccaacaattataggaaactatggtccaggaggcagtggaggaagtgggggttatggtgggaggagccgatactgagcttcttcctatttgccatgggtaagtagcttttgagttttacaattattattatcttgggagacatagctgcaggagtaaaagctttttaggatcatgttatctttccttaaaatctggttagatggataatttcataacctattttttttttactctttacttctgttgaaacaggcttcactgtataaataggagaggatgagagcccagaggtaacagaacagcttcaggttatcgaaataacaatgttaaggaaactcttatctcagtcatgcataaatatgcagtgatatggcagaagacaccagagcagatgcagagagccattttgtgaatggattggattatttaataacattaccttactgtggaggaaggattgtaaaaaaaaatgcctttgagacagtttcttagctttttaattgttgtttctttctagtggtctttgtaagagtgtagaagcattccttctttgataatgttaaatttgtaagtttcaggtgacatgtgaaaccttttttaagatttttctcaaagttttgaaaagctattagccaggatcatggtgtaataagacataacgtttttcctttaaaaaaatttaagtgcgtgtgtagagttaagaagctgttgtacatttatgatttaataaaataattctaaaggaaattgtgtaattatagactttttattttaaataagttaaggagtgggtagtataattaaggtccgttgcaaagctgttgttatatttgtataagataaatgctggtcagatgtaagtgtgttgtctgcaattcatcaggattaaattatgtagataacttaagggatatctctgcaaggagaaacacctttttagatcttttagatgctgcttcttcaatgcaaggaaaggaaataaccccagcgaggtactcttcagggacacaggtctagtacaagagaactcttgacggctactaagttcagccagtcttaaaaaactgtgctgtttctacaaaactttaactacagtagtttataaggatgccaacgaaagctgagggtgtagagcaaaatagttctaagcttcagttaaacttctttaggtaagatcttatttacttttcctttcttaattttcctccctaaaagataaactaatactcttaaatggtctttcagtatagtggttcttacgtagtttaacatagctataaattgagtttaaca

SEQ ID NO: 4995 - DNA, 1338 bp, Homo sapiens
taatgaaccaagagttattttctgatgtttaaaaatagaaatttgcgtttttaggttgtagggttgaaatttttggtaaagattctttaataatcctttgataatcacggtctacatttgtttatttttccttagaaagttttttttttaattaataatttaagataatttaatgttgagtaaatttatatcaagcattaatgactttgaaacttgtgtagatcagctgaggcaattttttggtgtaacacaactaatatgcagtttaacatatggtttaaatttgatgtaagttttttttttccccccagaaaactttagaaactgttcctttggagaggaaaaaggtactctgccagcaggtcacctcatatttaagaatttaatttcctgcatacaaagaggaaaatgtaaataaaaattgaaatggtattttcctttgcagagagaaaaggaacagttccgtaagctctttattggtggcttaagctttgaaaccacagaagaaagtttgaggaactactacgaacaatggggaaagcttacagactgtgtggtatgtaaattactgaattgttactggatattagtcttttagctgtatgttaagtgaatcatggaggaaataactatcagcatagtaaaaaattctattatgacttcacttataagctataatgagattaaatgctaaagtttaccctttggtttgaaaggtaatgagggatcctgcaagcaaaagatcaagaggatttggttttgtaactttttcatccatggctgaggttgatgctgccatggctgcaagacctcattcaattgatgggagagtagttgagccaaaacgtgctgtagcaagagaggtaagcaaacaatgactgtcttgtgcattaacatgaagaacgctgccctgctgaaaatcagaaactatttctgaatttagttttaactcaagattttttctcttattaaaggtgtgttgggtttctggaccattttcttaagctagcttatttttcaaaagctaggtccctaaaagctattttatatctggtagttttaaggtggatacaagcgaagtatggtactacggttgggtgctttgaattatgcttgtgtttttttctgtttggatgacttttaccccaccactattttaggaatctggaaaaccaggggctcatgtaactgtgaagaagctgtttgttggcggaattaaagaagatactgaggaacatcaccttagagattactttgaggaatatggaaaaattgataccattgagataattactgataggcagtctggaaagaaaagaggctttggctttgttactt

SEQ ID NO: 4996 - DNA, 1412 bp, Homo sapiens
ggcagcctcagcggctggcgccaaaaccggactccgcccacttcctcgcccctgcggtgcgagggtgtggaatcctccagacgctgggggagggggagttgggagcttaaaaactagtacccctttgggaccactttcagcagcgaactctcctgtacaccaggggtcagttccacagacgcgggccaggggtgggtcattgcggcgtgaacaataatttgactagaagttgattcgggtgtttccggaaggggccgagtcaatccgccgagttggggcacggaaaacaaaaagggaaggctactaagatttttctggcgggggttatcattggcgtaactgcagggaccacctcccgggttgagggggctggatctccaggctgcggattaagcccctcccgtcggcgttaatttcaaactgcgcgaccgtttctcacctgccttgcgccaaggcagggggcgggaccctattccaagaggtagtaactagcaggactctagccttccgcaattcattgagcgcatttacggaagtaacgtcgggtactgtctctggccgcaagggtgggaggagtacgcatttggcgtaaggtggggcgtagagccttcccgccattggcggcggatagggcgtttacgcgacggcctgacgtagcggaagacgcgttagtgggggggaaggttctagaaaagcggcggcagcggctctagcggcagtagcagcagcgccgggtcccgtgcggaggtgctcctcgcagagttgtttctcgagcagcggcagttctcactacagcgccaggacgagtccggttcgtgttcgtccgcggagatctctctcatctcgctcggctgcgggaaatcgggctgaagcgactgagtccgcgatggaggtaacgggtttgaaatcaatgagttattgaaaagggcatggcgaggccgttggcgcctcagtggaagtcggccagccgcctccgtgggagagaggcaggaaatcggaccaattcagtagcagtggggcttaaggtttatgaacggggtcttgagcggaggcctgagcgtacaaacagcttccccaccctcagcctcccggcgccatttcccttcactgggggtgggggatggggagctttcacatggcggacgctgccccgctggggtgaaagtggggcgcggaggcgggaattcttattccctttctaaagcacgctgcttcgggggccacggcgtctcctcggcgagcgtttcggcgggcagcaggtcctcgtgagcgaggctgcggagcttcccctccccctctctcccgggaaccggatttggcggccgccattttcatggctcgccttcctctcagcgttttccttataactcttttattttcttagtgtgctttctctatcaagaagtagaagt

SEQ ID NO: 4997 - DNA, 1096 bp, Homo sapiens
ggttctccgctcccctcccctccccttctcgccggaccccgcgccgggagctgcgggaaggagtggagggtcgggcggtggcctcgcggctggcctggcgcgcggccagcgccggtagttagtggggggactgctctgccctcgagggggtagggagctgtggcgacggttgccccatttcgagacaaagcgcatttccccctcccctcccccacccgcgttccggcggaggcgccccctcccccagccgccacgcggggctgggtcgagacttgggcctcccggagggcggcgcgtggtcccgcgtccgcgaggcctggcggcgcgcggccggctgtcccgaggctgcggcgaccgcccagttaacgtggccgccgcgggggtaggcgcgtgcggtgtggcgcagtgcccttgagcccccgtgccgcggcctttgtttctccccgcggatgcgctgaccacgaggcccgcgctcccgggtgggggcgggcacccgcgcttaggcctctggacgccgggcttcagcggcgggggtcgggagcgggtgtttgcaagaggtgattcttttttcaaagtgtcacgaaacggggttgaagcatcttaagttttttccttttgttatttaattaccgattggaaagagggagggtttctgagcagaaaccaagttgggattgcagaacagagaagattcacagtgctttaccgttgtgagttgtttgggtaatcgtgcctggttttaaaccgaaaggattgtcctttaaaaatggaacatggactttattataaatgggacttagattggaaaagacattggtcccctattttaagccatgtgaagctgttttaggtaccaggatccccagtaaagtctttctagactcacatggttaggacacgtacttaagtacatcataagcaatgtaggtaggagcgcagatctactctggatttgtattcacgtttgaaatgtgcgctctctacttgggggttggaatccaaacagaatttgtatttagttaccttttttgtgtcatgcaaacttaccttaactgtcatgcatttttctagtaatagctcttcaagtctgcaataa

SEQ ID NO: 4998 - DNA, 1198 bp, Homo sapiens
caatcattctgtctcacgtgatcttcccacctcagcctcccaagtaactgggactacaggtgcacataccacacctggataatttttaaattgtttttgtagagatgaggcctcactatgttgcccaggctggtcttgaactcctggcctcaagtgatcctcctgtctcggcctcccaacatcctgggattacaggtgtgagccactgtgcctggcctcaatcatagcacttccaagcaccgttcaaatgactgagtggggaatgaaggtgctatgaataattatacatactgtgatgacaagagaaaaccaagactgtcctgaacaacccaggccatgtggtcaccctagttatgggcaatattttacttctctgtttttcaaatttcctgaattatattatttaaacattaatttaaatttaaaaatacgtaaaaagaatgatcttgctttagaatatttgctttcagaggtcacagaacatttctttggctctttcaccaagcacttaaatgtctcctgccttttaaagtgatagggataccgtggagacattggtctcagaggatgggtggtctcagaggttggggataatccagctgggaggctttgaagctgtgatcatccccctctgccctctaccattctcatgaaagaacgggctagcatagcacctacagactccaagatgacctttttctgtgactaataagattaggatcctagtacgttcaaaatgtcctaaggatttgcttagatcacttgacaggcctgttctcctttgcctttcccaaagcaatgttacagttaaaggttagtttgtgggatctggatttgaatttttttctactgaagtttgcaaaatatatatatatatatatatatttgagatggagtctcgctgtgttgcccaggccagaagtgcagtggcacgatcttggatcactgcaacctcagcctcccaggttcaagcaattctcctgcctcagcctactgagtagctgggactacaggtgcacaccaccacacccgctaattttttatatttttggttgtgacggggtttcaccatgttggccaggctggtctcgaactcctaactttcctaacttcaagtgatccgcctgcctcggcctcccaaagtgctgggattatatgtgtgagccactgcacccagccatcaaatataaatttgttt

SEQ ID NO: 4999 - DNA, 1271 bp, Homo sapiens
gtagaaaggtagtgttagcctgacatttgagttatactctgtgctgcctgagcaagatttgtagaatcatataattaccttttcatgtatatttgaaatcagaggtgtttaaaatacctatgagataccaatgtagccttaacatatgtcaaaatgcattgctggttagataattatttggactacacataaactcctaatattgaatcattacctatcaggtattatctttatggaacttttcaatatctttgctttataaagattctaaacatgtatctgagctggtaatattttaaaatctccattatttgtgtaaaactgtttataagcagtgtttgagagggtctgctttaccattaccccctcaatatcatgatcatccaatctcaaatgtgaaaaaaaaaaagaaatttgattttagggattgtgagtaaacaagtttatatagagagacattgtgaagttaaagttttcagaagttacatttgtgcagttcttaccttttcctcatatagtgccattgaaatagactgaaattatcttggcaaaagttagacaaccaaagacgactttagtggactggttttcaaaacttgagcagctgaaaagcaaaagccgttgtttcccatgacaatgtagcctttgtggatttgggtttgtgctttgggttgaaaagaagtttttagtcctaggccagtagatggcagcagcttttcattgcagacaaaacctcttgaaacccttcccccatggcacaaactcgcccatgatggaaagcatctagatttctgcctccttttacagttaatccaggagagggagtcctttgccaactgatgaccaacagttccaagccagatagtctcgtgaacagtgacaatacagaaataaggtgttatttctgttcagatctccaccggcctttgttcttttaaaacttgaatataggtgggagacataagaaaggaaagaaaagacttaaaactggagtgacaggacaaataatcattactttcaattcatgactgctttatattcatttgatgaaatcatttgtatacaaaccagggagagttttctttacacccttgacaatatatcacatactcttcaagatcataataatatcattaatataaatttaaacaacatggcttgttagaaaatatgctaattgctatggtctcattatgtttgcttagcttttatttgtttttctgtgaacagttagagagctaatttttttcaaaggtgattgtaagtcatat

SEQ ID NO: 5000 - DNA, 1112 bp, Homo sapiens
ggagacggccgattccttccacttcttgccttcggccagtggcggcgtaaatcctgccaagatgaggctgcgggcgacccgggccacaagggtccccatgacagattattcaaataagccacagacgtgatcagcggccttagggcgccctgacggcttgcccagctccgaaggccttccaggaaggttaaataaggagtggggggcgtagagggacaggttgggaaagaaagacgaagtcagtgaacgggacagaggaatcctaatcttgctacagaacacaaggcagcatgctttccctctgcgtggcaaggagacctgtttccaaatttcattctatacagcgttttgagagtgggaggaaggagaagggggacaagaggacagagtaggagaaaggaaggtctcggaggggagggcgagccaaagttttactgcgtgcaattttaagtgactgtctgtgcgtctgtctgccagggttccattgtgtccgaggcctgactgcctttcctaaccagttcagcagagttctgcacttcggccagagaccccatgcaggaggctcatttgccccagcgggatgtgcgtcttctgctcctaaacccagtgtttctcttccccgcagataacccagcagccaactggcttcatgcgcgctccactcggaaaaagcggtgcccctatacaaaacaccagaccctggaactggagaaagagtttctgttcaacatgtacctcaccagggaccgcaggtacgaggtggctcgactgctcaacctcaccgagaggcaggtcaagatctggttccagaaccgcaggatgaaaatgaagaaaatcaacaaagaccgagcaaaagacgagtgatgccatttgggcttatttagaaaaaagggtaagctagagagaaaaagaaagaactgtccgtcccccttccgccttctcccttctctcacccccaccctagcctccaccatccccgcacaaagcggctctaaacctcaggccacatcttttccaaggcaaaccctgttcaggctggctcgtaggcctgccgctttgatggaggaggtattgtaagctttccattttctataagaaaaaggaaaagttga

SEQ ID NO: 5001 - DNA, 1112 bp, Homo sapiens; identical to SEQ ID NO: 5000

SEQ ID NO: 5002 - DNA, 1116 bp, Homo sapiens
agggctgggtcgccagccgcctgcgcctgggaatcctgattgccagctgatgagaaaggcgggctgggcgcgcgtgtgcgtggggtcgagggccggggaccgagcgcgccgcacaaccaaccaggccctcaaaaccttcgccctggtggcggctggccgctccctcctggccagctcctccgtggggtcctcgtagcaaaggcgaatttaagggttgcccgggcgcccctcgctccaggcgggtagctgtggggacctacacccgcggtactccctgagcggccggtccctgcctggagtgccctggtagggccggcggcggctccgtttgggacggatcctgcgttgaatttgacttttcgagggcggccgcgggtaaactcgcctctcccggggaccgcagggattatttacagggagctcgccaaccaaacacaacagtctaacctttccaagtcctcgtaaatttttacagctgggagccacggcgaggcaaacgaatctgttggtcgtttccgacttcccgccagcctgtgtggcttctgaaacaataactccttatgaaatatcataaatatagatttaaatacagtagagcgacaatgcgatttggctgcttttttatggcttcaattattgtctaattttatgtgaggggctccgctggccgcactcgcacgcgggacccgcgccttcttgatggcgtgattaattgtgatataaaatagtccgcttaagaagtgtgtgtatggggggggagacgggagagtacagagacaaggctagatttgatcttttaatcgtcgttggccacaattaaaacaaaccccatcgtagagcggcacgatccctttacataaaaacatatggcttttgctataaaaattatgactgcaaaacatcggaccattaatagcgtgcggagtgatttacgcgttattgttctgctggacgggcacgtgacgcgcacggccaatgggggcgcgggcgccggcaacttattaggtgactgtacttcccccccggtgccaccaagttgttacatgaaatctgcagtttcataatttccgtgggtcgggccgggcgggccaggcgctgggcacggtgatggccacc

SEQ ID NO: 5003 - DNA, 1184 bp, Homo sapiens
gattataacacaatggtatttgtgtatctaaacatagaaaaggtacagtaaaaatacagcattacaaccttatgggaccaccatcacgtaagtgttccatcattgaccaaaatgttgttctgcagtacatgtctatatgttatagtgcataggagacaaccaagacaacaatgttttaaaaacaatccctcctgccaagcagttggttaaaggacagttgttactttggtttttaacataaattaatttgctttctgctttggctttagtcttcacacctccccagccttaacccatccattcttcagctgctgccatttccagtggtctttctaaaacttgatcatgtcaggaacccaactccccccagctccccctcagactcagaattcttctgtgcttctccatttccttcagggcaattgtcccactctagcaggaactctaaggtctttctgaatggagctggcagtagtctccccttccctccccacaccctgcacggtaatcagatggggctacttgttccacacatcacactccaccttgcctctttctgtcacagttggctccatctctttgaaatattgtcaccatctctcagccctcttaacgaactcctattgatccttcaaaacctatcctgtgtgctttcagcacattcttcctcttggttgtcactgtttacttctgtgcttccccaagagggctgcctcttttaggcacccagggctttattttccttgggtgaccccaccatctgtgactgtacagagaatgtgtttgagggcagcacttcatagggtgatctagatccttggtgcccagttcggcttgatctcctcctacaggagtagaaaggagccattctttgaaagtcaaacagttgtggaaatgactccctgccagtttcttagagaacttagtcatgagtagcatttgtgggtatgagaaatactgtttctgagatactcaagatgagtatctcagacagctgcgtacaggggaattctctgaagatttattaataaaaagtaaggtggccctttcccaaatgtagtcaaggagacttggaatcaagattgttaactctggtatgtattatagtcataacccatcaatgcaaatcatctgaagtatgtaggtcttgcccttaggctgatgaggctcagacacaaacatgt

SEQ ID NO: 5004 - DNA, 1203 bp, Homo sapiens
tgtgaaaatgttgggaagcaccaacagaatccacgggggaccggacagtaaaatctcctgtagaattttttaagggcatacatgttctctccccaccccggatctactgagtcagaatctcggtggggtttggggtgaggggtggcaggtgttatgtttcctagactgcagtaaaaatactgtagtgagtatttctgtctgttagccttcctcatattttgacaccttggtcattttattctctgcctgttttctgggctacttagatttgtgacttttggctgggcatggtggctcatgcctgtaatcccagcactttgggaggccaaggcaggtggatcacctgagattgggacttcgagaccagcctggccaacatggtaaaaccccatctctactaaaaatacaaaaattagctgggtgtggtagtgggcgcctgtaatcccagctactcaggaggctgaggcaggagaattgctggaaccggggagctgaaggttgtagtgatccaagatcacgccactgcactccagcctgggtgacagagtgaaactccgtctcaaaaaaaaaaaaaaaaagatttgtgactttcaacttttataggagctggagaccttgaagaacttactttgtcagagtaagtacttctttctgcaaccttttctagtctccctccccaacctccgtctctttccagaaagaaccatgccttcttccctgttccccaaatacatatactctaaacatacctccacaccactttatcatgtttgtccatagggctgttacctcctaccctgctctaagttctttaagggcaggatatagatgtcttcttcaaccttgtgtccaaggcctagtcgtttagtggatcctcagtaaatgtgattaaatgaacgaattattgagtgtagggaaacaggaaaagcaaatcctaaatatatggtttcctgggactacaataactgtaccataaactgagtggctgatacagtaggaatttattgtctcccacttctggggactagaattgttggcatcaaggtgttggcagggttgtgctccctctaaaggtgctagggaagggtcgataccaggtccttttcccagcttctggtagtttcttgtcagcataactccagtcttcataggaagttctccttgtatgcatgtctgtctgtgtgtccacacgtttccttttta

SEQ ID NO: 5005 - DNA, 1224 bp, Homo sapiens
agcaggactggacacccacagagcacattagacagcctcagatatggataccaagggacaagacaatctaaacttccatacagtcaacttaccctatcattagaaaaaccaggagacttcttactagaaaaagtttgaggccctgttggccagaacaccgaatgtctacgacagaggcccaatggtacacatcttgctatttcccaacaactggagggaagccagatgacagctgtctcgaggggtagacatgtgttgggagaaggttccatctccagtcccctgagggctttttagtcaaacttccagattccaaagtttaagcatcagttattgagatgccctctgggaatggagcaaaggacagtgtccatcaagcgagccgagcacagccgccctcccaagggcttgggggaggatctgctagagagctgggtgatgtggcagcgactggctgtcccgcccaagcagcacactgccaaatcctgcacctcctgcagcacacactgcaaaaggactgttgtcatgatggtcaccaagcacatacccaaggactactgtgcgttgaaaaggtgccatttgtgtagctagagttgctctctgtccagcttgcttgggatttggggatgtgtagcattgaagagaaatcactattcattgcacccctttttgccaaataattaggtcactcactcaggaaaggccctgtgatacatatgtggagtaaagtttgctgtgggaacttgaactctgaatttcctgacttctgtgcaattaaaatcccaaagttaatgctgcattagcatggattttccatggtgggttataaatgcaaagttctatgtttcatatgtatttttctaacatatgttactgcctgtgtttctgattaaaagttcatccaaaataaaataacaagggattacttttttccaatagaactttcttcttcgataaaagctggaaataagcccttacctaaagttacccaggtttgcaggtgctgagactttagaggtgagtagtgtttgttagcaagacaaagggcattattctccctgcaatcaccaacagaaagcgttctttctataaagaaaattataggccactgcttcaaagacattacatagttaggcactactactggagactttcaggcagcaggcaggctggcaatcaacaaatatttattctacttccattgtgcatttagtgactttaaaa

SEQ ID NO: 5006 - DNA, 1219 bp, Homo sapiens
tacgatataatgcatgattggataataggaaataccttttagtagaatgtatgattcttgataggatatcctgcccattggctttgacagttgaattaacctatttggctgacattgaccctcctactgaccacgatatataagaaaatatgaaattaatataaaagctatcttgtactggtagcaagatagctactggtaggaaacattaacaatagcatcgtaaaatatagaattgaaaatgtgagtcattttgcttttaaatctctatcatgtacatgactgacttcagttgttctctctcctcccttttgttctgtttcagaggttgaaggctgcattgactcaccaccctgctgccatgtcaaatgggaacatgaacaccatgggacacatgatggagatgatgggctcccggcaggaccagacgccacaccatcacatgcactcgcacccgcatcagcaccagacactgccaccccatcacccttacccacaccagcaccagcacccagcacaccatcctcaccctcaaccccatcaccagcagaaccatccacatcaccactcccattcccaccttcatgcacacccagcacatcaccagacctcgccacatccgcccctgcacaccggcaaccaagcacaggtagaccttttccgtgatctctttccccttcttattctccttcttaacagtgcaagctctaatgctggggtcatttgcagcaatcttgtttgacaagcccaggtgttctatctcacattctaggggctctgtttatctcctaggaggcaagccttacccataagaccctaccagatcataatttctataaataatacactaaaaaatatcaggtctagtctctaagggcaagcataaactttaagttctccaaaatctatttttgcagtgtgtcagaaagttagcccctctcaaaagtaatatgaatcaatggattaggaagaacttaagcttgtgaagaaagatgtgaattaagaatgagaaaaacgagttaattctaaccctggttctagctgctatgttttaaaacatcatagagactcaattttgtcacctgtaaaatggaagttaaatacaacaggcaatcttctgagtaacagtgaatgttaaaaatctaaagagtaacaattcaaggcagacaaagaagctccatcatggatgctagggcgtaaggtgctgtgtaaatggtga

SEQ ID NO: 5007 - DNA, 1210 bp, Homo sapiens
ggttcgaggatgacgtaggtaactctcccctcccaagtccatgttccaagtggctatgtaaagcaagatgatacagaaagctgctctaaaatctcactgagtgatttcaccttcgcctactatgaaatgtctcatcagacctgacatgtctgagataaccaaggtgattcaggatttgatcaaaagaagtctagtaagaattaattacacagaagcctcctttcatttctatgggccaaacaaaggccatggataaccctacccgctttatgtcattacccattgggaaacacaatggctacttctgttagggtacattgaccttggtcaagcatcttaaagaaggcaaccctaattgagagctgtcttggctaatactctgcaccacaattgtgatgtcctagtcctaccactagagggcatggtacagcctggcaaaagttaaaaggggtgtggcagctcccatcaggtctggaggtggtctataagcacagttgacagttgtgcattgggatgggtggagaaagacgacaagagagcagagaatctgctgatgtggctgcgcttacttttagtgactttatgtacttatattaacagctggaaataggttgttgggttttgagcaggctgttatagtgaggaatgttcatttttaaatgttcctaacagattttgcttttgaaaaatgcttgttacatgaataatttgtggaccagggattgcttttctgaaggcagtatagggaacatgaatattcaagatgaaatacaaaaattatgtttaagggtcatagtgtataagtagcttcctaggaaaccctttgtgtatcttttcagactggggtgggggctgagcatgcttgtgcagaaagaagccatagccagaaaggacagaatctctcccccactcccttgccccataaccaaacataagctagctagtcttgtctaatagatgggatttactataggtgaagatagccctcatattcaaggacagaagctctggcaggagtaaattagcaaagcagaaatagtaccctttcattcttggaggtgctttgaaattttaggtagaatataatcgaaattatggaggttccttagtgctcaataatataagacctggtgttattagaacgagtctttcttataaactaacagagcaggtatatgcctgttagaccttagctgtggggttcctttac

SEQ ID NO: 5008 - DNA, 1313 bp, Homo sapiens
taaactgaaattttatacgttgaagcttaaaatctaaatttatgtatgtttggaaatggaatggacattaacataaaatgtattttatcaaaaaagtgtttagactttgaccaaatacatgttggtattatcatgttaatgttctctgtttataaaaattgagtggagatagatagactcggccattctgtgggctgatgagaattctgggctttgttttgcaccaggggtaggaaacagagaacatgtctgtatgttacttaatctccatagcaaaatcccaaacagcattagcagatcgaattgtttcttctaagacttcctttttctgaatgtgtgcacatcccttctcgtgctcacacacttgcccacacactcacttcttcctgcgctgtggctgctctaagcagggctgtgcatggtgcaaagctgcagtcagtgagcctggcagcctgtggtttctgttatggaaatggttccatggtgaaacacatccctgacccttcacagacttacacatttactcaccaggaggtggcagcggtgtgggaggaggagtgttgaccttggacgcaggagagacacctgggttctagttcaagtcggccaaggactgtgtgaccttgacaagtctaactggtctgtgaacaaggggcatttgcccttccagctgtaaacactgcccttctgtgcctgccttatgtgtgtgtgtgagtaaggagcaacagtcaaggaaacttttagggattcgagaagaaaatacatgtgggatcttgccaaggtgctgcctttaggatgctgacccctgcactaccttagaacatgttgatctgtgagtgcccaagcccctgagggctcgatctcatggggcagatgaaattctcttccttagaggaaagggaaaggtgaggccccagaggacttatctcagctgtacatgctctgcctgtggagacatggcttttctttgtgctgtggcagactggggctttggaagtggtgtatgtttaacttacctgagagtgagagatgtgtaggaagaatagctggaagaaagtgaaagatgagtgccagtacttttggcctgttatccagtagagagaaagtgacagtgaaagtaacgtgagagagaaagagtgtgtgtgtatatgtgagagagagaaagaaagagaaaggaatgcttgattgcttgttgttcactgggccagctctgaaatccaaaatcatgccttgataacattacaaaaccgtgatcctgggtttgagtgaatcctagagacattgttcttatggccgcctggtttccgcagcct

SEQ ID NO: 5009 - DNA, 1183 bp, Homo sapiens
agcactataaggctgaataggcacaagcgattaaaagtagatgccaggccacataaaaataaatgttttaatttacttagagctgtattcaagttgtttgataccagacagaaagctgacagtctgttctttgtaaactgcctttccctgtttttctgttttgttttgtttctcaagtttcattttttactaagccccttctgacacctaggcagataaagataagagtagtgcgcagtacaaatgtcagctctgaagaggaggaagtaaatcttcaatgctagggcagatcttcactatccgtgatccagtcttaatttgagcatgagagcaaaatttagtcatctacacaagaagcaaaagcaaggaatagttgttgggtttttgttttttggttgttgtttttttttttttttaggcaagaagtgttgccggtagggtatgtgtgctttctttgccttcctatttcctttcaaagaaatctcttgtaaattacaaaactgtgaattgggttgccaaaaactgttgcccttcgttagatgcttcaaacagtgtaaatcctatactgcaccctgtccacctctgctccctcctccctcccctgagagtgaggacctcatccgaccatgtaattaccattcgcttgctattaaagagcctttcaaactctggtggtgtttgcctctttttttctgcctccacaatgtttggtcccaaaggacacctaatgtggcttataaatgaagagcaaagagtaaaggaccggcagctcgctgtgtggttgctgtttgtgaggaggctgggggaagagagggaggagctggtaacatgaaacactgccattgttcaaagattaatcatttctgtgtgatgcattcatatgtctattgtgatgctataactggtagttagtaattttctacttctttgaaccaatactttagttttgtgtttgagaaccctattttttctagcctacttaggaattctttttggcattaattagaaatctgtattctgtggtcattctatgacatgacaccatgtctccaccaccttcctcccggttatttattcaccaaacatggcatttaaataactcatctggaagttgatggtaagttctgttatttgattaagagccagtttctttctccaaatgaatgggtctccatagagagac

SEQ ID NO: 5010 - DNA, 1236 bp, Homo sapiens
gacatgaacaggttgataatgtgcataaatgaataactgttttgaaaagaaaaattatgcaaatttgttattcagttttgaatattggtaaagtggtagttcagattatcttttggaagtagttctgtttgaactttaaagtactttatagcataattttgcaaaggtttttttcttaatcgcttagaatcaaaatataataaacattcttatctgttgcttatgtatgccaaatataatttaaaatgctcatttttttctgtaaaaaatatattaaagtcaagtatttttactgtggctctcattatataaataattagtataagtatctcaatttttctggttttgttcctttctagctgcatagatgaatggtttgaagtaaatagatcttgccctgagcacccttcagattaagcgtcagcttcctgttttataggtaattttttttgtaattactttttaaagcgttagcccaaattatacattctaaactataatttttatttattcatttactcattgaggtgcatgagtgtgtatgtgtatgtttcagacacttaggctactgcatagaaaacttacattaaaaatattgtataattctaattgttggctgggtatgctggctcgcgcctgtaatcccagcactttgggaggcctcaggcaggtggatcacttgaggccaaaagttcaagaccagcctggccaacatggtgaaactctgtctctactaaaaatacaaaaattagccaggcttggtggtgcacacctgtaatccgagctactcgggaggctgaggtacaagaatcacttgaggctgggcatggtggctcacacctgtaatcccagcactttgggaagccgaggcgggcgggtcacgaggtcaggagattgagaccatccctggctaacacggtgaaaccccgtctctactgaaaatacaaaaaaaaattagccaggcctggtggcgggtgcctgtagtcccagctgcttgggaggctgaggcaggagaatggtgtgaacccaggaggtggagttggcggtgagctgagatcgtgccactgcactctagcctgggcgacagagcgagtctccttctcaaaaaaaacaaaaaacaaaagagaatcacttgaacccaggaagtggaggttgcagtgagccgagatcatgccactgcactccagcctgggtgacagagcaagactgtctcaaaaacaaccaaaccaaaaaata

SEQ ID NO: 5011 - DNA, 1170 bp, Homo sapiens
tataaaaaccattcagaatgtatttgaaattttttaataacttaaatgcaatatagtaaatcaaattgaatctttaattcacagtcttttcaggatatcatttcttaatgtcagtaatgcattaagatgaagcagtcaacttcactgggtcaaaagttacactggactggacatagcatctcacacctgtaatcccagcactttgggaggccgaggtggggaggattgcttgaaaccaggatctagaaaccagcctgtgcaacaaagcaagacgtcatctctacaaaaaagtaaaaaaattatctggacatggtggcatatgcctgtagtcaccgctacttgggaggctgaggcaagaggatctcttgaacccaggactttcaggctgccatgagccatgactgtgccactgcactccagcctgagctttacagtttagagtaagaccctgtctctatataaaaataaataaagttacactgatgctgagtcacttacatagattggcatagtatttgcatataacgtgtgcacatccttccatatatggtttttgttgtgttttgttttgtttttgatacaaagtcttgttctgtcccccaggctggagtacagtggcgtgatgtctgcttactgcaacctccacgtcccaggttcaagcgattctcctgcctcagcctccctagtagctgggactacaggtgcccatcactctgcctggctgatttttgtatttttagtagagacagggtttcactatgttgaccaggctggtctcaaactcctgatctcaggtgatccacccaccttggcctcccaaagtgctgggattacaggcatgagccactgtgcccagcctctcccgtatactttaaattacctctagattatttataatacctaatgcaatgtaaatgctatgtgagtagttactatgctggggttaatttagtattattatttttctcaatatttttaatccaaggttggttgaatctggtatgtgggaacccatggatgtggagaaccaactgtatttcttgcccttccatgagccagacaccatactagattctgaattcttgccatctgtgatcttgcagtctaccatgaaaggcagtctaccaccttttcagttactagaacaaagtattctgtttttccctgaat

SEQ ID NO: 5012 - DNA, 1210 bp, Homo sapiens
gtgcgggggcctctctgggccggccgcggcgcctcggccctgccctctagctcccgcgttcgctcctaccctcttggctctcggggcacagcgcgcggcccggtccggagcagggcggacaggagcgccaggcagagcggcctggccgccgctaacggcgcacgcgcgcgtactcggctcggatctaccttccagtagcagcggagtggccaatgggaccgggaccagggctgggggccggggggccgccgccgcggggaggttcccggctcaggtgcccagcgctcaccagcccagcgcctcgggcggcgccgcggtggccccggcagccccgcgcagctgtttcctggggggcgtggcgtcgggggcccgcgcggcgcagtcctccttcagcatcccgaacagcagcagcggtccgcaggactcgcaggactcggtgcacagcagccctgaggatggcggcggcggcggccagcaccggccggtgggcgggagccccggcgggccgcgcctggtgatcggctccttaccagctcacctctcaccgcgcatgtttggaggtacggacccctctccacgcgcccgcgctcggttctcccgcggctgcacgtgggccgtggccgccggctatttttaccgttctccttttctccttccgccggggcgccgggggctgcttcccggcccagcccgccaggggctgcttcccggcccagcccgcgccggtctccatcctgggaagaaacccggcacgtaacacctgcggtgtcgctgccgcgtagacacgtggttttgtttttaaacatcgtgagcacccacacctcagcgggtactcagtagagatagtctattttccagtgagttgactggagcaaatgttgttttacagcaaacccacgaaatagcccttgtggttgtggcttttagtaccaggaagtcaggaggagacggttgctaaatgtagttctatctggggactcgagtggggcacaatttttaaaagccaaaagtcagagggtctcaaatgaactctgagttaccatctttggaccgacttttaatataaagctgtaatccttaaatctgtgtcagtagtcccacttactatgtcactttaattggatgaatgcgttaatgaaaagtttgttttcaaacctcactaaactgctacttaagatcacagttaatgtgagtcctgcttaatttggaa

SEQ ID NO: 5013 - DNA, 1204 bp, Homo sapiens
ttttctgtgtgaatggtgctagatacctggtctctcataatcctcacaacaaacctatgtcatggttgtttatttccccattttacaaatgtgaaaactaagaccaagggaagctacctgcccagaaccacattcttgataagtagctgaggcagagtttaactgaggtgtctctttccgcaacacctggatatatgtatctacaggtctgtttctttccttatagtcacctttgctgcattgaccttgtcctaaggtgagtcatggcagcttataaaaacataaatagctatgtaacaggattgtttaaaaactaaagtaatttaaggggaaaaaaggaattgaggtcaggaatgtaagaagtgctctgctttctctgcagttatataatgcatattgatttttaacatgtacattcatttttctaggcctggttgcagtatgcctgaaatttgggatgtagaagatcctgccaatgctgggaaaactcccttatgtaacctcttggtgaaggattccaaacctcacttcaccactgtattccagaacagtgtttacaaagtcctagaagttgtaaaagaatgactgctacatgacctgctgcctacggagaactacatctgtaatggttttaatgttttgctaagtcatgtgttgttcatatcccaaaaacttttataggtaactgttttcaaatagaaaacgttttatttggtcaatttgaatgtcattctaattataaaaatgacttacacctttatcaattggttactatttcaatgcaccctttaaaatttgctatgcaaatgagtatatgcttgtacttgactttaatatttgtgctaaagtgagcaaagctacctgtataaagaaaacacagtgggttgtgacaaggatgacatgaaaatacaggacaattctgacaatgtaggggctgattttatagtgtaagaactattaatgccccttgcttcttttttctgcctcttgctcttgtcttttggacatttcagtgattgtaagttcttcggtcatgtcagcccctgtcatcaacttgagttacagtagatggggcagacatggagtgtttgctatatagaactatctgtttgttttacttccttgtgcgctttttgttctctgttctcttgttaatgaagcttttcctgcccattattaatccaaactcttggaccttgtggtt

SEQ ID NO: 5014 - DNA, 1193 bp, Homo sapiens
tggcctcccaaagtactggggattacaggcgtgagccaccacgcccagccagggtagaagtacttttatccattgcttttgggttaatttttaaaaatcagttaggtaaaggaatcataaaaattatacataaaagccttatatatattattttaaagcaaacaaatgcattgtcactcaacaatgtgctgtcataaagacaaaggtttttctctgagtgttccagacaactgttggtataagttgactttcttatatgtatcataattcctcttccaacatttacaattttggtatcttggaagagaagcaataacttttaagactcttgcaaaataataagagttcacattctttctagaatttcagaatttttgatggaaaatttttccaatactctgacccatatgtcttagaagtaattttaaagtttgtatgaaaatttaatactttcattacatgcatcacatttgtagttcccaaatacttctagttgtttttaaaatatatacttaaccttttttaaggtacattttacaaattctgaggcaatcatagctattcgaagtgtgtatttatattcattcatacttgttatgtagaaactctctcagtgcttgcaaatgacctaggtgacatttgtttagctatttgtcttggcatgcatatatcccaaagcctgggatgccaagaatcatatgccaggatcatactgcggggctgggctgtggatctagttggtcagtcccagaattctcacaactcttatacgtacaatcttatttgtcccttgggtttccttttgctcggtctgatatatctgttgctggtttctggacatggtagttaattgctctctacataatggcctcatgagttaagagagcttcaaaaactgagaagctatgccagacactcagaaatgggatctagtgagcctagtattaaaattactaaaacaaactcacccctggttttttaatatgtttgttgtagtaaacaggatgtaaagtgggcattttgttgattgcaggccacccgtgtgatgtggacaccacctctccatgaaagtttttcctatcctttccttgtacttcagatgtatattttaactttgattctcaggtaactttgatttgtaaaacaaaggcaaataaattataatttaagtttcttaaaatatacttcaattc

SEQ ID NO: 5015 - DNA, 1199 bp, Homo sapiens
tttatcctttagaaccttggaaaagaacaagaagaaagggaagatcttttaaactctctattgaccaccagttaacgtattagttgccaatatgccagcttggacatcagtgtttgttggatccgtttgaccaatttgcaccagttttatccataatgatggatttaacagcatgacaaaaattatttttttttttgttcttgatggagattaagatgccttgaattgtctagggtgttctgtacttagaaagtaagagctctaagtacctttcctacattttctttttttattaaacagatatcttcagtttaatgcaagagaacattttactgttgtacaatcatgttctggtggtttgattgtttacaggatattccaaaataaaaggactctggaagattttcattgaggataaattgccataatatgatgcaaactgtgcttctctatgataattacaatacaaaggttccattcagtgcagcatatacaataatgtaatttagtctaacacagttgaccctattttttgacacttccattgtttaaaaatacacatggaaaaaaaaaaaaccctatatgcttactgtgcacctagagcttttttataacaacgtctttttgtttgtttgttttggattctttaaatatatattattctcatttagtgccctctttagccagaatctcattactgcttcatttttgtaataacatttaatttagatattttccatatattggcactgctaaaatagaatatagcatctttcatatggtaggaaccaacaaggaaactttcctttaactccctttttacactttatggtaagtagcagggggggaaatgcatttatagatcatttctaggcaaaattgtgaagctaatgaccaacctgtttctacctatatgcagtctctttattttactagaaatgggaatcatggcctcttgaagagaaaaaagtcaccattctgcatttagctgtattcatatattgcatttctgtattttttgtttgtattgtaaaaaattcacataataaacgatgttgtgatgtaatattgtgtgaggtcttaaatatcctacagtcgatgtacaagagtagagtatgtttgggaagaaacttttcagcttaagtttgcctcctctacaatgacatcttttatatgcttgtctcatttagaatgcatat

SEQ ID NO: 5016 - DNA, 1176 bp, Homo sapiens
caaagcataaatcagatcacgtcactcccttgggtaaaactcttcagtcacttccctttgcccttttgataaaagctcagccccatgatcccaatcaggcctcctctccagtctaatccacgctggagtgctccctgcctcaggcactctgctccccagttcctgcaacatccaaggtcagccttttacacagccttcatgtgctagttgtctgtacccagtaaaattctttcaccctcctccctgacctccctgactacattaatctccctgttgtaggcgccctgagcatcagtaactcccccttcaacagcccttagcagagtttaaacatcacacttatttgtgtgatcctttgatcaatgcaaacttcctcctctaatgtataagcagcccagcccatgaaatcaacaggcctatttttctcttggaaggaggctcaccattgtttatggatcacctagtacaccacatggtacacagcaggcgctcaataaatatttgtgaattaacaaatgaatatttccgtttggtccaagtgccgaggtgtttacaactaattgatcttaaccatttacagatttctttgttccttctccactcccactacttcacttgactagccttgaaaaagaaaaagaagaaaaataaagaatatttccaaatcaaatgctggaacaaatccaggcacacagtagcaattaagaatttaaaatactcctatccctttcctgaaagttaaaggcagcagtctcttcccagccaaggactaaagtcctagggtggtttccaccccctgcatacgatccaatactcttcaaagcacttatcacttctaatggatggaccaaactattcctaatacaacttctggatttcgaaagggtgaaactcaacattaaaactactgttatgccatttctctgtgccttgctttgatctagtcataaaaaattgtcttaaagatatatgttgagataaaaacaaatctgagaattttcacaacttcttgtattttcagacaccctcatctgcctgtcttatcattcccaggtccagacgccgagtctcagactgtttcattacacacttgcacatgctagaatggttagcaacacatttgaaaagattcaacatggccctaaaccagttgacaataattatatgacaacgctt

SEQ ID NO: 5017 - DNA, 1349 bp, Homo sapiens
ttacttcctctccaccccctgactaacgctaccttagtgtttctgaatatgagagtagaaaaagaagatcattttttaaatatgtgtttttaaattgcatttttagaactctgctgcacagttctgcaacatctgcagtgctaagaaccgtggaccaggaagtgcaattttggagatgaaaaaatagctcatttctccttgtcagtctccttgtcaccactctttttgagactgtttttgcaacaacaaaagcatttgttgacactcgtgctgttaagagatttgtttatgtttatattatactcaaaaacaatttcttcatctattcctgtactaatggtttctctttgcagttcacagagaatttggggctctcttcatgccttgaaattttggggtccatagtgaatattttgttatttatttgtttggctcattctttatatagtaatggaaacataagtctaggagttagaaatgaattttttagaccttagtaaaaccatttaaccataaaatggacaactgagaattctcccagctgcctgaaagcgtcgccaactgtggttatcctgcaagctgctacctgcaacttggacgttgtttccacgtgctctgctggctacgattcttgcattctgggtttggcttttttctgtgtcatcaactatggttatcctctaaataggcatttaatgaaacattgtacaaattgtcactcatttgatgacacctgggaataacattagcaggctgatgtcctgcaccattatgtttactaatcacatgttctgtgtgctgtgacgactgtcaaagagtatctggccatggcggacactcagcatttgttgattgaataaatgttagctcttctcattgtgaaggactcacttttactgggataaacaaatgcagttaagaattctggcacccttgtaaggaagaaaagagagttcaacaccttcgagtctgagcgcttgtggctagagtttgccaggagggaggaaaccagtgaccctgaaaactgagggtgcctcaggagcagtgggaccacctgatgctgaaggacggactaatgatgtttcctcttgccttctctggtgcctccattgccctcatggaacagagcatatcatagagggagaaaagtcaaacttgtaattgtgtcttacagttactggcttcatcttccttgggatatatggtcatcctctaatgagtgtaaaagtgcgcaaaacacatccttattgttcctgatctcttagtcccataaatgggaacaaatacagctttctgcttctttctttttggggaaaggacagggtgctagtgagtactgacagcatgcc

SEQ ID NO: 5018 - DNA, 1192 bp, Homo sapiens
gggatttaagacagagattgtatctgtttagtttattatctatacccagtaccctatacgtgatagggacccagtacttatttgtgcagtaaatagattaatttatgaaataaattgatgattttggaatagcaggttttcattctgggtaaagatctgaagaatggaatgaacacatgatgtaggagccaaagtctgcccaagaggatctgtataaggaagccctctaaagtagcaatagggttagttaatatagggccttctttgccagactttggaatttatgtttgattatacaaatgctacaggagcccgtgtatggttggaagaaatgatgaaatgacgcacagagtaatgagtggatcctggctggccaggtcagcctggcagtggtttggcaggaagagggtactgagggcaagagaatcagtgagtgccccttttgagtatttcaagcatgccagcttttggaatccccagtacagtgtcccttcacccctcagatttgagtctacttaagatggcttttcttttaaaatgtatgcattagattctgcttcgtgaaggctgcaagaagattctcgtagctgactctttgtccttactgaagaaaatgcaccgaactcaaatgaaaggtgttcttgttgatggtgggtaaaattgaaataatcatatggaaccacgtgccctgctttcagaaatggccaagcaggtataaacagggcataatccaaagtatgtgtgttttcttacagaggagaacatctgtgagtcgtgcctttcccctattcttccatcaggtaagaaggttttccccaaaaaaatcccaaacatgtattttaatgatgagtggaatcaaaattttggaattagccaactaccgtttataaaactatataactttcagaataacccagtggagagaagtgttgtggcttccatcctgctcagtggaatgctggtgctgccattgcttagagctgaggttctcaagctctagggtgagtcatcgtcacctggcaggcttattggaacccagatcgctgacccagtcagactccctagagtctctggttccaaacttccagggcaggaactgagaatgtatatttctaacaagttcccaggtaatgttgatgccactggttcaggggcccttcttttagaactgctagtctagggtaaaaacaaa

SEQ ID NO: 5019 - DNA, 1193 bp, Homo sapiens
cctgtatacttgaattgcatgtcatacgtaattctgtaatagtactttcatataacttgtatttttgctttggtttgtttttgttttgagacggagtctcgctctgtcacccaggctggagtgcagtggtatgatcttggctcactgcgacctctgcctcccgggttcaagtgattctcctgtctcagcccctgaatagctgggattacagatgtccgccaccacacccagctaatttttttctatttttagtagagacggggtttcaccatgttggccagcctggttttgaactcttgacctcaagtgatccacccacctcggcctcccaaagtgcaaggattacaggcatgaaccaccgcgcccagccataacttgtattttcatataacttgtcatgttttcatatcttattcttactgtatttctgagagcagggactcaattttattctttgtgttcattgtgtgcagcacacagttgattatcattaaattttgagtaagtgaatgaatgaaatggagaggtaggaatgttctgtggaataggtggaatgttaaaggtgggtgcagtttggataggtatagtggagggcattctaattattagtgtcatgacttgtttttacaagacaatgaaagatcggcatatctcctaaagaatacctagcttccaaattatttaccttgtgtttttctaggtctgaatttatattcccgcagtttagaactgctgatatctcctgaggtttgagaagaaagcaacattgatttgttcattctttctttccacaaatgtttattgtgctagtttctagatagatctgggctggccagtgcagtagccactagccacatgtagctatttaagttaattagtattacataaaatcaaaagtttagttctttaactgcactattcatgttccaagtgctctgtagctacgtgtagctactggctacattttggacaatgaagttacagaacattttcatcatcttagcattgaataatgtccatctaaatactggggatattaaacaaacaaacatctggtccctgactcaacctagtttctggaaccagaagaatcagcaaacactgccagaactgaatcagactaatacatgaatgacaaacctgtttctgcctagagatttttctttattgttagttaatctgtaattgttgga

SEQ ID NO: 5020 - DNA, 1182 bp, Homo sapiens
agtcacttgagcctgggaggtggagattgcagtgagccaagatcttgccgctgcactccagcctgggtgacagagcaagactctgcctcaaaaaaaaaaaaaaaaaaagttattttaggccgggtgcagtggctcatgcctgtaatcccagcactttgagaggccaaggcaggtggatcccttgagcccatgagtttgagaccaatctgggcaacatggtaaaatcctatctctactaaaaatactaaaaaattagccaggcgtggtggcacacgcctgtaatcccagctactccagagggtgaggcacgagaattgcttgagcttgggaaacggaggctgcagtgagccgagatcgcgccactgcgctccagcttgggcaacagagtgagactctgtctccaaaaaaaaaaaaaaaaaaagattctaatgaccttctaggtgttaagattctttctccttcagttttttggatagtaaagaattggaggctgggcatggtgactcatgcctgtaatcccagcactttgggaaccaacgcaggaggattgcttgaggccaggagtttgagacctacctgggtaacataaggagaccctgtctttacaaaaaaaaaaaaaaaagatgaagaattagagatcacatgatctaaagaaggatttcttgtctagtaattatttgccttttcagttgtcttaccaatgcttatgaaatgacattttctagtacttgttactgtttcttttcacagcacatttaatccagtatacctagaaaagattaggaaatcagcatgtaatatcagtgctactttgccagtccatttttaaaattgtttcttaattatgttttttaagtattttgccaaaacttggaactataggtttatcccactcaatttatgggaaatgcctaccttatattctaatcataaactgtgtccttattgtaaagcaaatcacctaaatcagacttaattttatcagaacacacctgactgcattttttcattaaaaacaaacatgttaaaaacacattcaaggaacattctgtaagctatctgtaacaaattatggaatgtatcttgttagatacattactaaagcaatcaagtaaagagtatcagattgatccaatatttaaataaaaacattttataaacaatataatataatatctctca

SEQ ID NO: 5021 - DNA, 1152 bp, Homo sapiens
gtgtgtgtgtgtgtgtgtgtgtgtgtgtgtgtgtgtgtggtgtataaagggtcatactctaacatgccatgccatgaagtgcccacataagtcattcacctcccatgtgagttttctaaatgttccgaaacgtatgtatggaaaaataagctggcccaatcagtgttttcacatttacctctaactctacagcttttatcattgcacagcctgcatcccaacaggcaacagttataacaaatgtttcaccactgcataataaaggtaatcctgtttccaaacagaaagagttggaacctcacagccagatgtcctatctctttcattcggccaactctacattttaggacgtgttctctaaagcaccccttcttggttcaaaaaatgaggagttctgtcagccgtaagtgatagaacacttagctaacagtggtataaaaacagggtttattttaatcactcaccaaagtggtaggaagttgccaacattaatttacttacccaacagtgtcataagggacctgagctgtttgcttgttttcattccacaatcctctgctgtcagcttttcaccctcatgcatgtcacatccctgctgtaagatagctacctcaaccccagacatcatgttcatagcagaaactgggaggaaggtgctgtgtgatgaactctctttctacctgctccttttataagacagcttcctcagtagactcctgtttatgtctcactggtcagaacgagttccatgcccacttctggctacaagagaggctaataagaacgttcatatcttgcttttaaaagatctctatagcaggagtcagtcaaaagagaatggggttggaaatgacgttgggttagtagctgtatctattgctacataatatacccccaaatgtagtggctttaaacaaaataagtgtttcttatttttcacagtttctgtgggtctgaaattcagaagcaatcttgggtgatcttgactgttacatgttggcctgggctgcactcatctgaaggtttggactggggttgcaggtgctgcttccaaagtggcccagggacatggctggccagcttgacctggctattagtggtcagcttcagtttctccccagtaaacctctccacagggcacagccgctggct

SEQ ID NO: 5022 - DNA, 1211 bp, Homo sapiens
ctcccaggtgctttgacaggttcacacagcaggactgggtgagattactgactttgtatatgtctatgacatttacacacatttgggtatttactgtacatactttaaaatagtggttaggtgctgtcattttcatgattttgacagttgagaaaccatgttagggagagagctttgtgtgacaccctaatcagaccgtgaagggacaggtctgagttgttcatagtgcagagcgaggcatggccacggtacacagcacacaggtgataggcaaatatttaatgcactgagccttttgtgtgtaaggataattagttactttaaggtattcggcatacacttttacatttccatattttaattggactttactggtcactgtggggcatagatacaactgaactgttcaatcctaatcaaataaaactattagtacattcttatacatctttttgggacaaagtacctcctacttacagagtatccaatgtaaattttttatggacaaagtaaatgtttataaatattttggcattttataacttttcctagcatagcttgagggctgataagaaactcagcagaaacaggctgtggttggcatgaagacactctctctctctctctctctctctgctctaggggattttactcactttgggacaaaagcaatatagtagcatcttttcactgaccaaggtaaccagagtgttgatcagatcacactgatacctacaagtggccaaaattaaatgacaagcatggggggaggtgccaggaagtggcaggggtatagagtgtgagagagaacagatgcatgtgagtgtggtgtgatgagggaagcagctcaagagctgacacctaaacccagaataatttcagaggtgaaaaattaccacctctcttactagtgacattgaagagaaaaaaaattagggtttttcactgatatgttactagtatttaggcaaaaacacaacagaaaccaaatcaagtcactataaagcagtaagaaaatatttaaaaaagacattatcaaactttagtgaatgttattctaagtctcgaaaatttagatgtctgtttagactaaaattttgccaaaaacaaatccaaagtgaaaaagtagcaattttagtagacattaacaaacattatgcagatatagatacacatatgaataatgcaagagatttacagaagtgtagttt

SEQ ID NO: 5023 - DNA, 1139 bp, Homo sapiens
aaaaagaaagctaataggttcttatccatctgctttccaaacaacttaaccgcatgttagataattgtatccttaggttttattagtcttataaggaaacatattataaagcaaaagaacttccttctgggcaccagagcctacaaaaacagaaatctggtatctgctttgaaaaggtcagtttaaccctcttagcattagcaggcttaatgccattgtggttgtctacaatgaaggacagccatgagctctcttcctacattcttaatattcattgaagagaagcctctcaggaaaaaaaaaaaaaaaatgagcttaaacatgctagtagagtatgaggtcttcagttgttacaagttatctctattctggagttgtttctttaaaaacatatttatgtgttctttgagtagattatacagtgaaaagtgtctccctgagagcacttttgtcagtgtgttcagataaatattccaatctctacagtcttttaaaataaatggcagagcactgtacagttttgtgcttttgctctttaagttacacactgtcctattgtctatatgttgtgaatttatgtggtgcttcctatctgtctgttctctgacaacttttactttatcttagtgtttgaattttgtttctttgctatggccaaattatagaaaaccagggcttaggttggccatctgttctgaagtaaaagtaagtgtagagtttgaattaatggagaggcttttctaatctacctgataggaaatagtattatgtagtgaagtgctccttgatttctatttgaaagccgctatctcgggtattttttctgttcacatttacttcctgtgcacttaatgcctttatgggtgattctgaacaggctggaacttgatcactgcagtagacactgtctttcctgttctttgaggatagcagtgatgtacacttgcagtccactgtttcctgtatatccattcatcactgtgactcagccatcgactccactaactaccttaatgatgtcttggataatgcatcagaggaaaaggtgactttttgaggaagggcccccagtacatcccataaagagacaggatagcccagagaccagagaaaggggtttcctagaattatacaaactg

SEQ ID NO: 5024 - DNA, 1162 bp, Homo sapiens
gtttaattgtctgtattcccctcaggaccaaggaaaattccttatatcttgatactgtttttatattcttactgtctgaccagatcagaccctcagtaaccgtttgctaaacaaaagaaggaatgaaggtacaaatatgtatccaccttgtctggaaaaatagcaggaaaggcatgcctgccaaggacttttacactgaacagtaagaatatattttagctcagagacactgtttgttttcacatttcaatattgctttaattagatatcttaaagctcgtgtaccacagtggttgaaagagcagatgctggagccagactgcatgaatttgaatcccagttctaccacttattcacttattagtgcacctttgggcatgttacttaacctttctgtgcctcagtttactcatctgcaaaatgagcgtgatgataatagttcctacttcaaagggttgtgagaattaaatgaattatataaagtgcttagaatagtacaagacacataatagtcagagacagaagtattaggtattatcaatattgttaaagtccatgtataagtttactgtactattgtttctttttaactctgaagtgctgttttcactctgtcacgtacagcttttattgctagcatcttgcttctgcaggtccagcctcctgttgattggccctgtgtttgtgctgtggtcaaagcacttgctgtctgcggttctcccttgtgcacaccggttctttggttgctgtaacaaaaactacataggacacagacaggaaacccgcaggctttgttttttcttcctaatttggcagcagaagggggaaaaaccagggcctttcacagacaaggcttgttttagagtttaattttaacttcttgttcgtgttctaaagcttgggttggtaataaatcttggctgtatgagactagagagaactgggctttaaaaatatgattttaatgtaaaatcttttctaattgcaggacaacttgcctttgatgattttcaagagagttgtgctatgatgtggcaaaaggtaatggaatgttccagggccaagttccccactagaacctgccagggtattctcgagttagacaatagaagaaagtcactccctgaatagttatgggcttctcctggtctttagggttcac

SEQ ID NO: 5025 - DNA, 1160 bp, Homo sapiens
ccctagatagaatgggtttacaggtattgggtaaatatagtcattccaaataggagaaattggccaaaacaaaggggtttcagggcccatgcaagtctgaaatccagcggggcagtcaaattttaaagctccaaaatgatctcctttgactccaggtctcacatctgggtcatgctgttggagctgcctatggtcttgggtagctccacccctgtggctttgcagggcatagcctccctccaggctgctttcataggctggcattgagtgtctgtgacttttccaggtggatggtgcaagctgtcagtggatctaccattctggggtctggaggatggtggccctcttctcacagcttcactaggtagtgccccagtagggactctgtgtgggggctccaaccccacattttccttctgcactgccctagcagaggttctccatgagggccccaccccgcagcagacttttgcctgggcttccatacatttccatacatcttctgaaatctaggtggaggttcccaaacctcagttcttagcttctgtgtgcctgtagactcaccaccatgtggaagctgccaaggttgaggcttccactctctgaagccacaacccaagctctgcattggcccctttcagccacagctggagtagctgggacacagggcaccaagttcctaggctgcacacagcatggggaccttgggcctggaccacaaaaccactttttcctcctgggcctctcgtcctgtgatgggaggggctgccgtgaaagtctctgacatggcctggatacattttccccatggtcttggtgattaacattgggctccctgctacttttgcaaatttctgcagccagcttgaatttctcctcataaaatgggcttttctttcctatcacattgtcaggctgtaaattttctgaacttttatgccctgtttcccttttaaaatggaatgcttttaacagcacccaagttaccttttgaatgctttgctgcttagaaatttcttctgctagataccctaaaaatcatctctctcaagttctaagttccacaaatctctagggtggggcaaaatgctgccagtctcttgctaaaacataacaggagtcacctttgctccagttcccaacaagttcctcatctccat

SEQ ID NO: 5026 - DNA, 1211 bp, Homo sapiens
ctgtccaggtctgggcctcccttgggtcactcagttctcccccattcattcattcattcattcactcactcactcactcactcactcactcattcccacactctgcagccactgacttcagctagccatgctggatgctaagacatagagtcccggccatcaaggccagtccatctcagtggcatctagacatgcacagagatgaccagggagcccttgagggacagagaggcacaccctgcctcctgatcccatctgggggctgcatgaaggaggggcacaggtgtggccttgaaggctgggtaaggggctgggagggctttaggggcattccagggggcaggcacagagctggaggctctgccaggcacacccacaggagagcaatggctggagggtgacatggactgcagggtgtggccgcggcagcccagctcttaaggggacagcctgggaaaacagacttagggacaatgatcttgagccatgaaatgatgtccaatgccccttgtgccacctgacatcagcctgattaatgaacaaacagaagaggaagcaggggacctgtgtgtccctctctctgcttttctgtctttctccgtgccccctctcttatgtctctcacgctgtctcttgtccttgtttttaactctgacacgccgtgggaactcggctcacttcctagggggaagctgtctggactggcccagagatgggcaccaccatttcccaataaacacaagataaaatcagagagctggcgtcagttccacggctggactcagtggggaaaagggcaaaaagcagcagaaataagagcagggaaagaacgggctgggtgcgatgggtcccatctgtaatcccagcgctttgggaggcctaggtgggaggatcgcttgagcccagaagttcaagaccagcctgggcaacatacggagacccccatctcttaaaaagttttaaaaattagctgggcatggtagtgtgcatctgtggtcccagctactcaggaggccgaggtgtgaggatcgcttgagcccaggaggtcgaggctgcagtgagctatgattgcatcactgcactccagcccgggcacagagcaagaccctgagaccttgtcagaaagaaataaagagagaaagagagaggagagggagagggagaaagaaagggagagagagagagagagaaagatgaaagaaagaaaaaga

SEQ ID NO: 5027 - DNA, 1178 bp, Homo sapiens
tggtgggctctggccccaagattatacctcctgtctctgcattccagcacaacctgctcccccagcctcctcggagtaaatacatacacccagatgacgagctggtcttggaagatgaactgcagcgtatcaaactaaaaggcaccattgacgtgtcaaagctggttacgggtagggagcccaatgagaggatgtgggtgatgcaggtgaagagcccagcggtggtgtgttagggatggtgtgagtggggagcctggggggagtgggggggtgtggcctgggcacacgtgtgttcttgaggaggtaggtgaggctccaggcggtcggaggccatcagattgggtgagacctggctgggagatgggtctccccacctccatccaagggcagtgactccaggaagcaggcatgcatcctggagtcctaggtgagaattcaccaatgtggttgtggagaactggcttgttttgcccgttggggtgactggaaggagtggtagcacctggggctccctgctcaggcctgatgccactgctccccagggactgtcctggctgtgtttggctccgtgagagacgacgggaagtttctggtggaggactattgctttgctgaccttgctccccagaagcccgcacccccacttgacacagataggtgagcagcagttctcgggagctggaaccagctcatggtcagtggaatctttgagttgcacctaggaggggctgcctcccttctcggcaccctggaggaccccaccttctcccgcaggtttgtgctactggtgtccggcctgggcctgggtggcggtggaggcgagagcctgctgggcacccagctgctggtggatgtggtgacggggcagcttggggacgaaggggagcagtgcagcgccgcccacgtctcccgggttatcctcgctggcaacctcctcagccacagcacccagagcagggattctatcaataaggtatggagcccacctggctgcattcagccccagcccaggagcctgcaagcctgtaagaccctccttccccagggcgagtagggtaccctgtgaggtctcgcaggtcggtgggaagcgccctgcagtgactctggggcctcctgcaatggggctcctcatgcccaggccctcgctgaggatggtgggaggcttgaagggagtgagg

SEQ ID NO: 5028 - DNA, 1661 bp, Homo sapiens
ggatcttatttgtacattaatgatattaacactccagtggggggtggggagtccctgatgctagggctggggtgggtggagtttgaagactcttgggaaagcctctcctggggccactgttgggggtgggagtgagcccaccacagaggccacaggcaggcccccacttcaggcccaaggcctggggcggggggaacagtcactgggtctcagattctgagactgttgtttagcttacctttctgctaggattggcttcccgcagagggcagggcccatcctaagcagcttccaagtcccacaaaggtggcttgtgggaggatttggaaggagctgcattgtgggcggggagtgtgtgggttgggttcgtaccagcaagtagactaggaactgagcccaggaaagggggatgttttcctggtgtttggatggtcagctgggagtgtccatcatcaggggaagatcaaacacaggtgcactcagctgcccagggcctctgggacacttgccttgacttgcaacttgccttgaacatcacgatcaaagcagcaggtgctgtggtctctcaaaattgatttttatttgactctgtggctctaagactgccttgaaccgcctgaggcctatgcatctgaacaagtgggtctctcccttgagcaccaggagtgggtgccagccggccccgaggattcccagcaccccacctatggtcttgccagcataggcttgctagttccttcttggtcagaggtagctgcagaggggggaggccaagggtttggtctaagctgtgccctgccacctggcaggaggcccactcactgcccaagtcatggcaacaggctggagcagcccaggagatgggcctaaaatgttctggatcccttgggtcctagtgttatgttccagtctgcccacctgtgctcaggatgcagccctgggatccagcacccatggaagcttctgctgggatggtgtcacctatgggttttgaaccagtgtggtatggtccttgggagctctgctctgagcttgccacactgctgagagcacccactgtcctgaccagagtctcagtggtcctgacccccaatgtgggcaggggctgggcaggagggtggggtctgctgtgggttcagaggactccacctcctggctggtttacctgctgctgcccattttctctgggtactgctggccagaggactttagcctacccctgaagagcctgtccatgtcattttcctactgccatagataccctaagcccagggccccttgaggcccagactcagcctgcccactggtgccggagacggagtggagtgggcctggatccgagggatgctacctctccctttcccacttgaggaccctggggagagatgggggcggggaaaatggaggtatgaatttggggtaagaggaagtgagatctccgcttgcaggtcagcccctgccttgcagggcgggctggcttgactcaggccctgtgagatagagggcccagcccagccccacccacagatcccctgctcctgttgtgttctgttgtaaatcatttggcgagactgtattttagtaactgctgcctaacttccctgtgttctatttgagaggcgcctgtctggataaagttgtcttgaaatttcacagtggtc

SEQ ID NO: 5029 - DNA, 2101 bp, Homo sapiens
acgtggtcttcttgctcatccccttataaatgtgctttgcctgcctcagcctcatggtcagagcagtggagactggagccctgtttgcacgttctagttgttcggagaaagcctaggttctgggctcaggtccagatgcagcggggattctgttctctgactgtggcgaccttgctttggttcttgttgaagtgaaccaagcccggccaccacgcatggcatgctgtgcttggctccccataagacgtcctctttgggtgcacggtgtcaaagtgtgggcaggagtggagagctggtgccctcaggaggagaccacagcatgtccatcagctcagcagagctcgacagccacaagtcctgagaagctttgaccttgaagggcttctgggagaggaggaatttctgcatggggcgtgaaggcacactgtcccaccacaactgaaccagaagagagtgaagactcccctcttcccatcctctgtgccaggtgccagactgtgctccttggaacttatggcccaatcttacctgttctccagggactggtcactgcctcaggacccccaagcctatgccctgagccatggctgctgactgactccagccaaggtgcaaagacgagattatgagacaggtcctcaggcctgtgttccaagtactcacaggggctctgggtgcccatcgccgggagtatggttcagctgccaccggcactgtccatttgcctgtctgtcaagctcagagcatggataagccacacagcagggcagtgcaccctggcaccatgcacggccagcaagaatcaaggcccgcagatgctaagagggcctattgtcaggggaaggtccccgctcctgcacactctctatggatacttgggttgtgggggctctcttggagagtaagtttgtggtttgtttctggtttacagtggtggctgacaccccttgtaagaaagcattcctgggaagtcttctgtgggtccaaacatgttgctccgatcatcacaggagagcaaaaggccctagataccccctttggaatgtgagagtcttgttgtctgatatttgccactgagctggtgaagcccctctaaagagatctcgaccctggggagcagaattcttgtcatctatgaggggtcctgagaaagacttgtcattttttttcctggagttcttcccattgaggtcctaggatttgcacaccactgtcccacaagagctttcctgcctaatgaaaggaggtcttgtggtgtgtgtctcctctcttctctatagttcccgagttggcccccattgcagcccccaccctgtgggtagtcttccagaagtgatgcagtggtgtgagatgccctacaccttgttatttgggagactttgagagtcattcacttccatggtgactagtgtttgttttgcctgattttatattctgtgttgcatttctccccactccctgccctgctttaataaacagcaaaccaatatctaggaagaatgactgagggatagtattgggtattggccccatggcaggaacagccacttgcatctggtcccggtgccacactgcggtgcttggtgtggttgtggagcctgtccctgcgcgccttgctcccgttgagccacgctgtctggtgggtgattctctgccctgagccaccaccctggactggcccagtctccagagctggcacaccctgcctgttttctctttttagacacaacagccgcagtttggccagccactaagtcccaccagctgaggtccgaggaaagcggggtgactcatttcccttgtccagggcccgaggagagtgaggtgtccagcctgcaaagctattccagctccttggtgttggtttgcaataaattggtatttaagcagttctgggtctgcgtgtgacatttgctgctgagacagttctgtctgtgcatggtcattattgttgcattctagccttgaggtcccaggccaacgtacacagcaaacaccagcatggggaattcttaggggttgtttcccatctggtctgaatgcactgggcaagatctcaatacagctttagaaatcctgtaagattttgaccagtggggag

SEQ ID NO: 5030 - DNA, 1297 bp, Homo sapiens
tgggaacggcgaagcgcccactccaagacttctgctagtgggtggccagaaagaagccatcctctctcccttcctgactcaaattgtacaactgctcaaaggaagaaaaagaagccagaggttcctctgcatcagccagaggccaatcaccctgatccaggctgccaagttagaacccaagctcccagatcaagggacaagtcagaggtggagctctttgatcaaggggcaggtcagagatcaaggtccccattgaggcccggcagggacgaggcaaaagactggggcaggctggcaatcttaaaccccatttgccccaagcccctaaaaaaaaaaagtattccataaatacttgctgaatccaagaaccaaacctagtacttagcttatactgaaagctttaattatactatctcatttaatccttacaacagccctttaattgttatcaccctattgtatataagaaaaaaactaagacctcagtaaaaaaaaaaaaaagaaaagaaaaggctctcttcctcggcgctgcctacggaggtggcagccatctcctcctcggcatcatggccgccctcagaccccttgtgaagcccaagatcgtcaaaaagagaaccaagaagttcatccagcaccagtcagaccaatatgtcaaaattaagcgtaactggcggaaacccagaggcactgacaacagggttcgtagaagattcaagggccagatcttgatgcccaacattggttatgggagcaacaaaaaaacaaagcacatgctgcccagtggcttccggaagttcctggtccacaacatcaaggagctggaagtgctgctgatgtgcaacaaatcttactgtgccgagatcgctcacaatgtttcctccaagaaccgcaaagccatcgtggaaacagctgcccaactggccatcagagtcaccaaccccaatgccaggctgcgcagcgaagaaaatgagtagacagctcgtgtgcacgttttctgtttaaataaatgtaaaaactgcaaaaaaaaaaaaaaaaaaaaagaaaagaaaactaaggcccagggagacgaaagaatttgtttgttcaatgccagacagcttatcagtgtcagagctagcaactgaatgcccggtctctagactccaagattcatactcttattccataacataatttttttaaaagggggaaaaagactagaatcaggaagtaaaaagataaatgtaacagtttcagagattaaaggagcaaaccacaaggcaagagacaggtatcctccttgctcatccactgggag

SEQ ID NO: 5031 - DNA, 1160 bp, Homo sapiens
atcccagctattcaggaagctaaggcaggagaatcgcttgaacccgggaggaggttgcagtgagcagaaatcgagccactgcactccagcctggggggcagagggagactctgtctcagaaaaaaaaaaaaaaatgcaatttagttctctaggcttttccatttaatagttttatatcctcctgtttctaaatctggatgacagtgtaacactccagtaaggtgaattgtgaattgctgaaattcttcagatgtttaaaagagttttcagtattcctcatgttagaattaatgcagagaaaaattttatcctttgaactagttacatgttgtggacttctggcctgaggctcttggggattatgtgacatattgggaagggacacatttctgctctgtggctgttactagaaatctagccagcaaatcagactacgtttgtgagaagacaggaaggcacagattagggttgagccagccttcaacaggtttggctggcagtagacacagtggagcacatcttaactattttggtaggtcctgggtttctcttggtagtttttgatagaaaggggaatggtgtgaggaaaaagtgggcatacatttcacctttccactgataaggcaggtggaattgggatagtcagtggatgggccaatagctggtggctgtgagaagaataaggatttccatactggtgtgtcatatttacagataggttgtgacctaaaaagttttttaaaaaacagcagttagggcctgggcgcggtggctcacgcctgtaatcccagcactttgggaggccgaggcgggcggatcacaaggtcaggagatcgagaccatcctggctaacaacggtgaaaccctgtctctactaaaaatacaaaaaattagccgggcgtggtggcaggtgcctgtagtcccagctactcgggaggctgaggcaagagaatggcgtgaactcgggaggtggagcttgcagtgagctgagatcatgccactgcactccagcctgggcgacagagtgagactccttctaaaaaacaaaaacaaaaccaaaacagtagttagggtacacacacacaaattctagtgattttccccccaatactacccttgacttttgaaattcttgctttctcagagtttacaacatcctt

SEQ ID NO: 5032 - DNA, 1666 bp, Homo sapiens
ttaacagttgaagatcatcctattcctatccccagtaaaaataggcctttccacaatcttctaccagttaacttagctttttttttttttttttcctttaatagagtctcattcttgtcacccagactggagtgcgatggcacgatcttggctcactgcaaccctccctcccgggttccagcgattctcctgcctcagcctcccaagtagctgggattacaggcgcacgccaccatgcccagctaatttttgtatttttagtagacgtggggtttcaccatgttggccagactggtctcaaactcctgacctcaggcgatccgcccgtctaagccttccaaagtgctgggattactggcaggaaccaccaggcccagccaaccagcatttcttaaggtgaaaatacatggtgttaatttatattttgagtgagacccagtccagctgctataactgcttggacacttggcagaggacagagtactgcaaaagtgtctaagggagacagcattttgccttgggtgctgtagatgtacaagagaggttccaggagggggtgataggcagaattttggtccccatcaccttccctgcccagtgttatgcctatgaatgtgttacattatgtggtaaaagggactttgcagatgtaactaaaatttctaaaatagagatattatcctggattacctgggggaacccagtgtaattacatgaacccttaaaaatggaagaggatgcaggagtcagattcaaaggaaggcccaaggtgctattgctgacttgaagatagaggggccatgtggaaatcaagagaaggaagtgaatccttccagtgagcttggaagaaagcaccttgaggcacagatgagaagcttggccttacctgatgccttgattttagcctggtgagaccctgagcatataaatttgctgtgctatgccacacttctcacctacagaaacttagtttaaagccactaagtttgtggtaatttgttggctttaggcccctgagggtagagatttatggcttgtgttacaagtagagagcagtggagagttgggctttgtaattctttcaagggtgattgtagttctggagtcctatctacctgggttcagatctttgttggccagtccctggctgtgtgacttcactgctttaagcctctgtcttcatccttaaagtggtgatgatagtacctacctcactctgatctctgaatgagaacacatgtaagacacttagcacagttcctggtgctcaaagagttccaacacctgaaagcaccatggccctgtttgtttttcagtcaagatttctaaaagccgttattaccagaggttcagtgagaacatgggcagggtaaactcaaaatggagaacataaaaactgggactcccagaccagtcacttagaagactgctgcaggaagtaccaaggtcgttaagaatcagtaataataataagtaatgtgtgaatccattagaatgttgagaagtagacctttgacatttcagaaaaatgtatatctcagacacagccatatgtattgttatccctgagttggaagagcatcacagggcatagtttcacaaaagcttcaaaaaatatactaattgctggtaatatgtgaactaacagaaaaaaatagccatgtta

SEQ ID NO: 5033 - DNA, 1162 bp, Homo sapiens
gctggcattacaggtgcctgccaccatgcctggctaatgtttgtttgttcttttgtttttgtttctgagacaggatctcactctgttgcctaggctggagtccaatagcctaatcttggctcactgcaacctcagcctcccaggcaactgggactacaggcatgcgccaccatgcccagctaatctgtgtgtgttttttgtttgtttgtttatttgtgtagtagagatggggtttcaccatgttggccaggctggtctcaaactcctgacctcaagtgatccacccgcctcagcctcccaaagtgctgggattacaggcatgagccactgtgcctggcgtagaaagtatttcttataattaaaaacaacacccagtctaactagtataacacctaaaaaattgtcagatctgtattttagatagtacgacacagtgaaatgcaatggcacttaagcagagagaagaaggatttttctttttctttttttaaatagaaggtgttagaacctgaactgggcctggtttgcatttgggaagagtccagtggggaaacaacacaaataaggtcttgagaatgaagaattgcatttatatagggagttgtaacaaatggcctggagagtatctgactctttatgaaacatttaatgagaaatgtgacttgctttggtgcctatggttgaatttgttgcgatgcttctgacattatgaaaattttcaaacatgcaaaaaagttccagtagttatccagtgaattcttatactcaccacctatatctatagttaacattttacttgtattttatccagttatcagctcatctatgagatggcccttatttatttgcctgctgtttttattctctatttgtcctgttatttcttgttagagaagagaaggtgttcttagatcagaagatgccattgtattaggtgacggcaaggttttgctgatttagtggaacaagattctactgggatgtgtgctgagctgaaccaaggaactgcccgaatgtgctgaacaaggacatttgcttctcagatacgtgaattcaattttaagcaagattcttgatctgcttcagagcagctttgatttaaagtaatttcagagcgcttttccttgcatgagtaattttctgaatgtataaaatattctat

SEQ ID NO: 5034 - DNA, 1092 bp, Homo sapiens
ctcaggcccaagcaatcctcttacctcagccctgcaaatagctgggaccacaggcacatgccaccatacctggctaattttttttatttatgtaagagacagaggtctccctatgttgcccaggttggtattgaactcctggctcaagccatcctcccaccttggcctcccaaagtactgggattataggcataagccaccatgccctgcgctaagtaactgttacttgagttaatgtactagttaattgacccttagaaaattatatttttctgcttgcaagtcttcattaaagaaggaaattttaaaatattttatagtataatgctatccaaactcatttttaaaaacattttattatggaaattttcacaaatgcacaaaaagaatagcagaatgaagctctgtgtacccatcctccaacagctgtcctgtggtcagtcttgtttacctgcatccccacctatcccctgccccaacccacagggatcagtttgagtcccattaacaggcatagtattttcatgtctgtgtgatcagagacattcaaatataactccaaagatagggtacttttttgaacataaccacaataccattgtgtaagactgctaaaacattttttgatgccaagtaccagtcaatattcaaacttcctgattgtctcgtaagttttttttaacagttggtttattcgagtcaagatccaggcaagatctagatcttgcattttgttaatataatctatagatttaactttcctgtttttaatttttgaagaaactaagttgtttgtcctatagaattgtccttcagtggattttactgaatgtatcctaatgggatcatgtacaccttttctgtcccctatatgttctataaactgacagatctagagggcttctgttgttctgttttgctttttcacaaaaataattcataggtgatatatgctccatgttgtatcacatcatggcacataatggctctcatcttgtaacattaagattgatagtgggtttggatgctgccagcccactccattcattacaaaagttctctatcagcttttcccctgatggatttagccat

SEQ ID NO: 5035 - DNA, 1224 bp, Homo sapiens
cttactgtcacagcaactcctttgcaagatgccccggtaaatcacgttgcagagaccccaactctgccttcctggaactaggcctgcgttttctctgaaccattatttcatggggaaaatgaaatctacttcatgtgcctggtctacttactccttcagaagtgatttctgagccgtaagatacatgagaaaaaaatgaaggggaaaaggcagtatttatattaactacatgatgataaggatgtttctggtcacagtgaaaagccatgctagaattgtagtgtcatagaataatgtggaagtttagttcgtgttgtctgatctatttaataatttaataaggttatctcttccaagacaccttcccttcttcctcagccagaaaggatctttccctgagagtcattagtagctctgggctcctggaaccaagctcaggtgcctaattgaactctggtctcttcccacagcccccagcagggactggtgcttagtgagagtggactgccagattccttgagtgtgggggatttgggtgaatgagggtagcaagcctccagcgtgcttgggtctgcggtgaccctatgcattccttcagtgcttgctagaacagttttgaaacggtttgaggccttgccctgctccatccagagcaaggttatagaaatttcagacaatgacttcctccctcctggatctagtgtcctgggccttgtatagatccgtgccatctaatgtggtagccacttggcacacatgattaaattaaatttggagttttatttcattttcacactagccacatttcagatgatcagtagccacaggtggccagtggctaccatattggaccgcacagattagagggcatttctgtcgctgtggaagttgttttggacaatgctggtgtgaaaggtgaagggaatcctgagtgtttgctgtgctccaggctcagtacaaattttattttattatacacttaaagcaaaagtcttataaaagttgaggatgaagccaagagtggtggtaagggtaggagttgaaacagtgaagaggaataacagggaagagtcctgccctgagagactcatggaataggatatttacaaggcaaagcaaagagaaccaaagtctcagttctgcagaggagctgagtgccccaggagctagtggagggtgaggtcaatgtgtgctcatcttaaaggaaaaactcatggaagagga

SEQ ID NO: 5036 - DNA, 1224 bp, Homo sapiens; identical to SEQ ID NO: 5035

SEQ ID NO: 5037 - DNA, 1123 bp, Homo sapiens
gtaggctggccatcccacaggctgggaagcgtagcctttggcagagcctgaaaggtaggcacttcagaggaggaggggttggaacaggaatttgtgctgaatgggtttgtgctgaccaagtatatacatattcaacaggttataggaggagttatgaatattcatggagggggtcctgatgcatgtgtactgaacagacatgcaatttattttattttatttattttttttgagacagtttcactcttgttgcccaggctggagtgcaatggcgcgatcttggctcactgcaacctctgcctcccgggttcaagcgattctcctgtctcagcctcctgagtagctgggattactggcgcatgccaccaggcctggctaatttttgtatttttagtagagacggggtttcattatattggtcaggctggtcttgaactcctgacctcaggtgatccacccgcctcagcctcccaaagtgctggattacaggcatgagccactgtgcctggcccaaacatgcatcttttttttttgagatggagtcttgctctgttgcccaggctggagtgcagtggcgcgatcctggctcactgcaacctccgcctcccaggttcaagcgattctcctgcctcagcctcccaagtagctgggattacaggcgcctaccaccacgcctggctaatttttgtatttttggtagagacagggtttcaccatgttgaccaggctgatctctaactcctggcctcaagtgatctgactgtctcggccttccaaagtgctaggattacaggcgtgagccacctcgcttggctaattttttttgtatttttaggagcgacagggtttcaccatgttagccaggatggtctcgatctcctgacctcgtgatccacctgcctcggcctcccaaagtgctgagattacaggcgtgagccactgcatctggcccaaacattcatttttaaaagaacttttaggttcaggggtacatgtgcaggtttgttatataggtaaacatctgtcatggggatttggtgtatagattatttcatcacccaggtactaagcgtagtatctgacagttattttttccagacaggcatgttctttgcattccatg

SEQ ID NO: 5038 - DNA, 1694 bp, Homo sapiens
gaaattgaagattcccacacattagtgaccgtcatgatgaaggtgggacacctctcggagccactaatgaaccgcctggaagacaaggtactgggcctgaaagcaggtggcacccagcctgcctcccctgggctttgggcttgttctttgggtgacagttgtctgcagaggggtgcgttgtgtgcactgggatcagagccctgggagcttctgtctggagcctcaggcatcacatggggcaggaccagagggctcggagctgcaacaggtggttgccctgtggctgcattcatcaagcaccacttgctcctcccaacacaggcgcttccctgattgcacctttatctttcccccaaaccccatcacagcacgatcttgagaggggggcatggcaggcagctcctgaagtaacacagctactgcccaggcctggcttctggctagaactctcctggagatgtgctaacccctatcggctgtagccctgcagtcaagtcaaattcagtgcccgtttctgtcatagcgggggctggcccagatggctgccacagcaagctccacagctcatgggccctgggtcacctaccctgggacctggggataagtttggctgtggacagtgctccaggtccaggggttccctggggtggatgaggaggcaggccctgcacagtggtcctgtgtttagtcagctcaggcccagtctgacaggggctgtcacaggggctgcactggatgggaccatgggacccctgcccccagctcatctctgccaccccaggccattgagctgacctctgcgcggctgtggttgacagtgcctggagttggtggagcactttggccccaatgagctgcggaaggtgctggtgatgctggcagctcagagccggcggtccgtgcccttgctgcgggccatctcctaccacctggtgcagaagcccttctctctgacgaaagatgtgctcttggacgtggcctatgcctatggtgagccctttggacagaacggtggagagaggggagcgctggccctgcagatgcctgcagccgtgtcaaattcagtacctgtcctatgcatggtaggcactggcccagaaggctgccacagaaacactgtgactcatgggccctgttcctgtgtcccaggctcagggataaatttggttacagacatcaaatatctagacctcgaggctgaggtggggtggagctgctgggtgattgctgactctctccagctaaaccctgtgatctgctctgtcctgaaggcaaactcagctttcaccagacccaggtgtcccagcgcctggccaccgacctgctatccctcatgcccagcctgacttctggtgaggtggcccactgtgccaagtccttcgccttactcaagtggctcagcctgcccctgtttgaggcctttgcccaggtgagccagggcctggccccaactcagagaagctggcttcctggccatctgctgggaaccattgccttagtcgggaaagtaaagccagtctgaaaatgctcacttgtgggggcaaatacatatttcttgcattttggcttattttgaaagggctgctattcagttctcaaaaaagtgtttgagaactgtttcctctgttctttcactgaccattataagtgcttccatccattttggggtagctgtagcaggtagcagcatggct

SEQ ID NO: 5039 - DNA, 1694 bp, Homo sapiens; identical to SEQ ID NO: 5038

SEQ ID NO: 5040 - DNA, 1694 bp, Homo sapiens; identical to SEQ ID NO: 5038

SEQ ID NO: 5041 - DNA, 1196 bp, Homo sapiens
atcaagctgtgggcagggctgggctctcctgagacctcgttcctgggctacagacagccgccttccctctgtgccctcacagagtcttcccgctggctgtgtctgtgtcctcatctcccttcttataaggacaccaggcagattggattagtgcccaccccgatggcctcattttaacttaattgcctctgtaaagaccctgttttcaattagtcacatcccgaggtcctgggggttagggctttatgcattttgggggacacagtttggccttgacactaggcctggttactcctcatcccctgacatgctgtctcacagccgcccggacagggtgaggacgagctcctgcccggctgactccctgtgtccctggccctgcgctgtgggtttggcccgggcggcgtggcttttggagagctcttgctatgctctccgggcggcctaggccctctttgtgtgtgtgggatgtcaggctccacatgttgcctccttctctccctgcagctcggtgccaatgccttgctcttcgtcggtgtgaacatgtatggggtctttgtgcggattctgactgagcgttcacagaggaaggcgttcctgcaggcccggagctgcattgaggaccgactgaggctggaggatgagaacgagaagcaggtcagtggcttgggccagtcagcctagaggggttggctgtggggctggggaggtggaagaagctggcttcctgagcctcagtttaccccgtggtgacatgggccacaattcccattggtacatgttggtatttgaggctgtggaggagatgccctgaggttttatagttagcaaatggacaggcaggctgagtttgctgcccatgggatagtgttgggatggggctgctttggggacagcatttgggcgcacggacttccggttgcagctggaataggtcagctgcccagggaggacgaggcaggtcctggctgggcctcggatgaatgtgaccgtgcaggtggccctgatccactggcctgaggcttccaccagctctgcccttggctcagtgtggccgaccccagagcacgctggcacttctggaaggcagagatgcccttttgctgggagttgtagaggggtcacagtggtcatgatacagcacccacagcccttggggttcctccagtggccggcatcaccccattttcaggatg

SEQ ID NO: 5042 - DNA, 1210 bp, Homo sapiens
gggagtgtgccctgtgggtggggaggtcagaagccccagggacacccagatgggtgagaggtccacccttcctggggagaagcagctgctggggggaatctagcacattccagagggctgtccgtgatggtctgcatggcggttaagggaggtgccgtgggaataaagggagttggggaagatgccccatggagatggcattccagccggaccttgaatgatcatcctgtagggttggctcagtgaagcagacaggagggatggacccccgaaggggaaagaggccatgagcgaggtatggggaaagggagaaggagatcaatgtgagcctggtcccagccctcaagactgtgctgaccacgcaagggtgtggcctgggcgggaaggtggtggcccaggtgcagcatgtcttgccagcgctctgtggccaccagtgtctagaggtggtggagccagcagtggcgctcacagcctctgtagcgctgtctcttaccatgtgccttgcccttccctgaaggagaaccactgtcgccgcatcaagattctcggggactgctactactgcgtgtcgggcctcacccagcccaagactgaccatgcccactgctgtgtggagatgggactcgacatgattgataccatcacgtaagtaccccgtggggctgagaggagtggcctggggcatctacacattgaaatcctagaagctgagccaccttctgccccatgtgggctcccctctcagggtctcgctttgtcctgatgggtctgtctgaggctgcagagaatgatgccagcattaggaggatgctgggttcaggaaagcatgaaaggatgcttccgtgattccctgcctttacatttcgtgtgtggctgtatttctttgtccacaggaatcctgcatattgtcaggtatgcatgagtcatacaaaaataaattagtctttagcttagccagataagacatacagaaaggtttggccccaatctagctgaattctctattaaaaggaagtaaatatgtgtgtttctcttcactcagcaaggtaactgggtctcagatgctctctgtgtggggagacaggcttgggatcggggcaggtgagtcttcatggaatgaatattacacctgtgaggccaggcctgcccatttcttggtcagtcttatgttgtcattgtccttatcagagactgggatgaagacacagat

SEQ ID NO: 5043 - DNA, 1199 bp, Homo sapiens
tattaatagctccctctttctctctctggagtatcccattttagataatagatttaaaatgtacactatttttatagccacttttatatgaaatggttatatttagactctgagatatgagtaaagtgaatgtaagctgatatggacaggaaccttccctgtcttattcatcagtgtcaccctacatttaatacaatgcttagagtaaatatttgctgaatgaatatctagggcagagtctgcattttctggggtgttgagtgttaaatttttttctccttatattcatatagtaagaaactctaccttactttattatttcatcaatcgtattactttatagactagttggtggaccagataattagtaaataagatatgaattgctaatgcaacagatgttgggtgcagaacaggtcactggccattcagtgatcagggctcagaagacagcagcctcaaccatggtgtctgcggcattgataccactggggctggggcaaaccatgggggaagcagccctggaagatgtccagagagaggcaacacctgaagttctacaggggctatctggccagaatccgaaaggtttcagagtattgtccaggtggaaggatgtgagcaccctgcagagctcgtggggcagagctctgaacaggctctatcttggtgggaaaaaagagggcaggtgagaaaccaagagcagagcccaatcctcagattaaatcaaagagcagaatgctaggggatggggcgggcaacatccccgtgtgacatagaccctggtgcccaccctctgagatcccatcacaaatctgtaagactccagttaggttagagtccctgcacagcagcttgatatgaatgtcattctacggaactgtgggcattcagtgatctcaccccagccagtgttggtgcctgggaacaggtaggtagaggctacaggtagggaacaagcagcaccatccacaggggcggtgggaggcacaggcagggtctccaaaacattgccaatgcctcctagccttgttctgctagcaggagagggagagagggaggaacataatggcacctgcatgtttcaagaattttgtatatttgtattgcttaatctttacaatagcagcgagactggcattcttagccatagttcacaatgaaagttcctcagacccagcatggcacagccacctagc

SEQ ID NO: 5044 - DNA, 1099 bp, Homo sapiens
cttcaggttgggtgggggcttcctactgcctctctagatctagacctttgggtccacctgtatacacttatccagcatttcttgattctaggcctgatgtagccggagaaggagagtctgataggtgctgccttttccacgtggtggttttacctgatcccaaaagtatagcctgatgaatttcaatctcaactttggcctagatgcctctgcttacctggagcctggtacacctgtgctgaagaaacttggaatttttcttccggtagtccttgctactggggtagaatgtgcacttttctactttataatcccctctatgtcaaaattattattttattaaatttaagaataacatccatagcaggaatattataaatgcattgaatgaaaattaatttgcatgcagttacaaattacaaactagaggttctttgctataagggaatactccatggcagagccctcatgcagtaggtttaattcaatctatgttctcaggagtgagttggcccctaaggggatactcacctgtatctattgttctgacctagttgtatttctgcattgatatgctacaaaaagggatctctttggagcaaggagaataccgagcctgaaatgcctgggtgagagaattggagaaggtttagagagcttcacactcagggaaaaaaaaaaaaaaaaaaaaaaaaaaaagagaaaagaagaaaaaagcagagtgtgaaagtccaagggcttctgtgcatgttattagaaatgtgcatgtagcttggagtcttgaggctggacctagacatctctctgccttgcagatgctcttcctgagtttgctaccatcctttttctttctgctttgctgtggtgacattcagacatcagacaataaatggggtctgtgcacattaggggcagtgggtgggtgaaggctggaggaggctgtgtctcttctggtagagcagtcagcggaaacctaagtgaagaaaggaaagaagtctgtacccttgagccctgtcacacgttagaaaatggagacgggcttgagctgagcactccttgtcagaccccttcaggtgttactcacacaatgcaggggttc

SEQ ID NO: 5045 - DNA, 1201 bp, Homo sapiens
ccagtctttctaaagatcatgaccactaatgaatgattatacagtaagtcctcacttaccatcatcaataggttaggtttttggaaaccgcagctttatgcagaacaatagataatgaaagcagttttaccataggccaactgataaaaatgagttaagttcctagcatatatttctggtcaccaaaacatcgaaataaagaccaaaacacttctaaataaagaccaaacactactaatattaaacattgaaataaatacgagctatacatacatttaagaaagattaataaaagcaagtaatgtgatgatttacccagtttttccagttcagggtcacaggtggccgcagcctaccgtggcagcacagggggcaaggtagaagccagccctggactggcccccatcccattgcaggtgcacttatactcacccacatggggacaattcggacaccccagtgaccctaacatgtgcagtctggggacatgggaggacatgagcgcagccagagaaaacccatgcagacctgccgagaaggtgtaatctgcacagacagtagccccggcctgggataataagatgacgctgaacgaaagtcgttggaggacctgccattatcagcctgtaggctgaaaacagatgggaatctcagcaatcagactcgctctaacagcccacgctcagaggctccggctgtccatgctctgtcaggctttccctgcctcatcacgcctctccatgaagctcctgagtgaatgaatactgttattcttatccccgttttacagatgagaagccatagcctgtaagcactgatttgctggaggccacagttgaatccgcacagtgtcatgtaattgttttggggggttgtgttgttgttgttgttgttgttgttgttgttgttttgagacatggtcttgctctgtcacccaggttggagtgcattagtgcaatcatagttcactgcagcctcgatttcccaggctcaagcagtcctcctgcctcagcctcccaagtagctaggactacaagaacgctctaccatgcctggataatttttaaaactttttgtagagacagacagggtctcgctttgttgctgaggctggtctcacattcctgggctcaagtgatcctcccacctcggcctcccaaagtgctgggattacagatgcgagtcacggtacccataattg

SEQ ID NO: 5046 - DNA, 1152 bp, Homo sapiens
atatgtggggcctgcccagtgtcaccattatcaagatgggatacactgaaattgagggcatcacaaagccatatggtctgttttcctctggagttctacaagtaacttagactgtttttcaagaggtaagaaataaatgacttgcctaccagctgcttcgtgtctcggcttgtaaggaccttaggtttcataccaaatccaaataattttatgtggcaacctgaaagaccaaccatgagggaagtgatgcttatgatatggttcttacaggaggcagaatcatatctgttggatcaataggccctttccacagctggcatacaaaaagactaaatggaaaggaagaaaacaataacaatatgctttggctgatagaacgcttgctatgcagtgttaaatctccaggggctggaaaatgaatgataatggcagatatttatttcaccgcaagtgtgcgttcacattttgccatttattttccccccgcagtttattgctgtgcgtcattccctactcaggccaagcgcttctgatggacgggcctcttcctgacctcggacctttcccagtgtctcttctgccctggctctgattttcctgttgttcttcctcctttcaggataaaagggctcattgtatacccagaatttacttcctttggggtttacatataaatgcattaataacagagatttgtttgattgaggtttatatttttttgaaggaggtaaattatatgcaaattttaggttgataatattcacctgtctgaaattcactgatacttggaaatgttcctgtgaagaactctgctttattttaattcattattaattcatgtttttcttattggatattcagttccagaatttattgccaatttttcttaaaactagattgtatccataaattgaccagtatagtcaatttggatagaactgaaactttctgtctacctggtaaaactaagtgcctaaaaacatgaactataaatgtagttactaggaactcacaacttatatatactatccattcaatgatacataggacccaatgtctttgtgtttttgaggttttcctgttactgtgtactttgccattttacatagttcactaaaaagaaagaagtgggagaagaagggtgttctattc

SEQ ID NO: 5047 - DNA, 1256 bp, Homo sapiens
tttttctgtaaacagaaagtaaatattttggaatttgcataccgtaaagtcttaatgtctctgtcacatattctatttttatttatttttaactttaaaatgtttccaaaaattctcaagtcatgaagagtacaaaaaaagataataggattctgttcaggatttggcctgtttggaagcaaaactttatgtccttccttcccatgggcatccagtgttgagaaccactactgcagaagggtggccccaagaccaaagaacaaaatttagtagttgaaaagtggtgtgtctacaacagaagtaaaatgttgctttgtacctggtgtcttttattaagaatttactccccccatttctcacagagaataacagtcaggagtcattgtcacaatataatagaaatgttagcaaccagattcatgtaaggactaagtggtcctcatgaattgcattaagactgtattgctcatattacactccatcctctctgtagtttgctgggtagcggagggggtaagctaaatcatagtttctgacaataactgggaaggctttttcttaagtaacaatggaattggtttaattgggattgaaaactaaaacttggaactaagatagagaagatgtagtgtgtgtagaagggctgttaaaaatgtaaaacttggttgcattatttgtggaggctcaaacttgtgaaggctaaataccataatttttccatttgttctgcattttgattctgaaaagaaagctggctttgcccatttcttactaaaaaaacttgtaaatccaaaaaaaaaaaagttgtgtgtctatagaactgttctttacattcttatagttctttcaagtattctaatatagaccgctagggtataaacctgcctgtcttcctttacgataccatacacaaaaatatttctaacacatagtgtttgacatacatacacacacttatttataaacctatgaagtggacttgcaccttttaaggactattttctttctgggcatttccactgagagtgtaagtaataaatatttatactgccttttggaaatagagcaagatttgattgtgaaaagtgtacttctatggatacttggttcatgctaaggggaatagtgttcctcaaataccacggtagaatgatctctacgtaaaggcaacacatttgcccctacaatgtaaagtttagtctttataatttatagccacaaccctttgatttgctgactgtttttatgaaaaggat

SEQ ID NO: 5048 - DNA, 1218 bp, Homo sapiens
gataaacacaaataagccttttctgaaaagaaagaattggcattccagcctgaattttaggtatgcaaacctttggagcaaaatatgctgtatgttaacatagagaatttccaaaaagcaaaggggaataagtccaacaatgggcatagattagagcaaattcatattaaatttcttttgaaatactgaagttcatttttgttccagttcattgtctcgaattcttaccaaatgattttggagagaattgaattgatagaattgattattagaaaaatgagttgaaaacaaactatttagaacctacctctgttttttatgcataaaaaacagtatcagaatataatgaatataaggctaatgaagaatgcatgtgtaagacttgcttcagcaaagctaaggaatgttaagacaaaatttctcctaccaagtctgaggagcaagagattaaaggatctgaggagcaagagattaaaggatctgaggtgcaagagattaaaggagagaatcccttctaggtcttttggctaagatcaagtgtagaatctgcttttatcagtttaatatctggtacttcctctatcccaggacaatatattaagtggatttttggagcagggagatggttgaaaataatatacatatgcttaatgttgaccgtttgatcctgctaatcagatgttctgcataaaactggtaattgggtaacaattttccataaattgaaatgagaaatgttagaaacacacaaccagttaacagtaagtggcacaacaaaaacagcaaaagcccacatctaagcagcaagctgccatgctggggtgtaacaagctttgcctatgagctccttttcacttaccaactaacacagctgttgccaggtgcttgtttgcaataacgtctctccacttactgctgtccttccttctggacagtttgctttagcatttgctctgcctttatgtaactcagtttataatactgggcaaaaacaaggactctgtcagaaagtcaaagtggaagcagttttaggactagtgcagtaaacagtagagaatggctcctaataagtgggcacagcaaagcctctcctagtgaaagtcactgtccaaaaacattttctatttgcctgcacttggtgcacacatgtttttcagtatctaggtgagatcgtgatgttccgtgaatcatattcagaatatcaatgtaagttttctg

SEQ ID NO: 5049 - DNA, 1099 bp, Homo sapiens
gtctaagcgggaagatgcggctatacactggactttacgtgtctgggccatctcttcccttggcatttgggaaaagttcacttctcctataggagggagcagagaaacttggctgactgtttcagggcaaatgaaggaaccaaatgtctacggaacctggtaatattaggcagtcttccattcaagtcctatttggacactgtctctctgaaattttaagaacagaaaagctctcagaaccttcctgccaccatgttcgcacctcactgctccagcctctggggcacattctatcctttcagcctgcgactagcagcaaaaaaaattacatattttcttgctccatacataccttgaggtgagcaaaaaaattaaattttaaccatgaaggaaattgtgcacatccaagccagtcactgtggcaaccagatcagtgccaagttctgggaggtgatcagtgatgaacatggcatcaacccaccggcacctaccacagggacagcgccctgcagctggaccgcatctccgtgtactactatgaagccacaggtggcaaatatgttcctcatgcgatcctggtggatctagaacctgggaccatggactctgttcactcaggtccttttggccagatctttagaccagacaactttgcttctgatcagtctggggcaggcaacaactgggccaaatgccactacacagagggggctgagctggtttattcggtcctggatttggtatggaaggaggcggagagctgtgactgccttcagggcttccagctgacccactcacttgactgggacacaggctctggaatcggcactctccttatgagcaagatccaagaagagtaccctgattgcttcatgaataccttcagtgtggtaccttcacacaaggtatctgacaccgtggttgagccctacaatgccaccctctccgtccatcagttggtagagaacactgatgagacctattgtattgacaatgaggccctctaggatatctgcttccgcaatctgaagctgaccacaccaacctactgggatctgaactacctcgtcttagccaccatgagtggtgtcaccacctg

SEQ ID NO: 5050 - DNA, 1211 bp, Homo sapiens
actggctgttccactctgcagtaaagtgcttttaagtagtccttctgtatcattttcccatttctccatttctagtcccagtatttcacccacattctcctgtcagaattgagattatggctggtcatggtggctcacgcctgtaatcctagcactttaggaggccgaggcagatggatcacctgaggtcaggagtacgagaccagcctggccaacatggtgaaacccagtctctactaaaaatacaaaaaattagccaggcatgctggcactcgcctgtaggcccagctacttgggaggctgaggcaagagaattgcttaaacctgggagcggaggttgcagtgagccaagatcgcgccactgcactccagcctgggtaacagagcgaaactccatctcaaaaataaaaaaacaatttagattatatttttgtttattagtgtcatgctgtcattttacttaaatatttcaaaacctggatctgttggctttatactctcttctttaaagcattcccttaaatatgggatttcttgaccaaaaaaaaaaaaaatcccaaccaccttagtttcctatttctggcataccacctacgatgttctgcctggctgttttaacaaggagtggactgctgactgtacaccagatgctgagttaggtagtttctactctggtccatgacaccaggtgaacctaccccatctctgtgagttcccactctggctctttgctctggtacctggcttcatcgtttggacttggttttctgtcattcaaactcttcggctttttcaagttgactttgacttggctatccttcttgcttttaatgctctaagtgatcttaggtagaaaaccttgttcctggccgggcacagtggcttacgcctgtaatctcaacactttgggaggccgaggcgggcagatcacgaggtcaagagatcgagaccatcctggccaacatggtgaaaccctgtctctactaaaaatacaaaaattagccaggcgtggtgacgtgcgcctgtagtcctagctacctgggaggctgaagcaagataatcgcttgaacctgggaggcagaggttgcagtgagccgagattgcaccactgcacttcagcctggcaacagagcaagactccatctcaaaaaagaaaagggaagaaaagaaaaccttgttcctgttttagcctcactgagatctcttagcct

SEQ ID NO: 5051 - DNA, 1166 bp, Homo sapiens
aatccctctttccctgtcctcgattttcattgatcccatgttatttctgaacattcatgagtcacgcatcagatacatttaatatcagatcctaatttaaaaagtaaatgctactcttccaaaagtacacatgatgtggtcactatactgggtcataaagatgtatgggttttcagttagttagacttagaccgttttggaacttttctctgttaaccatttatgtatccctggtcgtatggagctccagtggtgcagtcggttagcacatggtacttacatacccttggtcctgtagccccagcatctggtggtgatcactagctaaatatcagagtcagcaaatagtgtgaacaggttccatttcttgcccttgatccccttttgcatccattgttgaatctgtatgatactttttcatcataatttttctattcaaaaagtgtgcaggttttagcttttctcttggtgtaaaacagttacactcttccctttgcctttccctgtacattagaatctataccataggaaagcttccatggaaccaagctccactctgacacccctgttaaattcatacactgccgtgacctgtcatggctttgtccctgtccctgcacaatgcgcgggaatgaattggttggtgtgttcggtgcgagactacgtgacacccctcccatccccttggcccattgaattgagtagaacataatttatgcttcgcattgtatctttaatttttattcttctgccatgttgatgcccttggggagtattggaggttggagtcgcttccagactatgttgtgttccagctgtcttcttgctccttcctgaaggccagcttgttctctgctcctgttacctctgcctgctggtactgcttgtgttgtctgcctctgtcttgaacattactttcctccctttccatcttccttatttcttctgtgttcttttctactattccccgtctctcattcttctgtctttggaaccaacagaatgttttttggtgatgtcgttttttttcccctcaaatggaaaatagtagacccatagctcccaaaatcctgggacctttggtttttctttatcatcattatactgattgaacaactcttctagatagttggggtatcagaaacctaagcttctgatcagcaggg

SEQ ID NO: 5052 - DNA, 1179 bp, Homo sapiens
ctttgctttccaccctcccttcactagcaggtgtttgtcaatagggagaaatttaaaagccacacatcattaagaaagaaattcttttgtatagattcccagacaaatataaataggttttgaattatctgctcttttgtagtctgcatgctacttctattgatgtgccatcaaacactgttagaagaatctaaaaatatagcaaattaaatttgtttgcattgccacctaaataattaggatgaccaagtaatttgtcatctaaacctggacacttttgagaatgaaaaggaatgctgttaatgattatgcaagctcaacagatgtaaactgggactgtctcaggccaactgggacctgttgattaccctattatagtattctgtaggaacatcaatgttactgaaatgggcttatatgtaagtatcagaagatttcatgagcacatttttttcactcaaaggaatttttggaatttcgtaaggcaagaagtgacatgcttctctccaggaagaatcagctcctgttggagttcagtttctggaatgagcctgtgccaagatccggacctaatatatatgaactcaggtcttaccaactccgagtaagtacagaaatataagttattccttttactcctctgtgaaaaagcacaagcattttgtaaggctgacaacagaacttgtgtgtacattctgtgatgtatgtctagcattatatgtatatatatgtatttttttaagactgggtctcacactgtcaccaaggctaagctcttttgctttttatggccttacacataatgcttattatttgatatttttctaaataacatatttgtttttaagaagaaagacctaaagtgcaggataaggtacaatatgtaacatctgttgtggttaaaggagagcagctaataaacactgtgactgttgaacaaattatataacatgataagagtaaaaggcaataatataacactttctagaaattttcctactgaggactagaaagaaagccccacatagcagcattattaaagtggctaatgcctgtaatcccagcactttgggaggccaaggttggaggattgcttgagccaggaagcttgagaccagcctgaacaacatagtgagaccctgtctctattaaattaaaaagtaaagttttggctgggtg

SEQ ID NO: 5053 - DNA, 1154 bp, Homo sapiens
cctgacctcgtgatccacctgcctcagcctcccaaagtgctgggattacaggtgatctgcgcccagctgatctgttgtaattttaatagcatcttgtaggatggcagctgatacagggtccgcttgtatatttctgcccttgaggttagtcctgtatattatgatattctcttgttttcaagcagcacatctgtgaacattctcggcaatctgtctgttagtgtcatttaccataatgtgtttagaaagtaacaagtgcagtaaccctgatcttgttttcagttccacttattcaggaaatggaatccagaatcatgatcccactgaagacctcgcccctccagtaaagctgtagagtttctatgtgcctacatacatttctgtgacaagtatttgtcgtaaattaattttaattgtgtatcaagtgaaaaagaaacactgaggttttaagctgctgtatatagcttgtgagaaacctcttttctttaaaatttacataatcacaagaaaggaaagaattacagttggactgattgtgacagtgccttgtcgtcctctttgaaacaccccgtgttgtccagtataccttataacactgagccacttctccccaccctccagaaggggtccacgttgaattctgaatcatcttgaaaataagattccaaccacaaaaaaaatttagccatttctttactaaaaaaaaccaaaaaacaaatctgttttataatcacagatttttagacaaatttcttgtatcaggaagaaatacaaattttgtcatgtttctcaagcagtttttctgagtagtttctgaggaggaacaaattacaagtgtacccaataactgaaaatgttttaactcactctcatttgtaagcagtccacatagtagacaatgggttttccaagctgggcaaggtacatttaatcagtaaatcagtttcacatcatgtattgtgatgtttcaatgtgagacacaaaaacaatggcttgaaacttgtgtatcatatgtgattttgaaatgaacaccttgaatagcactaatttttatttgtggtatttttctataacaaaacaagtagctctaggaaaagaggttttattttgtaaacgatcatttgtgacctcagacactctctggctaatatttt

SEQ ID NO: 5054 - DNA, 1188 bp, Homo sapiens
tatctgatttcagccagcaatattgtttttcttaatattattcttacactgttaattaaatgtgatttaaataatcttttaactctcggttattatagatgaaacagcctgcaaaaactcaccctacttcatttattccataatctttgtcctcctaatttttctattgcatcatttctgtattgtcagagtaggtaacgtttacattctgttttttctcccccaaacctgggtttatttagtcttagttttgcaatgatgtacactcaatgctcttgcttgtccctttgctgaagttccctttgctatccattggtgagtaatgtttattcattagcagtgtcctcaagaaaaatattcccatgcaagaccaggcacagtggctcatgcctgtaatcccagcactttgtgaggccaaggtggacagaccacctgaggtcaggagttcaagaccagccttaccaacatggagaaaccccgtctctactaaaaatacaaaattagccaggcgtgtattcccagctacacgggaggctgaggcaggagaatcacttgaacctacgaggcgacagttgcggtgcaccaagatcgcgccattgcacttcagcctgggcaacaagacgaaactccatctcaaaaaaaaaatattctcatgggaaaaatatccccagaattcctgtatgttcaaaactatcgtttgtagcctttgtgtgtgaatgatggcttggcttgttttaaaacaaaaaaatcgctggctcataactttattcatttgtttttttgagacagggtcttgctctgttgctcaggctggagtgcagtggcatgatcacagctcactgcagcttccaccctggggctcaagctatcctcccaccttagcctcccaacaggtgtgcgccaccacgcccagtgaattttttttgttttattgtagagacaggggttggggtgggtggggggaggggtggtctcatgttgcccaggctggtctcgaactcctgacctccagtgatcctcctaccttggcctcccaaagtgctaggattacaggcatgagccaccacgcccagcctctatatctttaaatatttatttatttatttatttatttatttttagagatatggggtcttactctgttgctgaggctagccttgaactcctggcctcatgtgatcctcctac

SEQ ID NO: 5055 - DNA, 1173 bp, Homo sapiens
ggtggtgcatgcctgtaatcccagctacttgggaagctgaggcaggagaattgcttgaacccaggaggtggaggttgtggtgagtcgagattgtgccattgtactccagcctgggtaacaagtgcgaaactccatctcaaaaaaaatgaaagaaaataaagataggataatgctaccatctgtgagttgttgggacacagtgttggttttgaaatgattcagagtggtttgcacagtgaacacccaagtgtgctttatagttcccttggctttgaccctgtgctagagcattcattacctgttcatctgctctgcattgaaaggaatatttgtccttttaaatgtattcagaaagccagcacattatattacctcgtgttcaaaggtatgatgatccagaacactccttcaataattacctgaactttatcatgaactatggttgcacctaattgaagatgcaagtgttaatgtgtgtttattttagggccttcatcctagaataatcactgaaggatttgaagctgcaaaggaaaaggcccttcagtttttggaagaagtcaaagtaagcagagagatggacagggaaacacttatagatgtggccagaacatctcttcgtactaaagttcatgctgaacttgcagatgtcttaacagaggtatgtattaaattttgtctatgtctggtatagtatacctatatagaaaatctctgatagtagaaacatgaatatgattaccaatttcaattacaaggtgctgtgtaggttcatttttgtggcaatgatacctaatctgtgtctctaaaaatgaggaaattaaaataatagtatacctaaccaggttataaaagtaaaattgaagctttcattaaaaggtttataaagtggagatttttttattagaaagcttccagttaccagtatttttaataaaacgaggaatgttaatgttaattaatgttaatgtttgggaattatagatggagatttcagaaatgtaaatgacttcagctgttgccttttacatataatgtattctatttgctgatagaaaaagacttaaatcagtgtagaattgtaaaatgaaactgcctactttagccttctgaaaagcaacatgtttctgctgcaaattgaatttacttaacggttatgctcctccaattgca

SEQ ID NO: 5056 - DNA, 1099 bp, Homo sapiens
tcatctcaaaaaagaaaaatgtgactgcgtgaaatatcaataccttctcatttcagtgtttaatatattaaatacccatctgaaaatcaataaccataattttgtgtgtgtttaaacagcttaatcagagggcttgttttggaccacggagcacggcatcctgatatgaagaaaagggtggaggatgcatacatcctcacttgtaacgtgtcattagagtatgagaaaacgtaagtttatagccccttaacagtgaaatggagaagcttcgtattttaggcgagttacttttttgtgaaactttgtttcccactgtaaggacaataatgctcaaattggtttgggggagctataggaaacagtctctgaagatgcataaggggcaggattggagctcagtgaactgttaaatcttaggactaatccagtttcagaagctgctttcttaatgtttccctgctttctgtaacttttttttttcttaatagagaagtgaattctggctttttttacaagagtgcagaagagagagaaaaactcgtgaaagctgaaagaaaattcattgaagatagggttaaaaaaataatagaactgaaaaggaaagtctgtggcgattcagataaaggatttgttgttattaatcaaaaggtgagaatgaaaactcaatgtataaactaaatagtacgtatcatcctttttacttttaaggtgaaagatgttgaaattaatttttatttttgttacagggaattgaccccttttccttagatgctctttcaaaagaaggcatagttgctctgcgcagagctaaaaggagaaatatggagaggtatccgagtaatttgacttttactcattttgcaagtgaattgggattatttctttttccttatactttatttttgggtttttcaactgtatagttaattggcattaactatattcacattgtgcaccccgtcagcactgtccatctctaggacttttttcatcatcacaaactgaaactgtatacccattaaatagttactccccatttctccctcccccttgccccttgtaaacattattttactttttgtttctgaattcaatatac

SEQ ID NO: 5057 - DNA, 1205 bp, Homo sapiens
acagctgtggaatttttgtccaagcttcaaataattttgaaagaaattttcccatatgaaaaaaggagagaacactggcatctgttgaaatttggaagttctgaaattatagtatttttaaaaattgcactgaagtgtatacacataaagcaggtcttttatccagtgaacaggatgttttgctttagcagcagtgacataaaattccatgttagataagcatatgttacttaccttgttattaaatatttcttgaaaagcaaattttaatggtttaattttatgtggacgtatgttaaattatccaactaccctattgttaagcatttggttttaaaatttttatgctaatataaatgctcaagtaatttaaaatattgaaagcatccctgttggtataaatttctgagtaaatgcattggatcagttggactttgaacgcctttgaaatggctttgctaaaatgctcccgccacaaagttgtaggaaatgggaagaggagtcaactagaggcaagggagttgagagagctgcaactgtaaagggcaagaacaggcagaggtaaaaagatgatggaaggtgtggtgactaagggccacggttattgggtgaaatttgagattgtaggccaactgtattttcaagcttctgaacttaggcaaaatattcatcgcaaagtctctagcgtcatatttttctcacccaaattacgtttccacgagattatttatatatagttggtctatctctgcagtccttgaaggtgaagttgtgtgttactaggctgtgttttgggatgtcagcagtggcctgaagtgagttgtgcaataaatgttaagttgaaacctcctttctgttcttgcaatggtatgacgcacaaaagcaatcttaaggggaatgaaaactgtccaaaggttcagaaaagtagtgaaggggcctctggaacggccgggaccctcaacgtggttttccttaattccctgggcggtcctgaaggtggtgtggccagtcctccgcctcgctccgtcagtttccccctgctgaactattgggtgcggggcgggtggtggcgcagcctgcgcatgtgcataggggtcgactgccgctgcggtgcatgagggcgcatgcgcagcggggccgtgggtgtacgcggcgcagcgcggcagtcctgatggcccggcatgggttaccgctgctgcccctgc

SEQ ID NO: 5058 - DNA, 1205 bp, Homo sapiens; identical to SEQ ID NO: 5057

SEQ ID NO: 5059 - DNA, 1176 bp, Homo sapiens
tgttttcaccaaaatccaggaatagacaaaaagactgatacctggtatctgtacctcattgagtgaaaggagttaattaagttcctcaggggaactccggagattcagggtgtcttgttagttgtaggatgccttcagtagcttacaaacaaaaccataaccttcctggaacccagcactctggaaggccaaggtgggaggattgcttgagtccaggagttcgagaccagcctgggcaacatagcaagacctcatctctattttttatcaaaaaaaaacaaaaaacaaaaaacccatagccttggccttttgtcgctgctttcataatttggaaggcttctgttttattgagtatacgaagctagcattcttctaacttaatcttttctgtttgcaggattggcctaatgaagaagttcaacctggagagatggaaaatcagctctcataactaagttaatttagtataaaaatagaattgatagtgagggtataaagtgtaaccatcagttaaacctctcctgtcattcctggcttccttgcttcagaattgaaatggaagtgggggtgtccctactctgtagaatctgggactgggcaaatgtttgtgtggcctccttaaactagctgttatgttatgattttattctttgtgagttaattagaataaagtcattttcttccaaggtatggttcatttagtctatagtctctggttatgaaattagcatcctcccagatctgacagctccctgaggggttatataaggagtagctcacttgcaaacataacatgctgctcaattcaaaggttctagctgctgtgggtctggagttatgtaagctgagcagtagcaggaaactctgcttaaaatattgtttaaagctgtgcgtgctggcatgtgcctgtaatcccagctacttgggagactgaggcgggagaatcacttgaacccaggaggtggaggttgcagtgaactgagaccatgccactgcactcactgacagagcaagactctgtctcaaaaaaaaaaaaaaaatacattgttttaatcaggtgaatgataaaggaaacaggaataggtctatttggggtgggttccctgtggctaggtcagcactgcgtatcactattcctctactgtttccaagcaagcttgtgcaacccaccttttg

SEQ ID NO: 5060 - DNA, 1136 bp, Homo sapiens
ctcattgatattctgtcttgctttatgtattagtgaaagtgggatgttgatgtttccttccattattatattgctgtctatttttgcttcagttccgtcaatgtttgctttatgtgtttgggaaaactgtcttgtatttataggttctcagtgaatgaaccctcttattataattgaatgtcctactttgtctcttgtgaattttgacttaaagtaaattatatgaaatatgaccattttcaacttaataaattgttgcctcttctctcatttggttaacacttgcataaaatgtatttttcatcctgccattttgtcttttttttttattagatctaaagtgaatctcttgaagacatgatatagttagatcttgatgtagatcttgatatatgtcatgatatagttagattttttttttcattttggaagatacttttgctggatatagtattcttgcttagactttttttttttccagtgctttaactatgtcatcctgttcccttcttgcctgaaagatttatgttcttaaatttactcgtaatcttgcagaagcatgcatataaataacacgtctctttcttcttcctgaattccagattctcttcttgtctgcgacttttaaaacattgcttgtgttatgtcttgttagaaatctctttgtgttatcttagttgaagtttgctgagcttcttgattttcttatattttttactaatgttgaagtgcatattagtctttttttgtagttctactacacaatttttatttctttctgtgctttttatctttttgttggtttcatttttgttatttcattttgtttttttaatttccattttactcattgagcatcattgagatgtaattttgattttctagggtaatttatttttttcttttaaaaaatagatcaagactttaattcaaattgtctcacataatttttacatctcctttttttaataattgatttctggatattcttttttttctttgagccatattatcttgatgttttgtttatgttgtaatgttgcaatttgtataataaaaagccacatgtcaaaatctgtattaagtgacttttgtctgagggaatatgataccaattttttaggctagggagtctt

SEQ ID NO: 5061 - DNA, 1202 bp, Homo sapiens
ggagcatattgtatctgtttattctggaattgcctctctgataacggttttaacttagatgctcattgtggcattgttttgttctaaacacatgtattacaaagatagtgttagagtaaattagttgagggaaaagccttatatcatctatccctgttttcatttctcttttcacctttacttttggtctaaagagtctttatcatgatatatggtatatgtatactcaggttcttgtaataatcggcagtatattatgatctctttttcttatagtcattaatttaatgattaaggaccatttaatcaagttgatacctgtacttaactcttattgttagatatgaaggatgtttccagtttctgaaggtacacattgagatagtgcctttacttttgttttatttgaaaaatgtttcaggaggggttgttttattttttcaaaaaacctctttgaggtaatacgcaattgttgtgaaaatgtcatacaatattgcagcatataaagaagaaggtgccttttgagaaggtgagagctttttgtttttttatttttttatttttttgagatggagtctcactctgtcgcccaggctggagtgcagtggtgcgatctcggctcactgccacctccgcctcccgggttcacgccgttctcctgcctcagcatcccgagtagctgggactacaggcgtccgccaccacgcctggctaattttttatatttttagtagagacagggtttcaccatgttagccaggatggtctcaatctcctgaccttgtgatccacccaccttggcctcccagagtgctgggattacaggcgtgagccactgtttttgtttttttttttctgagacagagtcttactctgtcacccaagctgaagtgcagtggcgcaatcttggctcactgaaacctctgcctcccgggttcaagctattctcctgcctcagcctcccaagtagctgggattacaggtgcatgccaccacccctggctaattttacatatttttagtagagacgggggtttcaccgtgttagccaggatggtctcgatctcctgaccccatgatctgcccgccttagcctcccaaagtgctgggattacacgcatgagccaccatgcctggccgggaaggtaagagttttgttctctaaactttcagtcattggagtacctccttgttacttttgc

SEQ ID NO: 5062 - DNA, 1151 bp, Homo sapiens
ttgatgtgttaatactagcggaggccatacagtaggattagggggcttaaatctgggtctttgtcttggtctaaaacaaatttgttgtgagcttggacaggttatggaaccttttttggcctgaaaataattttgtaatcaagttgaattgcctatgtgatttgtatctgtctttagattaataattgagattttaaaatgggatgtttaggactaggcatatttatttgttaggaaagagacaaccaaaagcttacatttagataaattccacttttttagccctgactagttccaaggtttaaaacaaacctcagtgactacgaatctattgtcagaattttcgggtaaaagagagcagatagtctttatttatttttattagtaaatgatggaattagtttgagattacctatagaaaagatagaataatgctaccatctgtgagttgttgggacacagtgtcggttttgacatgattcggagtggtttgcacagtgaacacccaagtgtgctttatagttcccttggctttgaccctgtgctagagcattgcctgctcttctcctctgcattaaaaggaatatttatccttttaaatgtattcagaaagccagcacattatattacctcgtgttcaaagataggatgatcagagtatccctccaagaattgtctgaactttatcatgaactatagttgcacctaattgaagatgcaagtgttattgtgtgtttattgtagggccttcatcccagaataatcactgaaggatttgaagctgtgaaggaaaagcccttcattttttggaagaagtcaaagtaagcagagagatggacaaggaaacacttaaagatgtggccagggcatctctttgtactaaagttcatgctgaacttgcagatgtcttaacagaggtatgtattaaattttgtctgtgtctggtatggtacacctatgtagaaaatctctgatagtagaaacatgaatataattaccaatttcaatcacaaggtgctatgtaggttcatttttgtggcagtgatacctaatctgtgtctctaaaaagtaaaatgaggaaattcaaataatagtatacctaaccgggttttaaaagtaaaattggagctttcattaaaaggtttataaag

SEQ ID NO: 5063 - DNA, 1151 bp, Homo sapiens; identical to SEQ ID NO: 5062

SEQ ID NO: 5064 - DNA, 1197 bp, Homo sapiens
agtgcagtggtgcgatctcggctcactgcaacctgtgcctcctgggttcatgtgattctcctgcctcagtctccctagtagttgggattacaggtacctaccaccactcccagctaattttttgtatttttagtagagaagggatttcaccattttggccaggctggcctcgaactcctgaccttgggtgatccgcctgcctcagccttccaaaatgctgggattataggcatgagccaacgcgcctggccagcctctctttattgggagctttccatccactctccatctcttctgccttttctttttaaatctcctcatcacttccttgcaaactctccatgcctcctagtgcctgaggtaggtataagacagcttgaaaccagtaatctacaattctttcctgggctttccgttctcacaacagagtctgtgtcacctgctaaggtactgaaactgactcagttctttcatagagcagatgtttatggtttcttttgaataaacatagaaattgacacttctagcctggtgtggtggagtgtgctggtattcccagctacttgggaggctgaggcgggaggatcctttgagcccaggagttctgggctgtagtgcgctatgccaatcaggtgtctgcactaagtttagcatcaacttcctgggagtgggggaccaccaggttgcttaaggaggggttaaccagttcaggtcggagactgagcaggtcaaaactcctgtgctgatgagtagtggcatcacgcctgtgaatagccactgcacttcagcctgggcaacatagtgagaccctgtctcaaaacaaaacaaaagcaaaagcaaaaagagaaacaaattgacctttccagtcttgaaatttgagaaagtgacatttgccttatctgagttcctttctcaggaaatcaaccatcaagcctcccagatggtatcaaggaactgaaacttaccagatcactgcatttggacaatgagatgcagaacccctcatctgtcataatggcctaacagaccacctgctgcctgttgatcaactcctcttccttacccctccctaattcctgttttactgcatgtagttacatttcttccttcctatataaacctctaattttagttggtcagggagacaaatttgaaactgatctcccatctccttggctggagcacccaattaaagcc

SEQ ID NO: 5065 - DNA, 1179 bp, Homo sapiens
cactctatctcaaaaaaaaataaattaacatacacatggtgtctacataagtcttcacattgctttttctccttcatacgtggaggtgactttactgagctataaaatgtaatgctaaattttagtatgagaagaatcagagttttctagtttgtcccttccatttacagctgaagaatcagaataagtgtttaaacatagggattaatgccttgtcacagggggctacatggacacttgagggcagaggctaaactggaacccagtgtgccgccctacccattgtcttatctattgcaccatagaactgtggtattattagagatctggacagcattgtgcttgcctcaaaggaagttaaagctgagtttattctgtgtcttgctcatcctcatgtggtaatctgctacgttaaatgtttcaggtatgtctgattgacccgggctgcttccgagaaattgatgagctaataaaaaaggaaactaaaggcaaaggttctttggaagtactcaatctgaaagatgtagaagaaggagatgagaaatttgaatgacacccatcaatctcttcacctctaaaacactaaagtgtttccgtttccgacggcactgtttcatgtctgtggtctgccaaatacttgcttaaactatttgacattttctatctttgtgttaacagtggacacagcaaggctttcctacataagtataataatgtgggaatgatttggttttaattataaactggggtctaaatcctaaagcaaaattgaaactccaagatgcaaagtccagagtggcattttgctactctgtctcatgccttgatagctttccaaaatgaaagttacttgaggcagctcttgtgggtgaaaagttatttgtacagtagagtaagattattaggggtatgtctatacaacaaaagggggggtctttcctaaaaaagaaaacatatgatgcttcatttctacttaatggaacttgtgttctgagggtcattatggtatcgtaatgtaaagcttggatgatgttcctgattatctgagaaacagatatagaaaaattgtgccggacttacctttcattgaacatgctgccataacttagattattcttggttaaaaaataaaagtcacttatttctaattcttaaagtttataatatatattaatatag

SEQ ID NO: 5066 - DNA, 1222 bp, Homo sapiens
tttcagttaagatccaaacaggcccacatagcatttcccccgctccccgctcctttcctcttttaattttcccatgccaatcatttctctctgggcccgccttttcccagtctgagccaatccaaatggaggcggaagcgctccgccttcatcgcctggaactctgggaggtgcttatttctgggcacgccccctttcccctctgagccaatcggagcagggccgagagcgcaccgggcactggcttcctttcccggagctctgggctttcctctgggcccacctcttcgtcctctgaaccaatcaggaccggcctggcagtgtcatggctgcccacaggtctgcaggcactcggtacgccgctaacgcggcgaggtagctcggtgcgtctcgcggtaccagtgcgaatcatcgggctatccaggtccgagatcctagtctcctgtcggctctgaggaggatgggtaagggcactcggcgggcaaggaccctggggcggcaggggaggtaaacgttttactgagaccctctccgggcggagtggcgtcctcggtccctttccttcggagactgttgcacttgacagcaccggctagtcgccgctgagagcaaggaggactgatccctacttttgacctggcttttgccttttgaggctagggggttagacagaaaactacccctcccactttacctacgtgtattaggacttttgcacctgtaaagcctaaatttcaggcctcgacttttgaaattgctcccaggttgaacgtttgaagccaggtccctgcatatctctcttaaaaaaaaaaaaatgaggtgtaaggtcagttacttgagaatcttttacaagtttaaccgtgagcctttgaaagtacagttagtaaaaagagtgcttttactacttaagctttttttatggagcaagcacaacaaaacaaaattaatttcacatgaagtatttttactttgtgttccttctcttgcttctaaatgctcatttcgaagtgaagatacaattttatattctgttttttctttgagttagtgttaacagtgtgataattttattacgttactacatagtgtgttatttttattacagttgttccccacccccccgcccccgagatggagccttgctctgtcgcccaggctggagtgcggtggcgcaatcttggctcactgcaacttctccctcccaggttcaaacagttctcct

SEQ ID NO: 5067 - DNA, 1185 bp, Homo sapiens
gcccaggctggagtgcagtggcgcaatctcggcttcattgcaacctccacctctcgggttcaagtgattctcctgcctcagcctcccgagtagctgggattacaggtgtgcaccaccatacccagctaatttttgtattttttgaagagatggggttgcaccatgttggccaggctggtctttagtctcccattctcaaatacaagcatataaccaatgaccatcagccacctcagaaaaacttctaacatgatagagggataaaaataaaaagaggctgggggcagtggctgggcgcagacactctgtcacccaggctggagtgcaatggcatgatctcagctcactgcaacctctacatcccaggtacaagagattctcctgcctcagcctccagggtagctgggactacaggcacacgccaccacgcccggctaattttttgtatttttagtagagatggggtttcaccatgttagccaggctggtcttgaactcctgacctcaggtgattcacctgcctaggcctcccaaagtgctgggataacaggcgtgagctactgcacctgacaaaaaagattttttttttaatattaaagaactagtccataagacccaatttaaaacttttctttttagtagttctagacagaaaggagaaaaaaaaaatagaagagaggatatattcattgaaataattctggaaatgttaagaagtgaaggacatgagtttccacattaaaggtgtctacaatggataaaaccagacacaccgtctgaggcacattatagcgaaatttcaaaacaatggagacaaagagaaaatcgaatgagaaaaacatggtcatacacagaggattaggaatctgaatgccttttgagttctcaattactgcaaggaaagctgaaagacagcaggtccaacctcaaagggggaatagtttccagccaagaattctatatccaaatcaaatgcgtagggagaatgaaaacacgtttggacattaaaggtctcaaaaagttgtactttttacatgccagtttcttaggaatctcctagaagttgtgtttcctgtgaatgaaggagtaactttaggaaacacaggatcccagagacatttcactcaagacagagctggtgatcccaggataacagctgtgaactaggtggtagagagtgaactg

SEQ ID NO: 5068 - DNA, 1165 bp, Homo sapiens
ctgcctggggaaggaaactcatcaatcccacagaagtgggagaggcgctgattttgcccggcctcggtgctctggctctgagtcagctacttaatgagctccctggagctgaccctgagcacagcaggaaggtgtgaacactccctcccaaaagagtgaaaaggtggagagagttttgtcacctgctgcaggctcccgctgctcccaggggtaatggcctgggcggcattcacacccccatgtagctgtgggcaggaaactcacagccaggctgctgggacgagaagagccatgtgacggcttgaagtgaaagggagtcagagggatgtctttggagagatgagaagagactcactaaagcagaattcgcaaggaattattttcttcctccttccagactcagcaggatggagggaaagtctcactgcagacagggacacagtcagatgacgtggcagccaggcagcagacagcttttgctgatgatgagctattacattggtcaagactttattgcaggtgataaaacccacttccaatacacccaagtgaaaaagaaggtgatttgtgtttcccatgactggggtgtataggggcaaagctgtgctctggaatgattgagacctgacgggatatgggctccatctccagatcagcctctgcacacagtcagtgtggacagaaagagtcacactgtaaaatacttgaggagatttattatgagccaaatatgagtgaccatggcccatgatacagcctcaggagattctgagacaagtgctcaaggtgttaggcaacagcttggttttatacacgttagggagacacgagacatcagtcaatacatgcaaggtgtacattggttcaacctggaaacgtgggacagcctgaagcaggcgaagccggggaggggggttggggtgatctgaggtcataggtggattcagagattttctgatgggcaattggttgaaagagttaagttattatcaggccgggcacggtggctcacgcctgtaatcccagcactttgggaggccgaggcgggcggatcatgaggtcaggagatcgagaccatcctggctaacacggtgaaaccccgtctctactaaaaatacaaaaaattagccgggcgtagtggcaggcgcctgtagtcccagctact

SEQ ID NO: 5069 - DNA, 1452 bp, Homo sapiens
cgtgaatcaatgaccttgagacccaggagagatgaagataaagcccagttcaagtttgaaggcccgagaaccagaactgatcatgaagttcttgtccaaaggcctgcatgctcaagactcaggaaaagcctaggtttcagtttgagttcaaaggcaggaaaagataatgtctccagttcaagcagtaaggcaggaggaagcctctcatactcagaggaggttcagcattttgttctattcaggtcttcagctgattggatgaggcccactcacattagggaggatgatcttctttactcagtctaccaatttaaatgttaatttcatcaatgtcaacactcagaataatgttccaccaaatatctgggcagcctgtggcccaggcaagttgacacataaaattagccatcacaagcatataaatgggatcatagaatatgtaaactttaagagtgactcctttcacttcataaatgcatttgtgatacattcaagttattgtgtgtatcaatagttttgctctatgaaaacaccattaagaaaataaaaagacatcgcgaaggcccacggcgggtgttgacgtgatgtgatttctgcccagtgctctgaatgtcaaactgaagaaattcagtgaaatgcgggtaaacggcgggagtaactatgactctcttaaggtagctaaatgccttgtcatctaattagtgacgcgcatgaatggatgaacgggattcccactgtcactacctactatccagcaaaaccacagccaagggaacgggcttggtggaatcagcggggaaagaagaccctgttgagtttgactctagtctggcatggtgaagagacacgagaggtgtagaataagtgggaggcccccagcgcccccccatccccgcgagggggcagggcggggtccgtcggccttgcgggccgccggtgaactaccactactctgatcaccaaaatagcatggtactggtaccaaaacagagatatagatcaatggaacagaacagagccctcagaaataacaccgcatatctacaactatctgatctttgacaaacctgagaaaaacaagcaatggggaaaggattccctatttaataaatggtgctgggaaaactggctagccatatgtagaaagctgaaactggatcccttccttacaccttatacaaaaattaattcaagatggattaaagacttaaacattagacctaaaaccataaaaaccctagaagaaaacctaggcattaccattcaggacataggcatgggcaaggacttcatgtctaaaacaccaaaagcaatggcaacaaaagccaaaattgacaaatgggatctaattaaactaaagagcttctgcacagcaaaaggaactaccatcagagtgaacaggcaaccgacaaaatgggagaaaattttcgcaacctactcatctgacaaagg

SEQ ID NO: 5070 - DNA, 2272 bp, Homo sapiens
gtctaccacaaatactctttatctcagctgggagctgacatctctccctgaaaggtttccagtgatattgtggcacaatttgttggccagaatcctagagacccagggatggagatgccagtgctgtcttgagagttcagtgtcttccctgttggcatcttctctttcttggttctggcatatctggttcaaggattagacacatgaattgatttagttctttgctggagagggcagcaaaatgccagttgtgatttttgggcttggctatgttgggaaccactgggaatttgtggactgccaataactcattttgtactagcttttgggtgaccattcagtggctgttatttcaattcatagttcagagtgactgtatttagacccatcatgtttctagagttttttcctagattcaaatcatggtaaatgctttcattagataatttagcttatgccctttttcctacttttatgtttccctgttgttactagccctagatacttaaaaaaattttttttggaaaggactgtgtgtttttagatatggggattgtattctgtgctttagtggggcacagaaggagactgtctggttaaggcaagagattgtggtgctaaaaaaggaaatttggcaggcctgttcctggtacttttagtaagtaaagaaagagaatgacaggctggctggggattgtattaaagggagccctgatcctcatatgaccttattccctgaacctagaaagatggtctgcctatgtggcagttattctatggcgctaaagacagttttgttctgctttctgccatgtatatttaggggcctaacggagagatagaaacctgttaaggaataatcatggatgttcaggcctattgcttccttcacttatccagaagccagcctcaccaatgtccatgggcaagtttgtgttcacacaagttgcttgtaacaagagggaagattctcattaagaagttggccctaaaatcaggatagaatcaggctatatttgtgtttctgtcaatagtctgaattccttattggtagaaaggtcttataattatggggtaactttgccaactaatagtactggggtttgatgtgggttacttacatcagaagtcacatcaactttttgacattagtttctattccaccatgtgctccagggaaaaggagattgatgtggactattaagccaaaaatgagaatctgttattgaaacccagaagtctgaaataagggtttagtgattgttttgtttagacacaaacttttcttcatagatgctttaacttcctaagtgagtttatatatttttctaaatatgtaatcttttaaaaatattgcaaatatttaatttatgtatttgccatttaacaggtaaaacagcaccaggaagtcttgctcctgttttgcaaaggcacatttagagagtgacagaggtttcccactgtgtctgggacaagcctcccagtgtgtctgggacaagcctgaaaagagtgccattttgtctccctgaccatttcactgattctgtacttgttgtttatgaaacttcattatgtaacagacaaaaaagcaatttcatgagcaattcctggaataggcaagtggacaaaaatttctcaggtaccttctctggaggctgtttgtcttccattctggctgcctctcttgagaactggagtggcatagtggttaagaccaggggctctggagactgcctggatctgggtgctggtctgactcttgagctgtgggaccttaacttctctgtgcttactgtccttacctgtgagatggagatgattggagtctccaccatgtcaatgtatcaacacttctaaattatttagagcagtgcctgagacattgtaaacacttaatatatgttggttgttattgtaattttaataataatagctattaaattattattctatggctgtcatgcctgagagttcatcacaggggcatgggtgggtgggtagggaataagggctgagaatctaatcagttatttttaatttattgggcaaaaatgaatcaaataaccgtggcaggcataatgaaattgaggtattcagtgtgtggtgaggatgaactgttttatcacagttcctctggtgtggcctgtgtgctttgattgcaggtcagatggctagggaaaagagtagtcaagctgaatgctctgtggtgaggctgtgagagggacaagaaacgtgggtcaggacagaaggcgtactgcaggaacagattccg

SEQ ID NO: 5071 - DNA, 1197 bp, Homo sapiens
agagactgtcttggagtgttgagttcagacccagataaaacaataatctttagaggaaatgaccaagatgaccagaggtaggtctgaaaacatgaaggccgtgtgggtaagagagaacaagggagtccatgccttctgttttcaaatatttaggaggctactgtcaggaaggagggatattagacttcatgtatggaaccatggagtgagaacaaagattgctgggtgtaggttataccaaagataaattttatgccaatataagaaataattttctcatagtgctgtgataaaatgaatttccccaggagatagtttcccaagtaggaagggatatgaacaacaggagctgatatttgaatcgtgaatatacgtggccttatagtaaaaggaccacagatactcgaatgtcagacctttaggaacaagtcattttctactgtaggattttggagggttcataatagaaagtaacacatctccttgtgtctaaaaataggaataaatcctaatatgaaccaaaaaatatattaggtacagttttctgagttgatattgaaatgatgaaaaagaaagagatctgggactgggggttcttaacacactgggtttagggacctcaagaatattgtttaagaatgacgagagatttgcaatttccaaggagtcataagcagtttcaaaaagttgaatgtttttgaggaacttaaaattctgttgttttcaaaatactatagaaaagtaatattacaaaattgtcttgacataagtaatttgggtatgctgtataaaggcttctaagaattaagaaacatggcccgggttgcaaattttaatgcatgactacctttttttctatagaatatagcttttgtcagattctcagcagtggctctgatccagaaaacattaagaaccactggtcatgagtggtgattttcagcttttttggtcttaacccacttaggtgggacagaagctccttatctcacctataccatccagcatcaagataagcacacgttaatatgaaccatatacatattttgttttataaaagtatcccataagctttaaaaatgtaattttgtcatacttaccttggtatagtagattgtaagttatttagagactataaagtcacagatgaatgtttacaagtactctttttggagttgggcttattctatctatgtc

SEQ ID NO: 5072 - DNA, 1204 bp, Homo sapiens
tgtatatgttaaattagcaaagaatttatgcaagacgtatgtgaaatcagtgaagaattctattctatctagactagagccagggagatttccaacacctggctcatgtatgctttttaaaaaaagatattcagtcttactgaagatgaatagatggatggatggatggtttctaacatctattgattgcttcctatgtatcaggcagtgttctagacatttttatgtttattacatatgtacttatacaaattatatgtttattaactcaattaacgttcttagcaacactatgaggtacatactgtcaatagccccatttaatagatgaggaaactgaagcacagagaggttaagttccttgctagaggtttcacagatggtgtacagtacaggcaggctttgcacccaggcagtctggctccatagttatatatgaaggataacgatgtggtcttttcaagagctgttggcatcttggttcacactgaaagctaccaggctttgttatctgttcctctggctttggcttcctgagtcttaagcacccttctcttttctagaacatagaccagcttgaaccaaccctctgtgattccaccccgcctctcccctggctgcaccaggcctctcatttgtagtttctcttactgagcacatttctaaacgaggacggttgctccactttaaggacatacaaatggcttgccctcacctgtcaagcatgatccttgtattttaccaggcccattatgaacgcaatctttctgttgaaaatttgcatacctcctttcttgaaaagtaatgacagcaatttctttccctccgctcactttctgagtgtctcatttaacggcacctgtgaaaccgacaggcacagagatgagaagtgaaagagagcagttgattaaatcatcatcaagtcgggcctcagaaagtcaattctgcttgccgtctgcaatgatatccttttatcttaaagtaatgagctatggcacttttgcatcgggtaatgcgataagttctattagcatgttccatttgcctcacaagcaagggcaagtcattttagctagctcatatcactgcaatcaaagcaattggcttcccaggcagagaagaaagggaaaaggctcagggtgatttctatggatcacaacacagcggaaaaaatagactcttgtattattttaacccataacat

SEQ ID NO: 5073 - DNA, 1238 bp, Homo sapiens
tagacgataacgagggtgatataaataataatagcttacatttttttaggtcttcttgtgttccaagcactgtgctaaacacagactgtccccccaaaatatggcaaattgtgatgcctgaggcagagtatggtatggctgtctgggaactcttgaaaaggatattggattgcttgcaggcaagaaacaggccagattatcttggcagatctcgctctcactgtggttcttagcctttattacactgttggaatgggtttctcacaagtgatatcaagggaaaaaactagacggatatgtccagtgtatgtgtacgtgtgtgtgcacatgcacttaggacaactttgagccaggagtgtgagccggattagcacactgagttgtactttattctaacacatgcagctcagtagaagtctcatcttaagggacatatagaatgttgaggtagaaatagctcagaagaaagttgataaagtaataggatacgtgcttttgccaatctacatggccatatccttgcatgcttattttgacagaagagtcacagaacagagcaagttcttaaggctcattcattcccatttccctcttgacattttgagcaaaggactggagggaccaatccataaggggaatgcacctggtcatcttttcctgagcatcttgggatcaggtgctcttgggaataagatgatacgtatacccaagagcacttgatcagtcaggcagtgagtccatcaatccacagccctgttctgtgctggatcccatacctttgtacctgtgtggcaggagacaggaaggatgtgtggtggaaactccaggaacttagtccagctgaggagatgatacagacattggaaaacataatggaccaccaggaaatgataagcttaggaactcagagaacatcatttctaggatgaccagagaaggcttcaaggaagaagagaaatttaagcagtgcctcaaaggttgggtgggatgtgagttactcagctggggcagggagtagtctttgcagggagggaaactgctgaggaaagatacggaggtgagccgtgcacattgttcctgttggaaccacacatgtgtaaaggctctgagatgagtttagtgagagttgaaggctcatgttgaaaaacactgtgagaggcacacccagtacagactgtggcaagtgttgaatgcctggcggagaaacctagagccttttaaatagttctgagcaggga

SEQ ID NO: 5074 - DNA, 1225 bp, Homo sapiens
ttcatctttccattcctgcccccatccaggcatgtctgagcagcttggatcgcaaaagggcaagatttacacatggggtttgcagaggaaaggggtagggggctcggaaaggcggcctcctctgcgtgtgccaggagagctctatattgcagtgtgctttctgggttcacctaggcagcgttacacagctgtcctcagaggagcggaaagctgggctctggctggagggcccggtcatcaatatgctgacaggccttcatcatcattttcatctcggttgtaaagcacagcctattttccctctttgccaaatctctgctccaaatgtacataactatagatttctgactgagccctgctgccaggaatcaaccagaaagcttcaccagacctctaagacagaggacaagtaaattgtgttctcggctcccgtgaacggggcctgtcactttaactggtttcttctcaggcagtgggtacagcccaggacacccttagtgaacttgccactgcccctggttttctttctctctctttcctgctcttcctctcctgcctgctgtttgctgaccagaaaaatctggctggagaggcccatgcagtgagtgaacatcacatacataattctatcagaatatatccaagggtggggaatcattgttctcggaactagctgagctgaagcccgagcagaaatactaaagtcagtcgtgcctttgagctgcctctaacagcgccctttagagacccatttcatacaaaatttgaagcctgtgtttattgcccattaaagcaacctttattttatggcaaatgttgcagtaattgccttttacgaagagcactttgtaacacacatgcacagttgaaagaaaaccactctggtattgtctatcgggacttaatggcgcaattaattttactccatctgttcctgagactttaaaggaaaatggattttttttttgagcgtactttaatgaagaagataaagcggcccggctggtgtcccacaggctcggcgcagtaagttcagattattgctcagtctgtcagaatgggctgcttccctcagcagcagccacagccagcaacccgctctggcccctcgccgcgccattcctgatgacaaactgccagccagctcccacaaaagcacgattaaaatgtcagcacaggatgacgaaggggccaagagggtcctcagagacaaactgtgttcagt

SEQ ID NO: 5075 - DNA, 1099 bp, Homo sapiens
ggccttttacatacatgactttaccactgagccctcacaaccgcccagagagcctgctctttgcagatgtgactggcttggtggcaattcaaccccaggctgcgggcctagtggcctttccctgccatggcgcaatcttggaagcggcaactgcggggagggcgaggagcggtgcagtttccgccgcgcccgcccgcaaggaaggcagccggggggagccgagggctcgagccgcggggggagcaacagctgtcgatgtcgcgcctggggaccgcgcctccgctgggccgacccggcgccggggacgagaggaggggcggcgaggggcggggcgcgcggggcgggacggaggaggggcggtggcaccggcggctcgggctcggcgcgccgaggaagtcccgctccgagagctgcgagcgtctggaggaggcgcgctcggcgcagtcggggagcgaagtccggagcaaggggcccccgcgtagccgccgccccctcctgctaccgtccagccagggagcccgcggcggccgccgatggagttcacttgagctgtgaaccggcgggagaggcaggcgcccgcaagccgagcgcgggccggagcccagccagccccgggcgctcacccgccagcccgcaagctccggccagaggcgccgccgccccgcgccccgccgttgcagcgcctcctgggccgcgcgccggcgagatccgcacaaaatccagactcccggagcggctccctccagcaccgcggcgggcccaggaccaggcagcccgcggcgcggctggagaggcgggaccggctgtcggggagccccgggcggccgccggggagaagccgccgcgcgccctcctcctcctcctccctctccctcctccctccctccgcacatggtctcctttgtcctgtcgccgccgccgccgcctcgctcttagctccgcgcgccgcggcggcggctcaggccgctcttctccgcctcgccctcccgccggccggcccgggacgcgccttgttagcccccgccgcgccagcgcggccccgcgcgccgcaggagcggcggggagacagtggcgagcgcgggccgggcgatctcggcgg

SEQ ID NO: 5076 - DNA, 1100 bp, Homo sapiens
cattgagaactagaacatgtcccccagatgtacacaggaatatttcatctttgtcagtattacatggaaagactaaattgaatatcctctttgtccctaaaagctagccccagagtcaaaatatgctgcacttcagaattccccccccccatttcctatatttcctttttccatatttattcaacattctaggcttttgctttctcagaatatgcatctctgtgtatcaagtgtgaaagatgagtgatttctcatgagggttatgtagtgaaaacagcacaaatatagcttggccattataactttaaatgcagatatatcctcacgttatgtagtggagatgcttaatttttattttttcaagttctagaaatattcagtgctgaaacattacagcattttccttcaaaccgacttccatgtttattttccagaacattagtgtataatttaaattggctttagttttactgtttaaacaggcttatttcaccttcctcaagccactgtaataattagcagacatgttctctagaaaatggaaaggaaataatgctggtggcatgcatagtggtcggattttggggcaggccggcttgcatctttttgaacaccaaggtcgtttggttactgcaagggacagggatcttggagtcatcagatgaatcttaaaaaaaaattaatttctggcagtgttggcttacactttttagtgaggaaaagcttagcattaaataataggcatttctgatttgtgaaagaaaattgaaaaattggcatgtctgcaaataccacgaaaaacataacatttccaaaataatgatctgtcaacgaaattgcaaaatcattatgtgaatgagctgaattgctttgtgtatcatctcatagaaatatgttttgcacagataatgtgtctaataaggacacatttttaaaatcagatttttttccccccagcaaatagctgcactgcaggtctctctcaagcagtcaactagcaccaccttatggatgatttggggacattgctgcttccctgctaggctttcgtaaaatgtagtcaactgatttaaaataatgggaatgttgatggtgatgac

SEQ ID NO: 5077 - DNA, 1185 bp, Homo sapiens
gtgagcagatcctttcaagagaggctctctgcctctgatggaagaagtgttaaagaaaactcgtctccctgcagctccaaaggcaggaagattgggacctgatgagtattccagcttaaggattttttttttcattctgatttacttcctcctatgtgggtcagagaagtagggaagaaacaaaacaagctgcatttagagaaagtgagaaatttctttatggaaatccaggctctctcctctgtcttgtttttgccaagttacaaagaagcgtctaaaaagcagcacagaggaacacagcaaagaaaagagaggcagaaacccagtgtgcagcgccaagtagagccgagccctggtgccccgggggctataattctaacccggcacagctcctgaggctgtgtgtctttgttactgtttttcttttgaaaacctggtggctttggtggttccgggccttgctttttcctaagaggggaaagcacagtctttggggggcaggtttcctccttccccaaggagccgggcccggcttctgccccctcggccgtttctgtggcctccagaccataaagtgatgtgagaacccaggcacctgggtttcacctcttctttgtgtgtcttcatttaagaggtaacaagacagatggggggaactcagatcatcgctttttttattcctttttgttaaccgttgctttataggagatgtagctagtggaggatggaaggctggggattttctaggggcattgatgagaatctggccacaggagcgagagaggccctgaggtttaggcagaatgagctgtctcgacaccaagatgccccacagccctgaagcagcagtttcggtttgctctgtctgcagtagcgatgggaaagtttgcaggagttgtgatttcagaaagtgtgctcgtacagggaggatctgtaaagaggaaggggcaagagagactgtggtgagggtttaggggaaggaggtaggattcttttaaagagaatacattgcttacctttttttatttttttcttttcttttttttcttgttccgatagcagcagcagaagcagcactccagcgaagactcagcccgccccacctcacatctcccaccacccctctgcctccccgttccccctctccctgcccaaccacagccccctgcacagcttcacacccac

SEQ ID NO: 5078 - DNA, 1136 bp, Homo sapiens
gttttcagtgctatttacaagatttgaatgttttgtttgctgccttgtacattttattaggaacttggaagaggtttgtaggcacaggttttcccttcactcctttttttcaaatgcagtactaagatggacagggaaacttttttttttaaattagaacaaaaaatagttaaaaggcatcatggtcaactgacagtaaataagctagtagacttttatgtaatgttctttcactgtggataggcttatattaataacagtaccttgggaggtcgaggcgggcagatcacttgaggtcaggagttcaagaccagcctgaccaatatggcaaaaccctgtatctacaaaaaatacaaatactagccggacgtggtgccatatgcctataatcccagctacttggtagactgaggcaggagaatcacttgaactgtgaggcagagggtgcagtgagtcaagatcacactactgcactccagcctaggtgacagagtgagactacacacacacacacacacacacacacacacacacacctatacacgtgtaaaggctactcattcgtgtctctgctttccttctgcttgttcgttgttggtattgttaattccatattatttcagtcacttggcctcaaaatcagttattttggatgacttcctctgttttgcccctcagtggggaatgacattgatttcacttctttagtaacctacccattccactgaccttaggagaaagtcatcattacctgtctgacataacctcctcccaggcttcactgctttcacttgtactgaaatcaagctcatcttacccagagctctggacagatctgattttaccttttaaagcttgatattatcttgattccatccctagttgatctagatatttctttagattacctacttactacatgtaccaacttatatgactcgtgatatttgtttttatcccttgcatcatcaaatagtgatctttttggaaatgggaataatgtatttcttgtatacctgctgcttgcttccacagtgtctcaaatatgtatgctccagggctgggcacagtggtttgctcacaactgtaatcttagcatttggagaggctgaggtgggaggatcgcttgagaccag

SEQ ID NO: 5079 - DNA, 1098 bp, Homo sapiens
cgtgtcacttcttccatcgcgtggtcggggttatgtctcttttctttgagcctatgcacatctttgtgattgccctgaccaataaataaagtaggacagaagcgacgctatgagattgccaaacttcactgtaaaaatgccatgcccttctgctgtgttgtcgtggaatgcttgcccttagaagtaagctgccggactgtgatgaagcccaaaccagcccaaatggggagactgcaaggaggggccacatggacaggttctacataggtcagttgaagtcctggctgacagccagtatcagctcctggttttgtgaatgaagatgcctctaaatgattccagccccctcccactgatcacacttaagactccatgtcttcccagctgaggccccacatgtcgtggaccagagacaagccaggcctgttggaatcacagaatcccggatgataatgattgttttttgccactatgttttggattggtttctggtgcaattagtaactgaaacagacttcacttctttatactcattaaggaatgagactgtgtctttttttttttttttttaactttttgtagagatagggtctcgctgtagagatagggtctcgctgtagagatagggtctcgccgtattgctgaggatggtcttgaacttctggcctcaagcgatcctcctacctcagcctcccaaagtgctgggagcacaggcgtgagccaccatgcctggcctgacactgtctccagtgtttattggtgtttcctgtgttgcacaaagcaggtggtggtaggtgcactgtcaatagtgagtttgtgagtagaaggtgtgtgtttctccttttcgtgtgggtgtcacacagttggtgtctgtgtgcctggaagcacacacctgtttctgcttccagagttgtctctggcctgcagttctgtgcttcccagcttgatccgttcctctccaggaatctcctctccctccccaccctgacccacctgttggtgagatgcaactgactttctgccacattttttacttacaggtggtacctgtattattccctccacctctgcagggaagagggtgaagaaatgagaggc

SEQ ID NO: 5080 - DNA, 1099 bp, Homo sapiens
agcgcaagaagtttcctgataggcttgctgaagatgaaggggacagtgagccagaggccgttggacagtccaggggacgaagacagaagaagtagagaggcagggccgtggtaagggagctgaggtggggggacagctagggagggtgggagggaggcgagcgaggaagaccaagaacctggaagagatcacagggagtccagaaacgcctgtcatcccaagcttatgctgtttttctaaaagctctttatggggcttgatattgggttggtggtctttgtccagaaatatgaagggacaaagagggccataaccctcccttctgagagtttccaggaggagtccgagggtctagcttttctggtgaagccagttcctgttcctgccttctttcctaagggcctgctcgctctggcttccaccacagtgccaagcccctctggtctccaggggagggattgctgtgttacatagcaggatcggggtaatcaggccaacaggggagatggtggcgatttttcttttttaatctgtatttattatacagtcttgtttctttaagcccatactctgtctcttcccccgtcttcctctcaggtgacagtatcagtgagtgccatacagaattgtgtattcaccagcatcatgaaacagttgtggtcttttgagttgatcttggcagagtaaagggacgtgtcctggagccattcctgaatctccccttctttgtgacagctcctcccacccccccaaaaaataaaaaaaccacaaaaaacaaaaaaacaaaactaaggcacttcacttagagactggagtcctgcttataatcatgcatataacctttactttgatggatctggccagaggggtgttggagcccagcccacccacataccagtcaagctcttaggggagcagaagaaaagcaggaagaatttaaatgtttaattttttttttaaattgacttttctagttattaaaagttgcttgtttcagcagtgatattgtataaagaacatcttgtaagatactcctgacatcttgctttagcacatgtacagtacagtttctatgataatgtgtttgctctaacttccc

SEQ ID NO: 5081 - DNA, 1219 bp, Homo sapiens
tataagaaaatgtacctcagagttaagacaaaagtactttaaacagtatcatttctacttaaaagcataaaatgccctgaataggaaccaacagtgaaaggatgaaaattcagtcttgtttcaagaacagtgctttttaaacttttcagatattgccattttgtagatcagatatccttaatctggggtccatggatggattctctgaaattgtatgcatagtttttgtctactatttctgctggaggggttcacagattttgtttaaatatttaagaatcattaatatacataaacagaactagttacatagcaaaaatgtctagtattaagtctggatgtcaagggaattttgtgttgacatgacaaaaacattagctaacattcatgtctttgttttttcagggacaaagtatctatgaagagatatgaatatgtagctttacctgaatagctggggaagagggcctttaagatgcttaaatgttgcttaagttagttttagattttaaaattaattttgctcctattcttaaattctagtatatgactctcaacccttctactaagaggaagaatactggatccccagacaggaagccctcaaagaaatccaagacagacaactcttctcttagttcaccactaaatcctaagttatggtgtcacgtacacttgaagaagtcattgagtggctcgccactcaaagtgaagaactcaaagaattccaaatctcctgaagaacatctagaagaaatgatgaagatgatgtcgcccaataagctgcacactaactttcacattcctaaaaaaggcccacctgccaagaaaccagggaagcacagtgacaagcctttgaaggcaaagggcagaagcaaaggcatcctgaatggacagaaatccacagggaattccaaatctcccaaaaaaggactgaagactcctaaaaccaaaatgaagcagatgactttgttggatatggccaaaggcacgcagaagatgacacgagccccacggaattctgggggtacacctaggacctctagtaaacctcataaacatctgcctcctgcagccctacacctcattgcatactacaaagaaaacaaagacagggaggacaagaggagcgccctgtcctgtgttatctccaaaacagctcgtcttctctctagtgaagatagagctcgtctcccagaagaattgcgaagtcttgttc

SEQ ID NO: 5082 - DNA, 1169 bp, Homo sapiens
accatgttggccaggctggtcttgaactcctgacctcaagtgatctgcccaccttggcctcccaaagtgctgggattacaggcgtgagccaccacgcctgaccctgacagccttttagggggagaccaggcccccagcaccaggactcctgaatagctcctgacctccagcgggtctcggggaataggtcccaaagggtgtttccactgtgaagctgggcacagcagaggtcacccctcagtagcactagggtaggctgagatttgaggtacagttcaaagcccattttgcatcccattagcatagttgggtgccttgaatgcgagggtaaaaagggccattagacactagcggggccaactgcatcactttgtaaatggagaaactgaggatcccgcatgggtctccaccagcctttcattgaagtccttcctgaatatccagtaggtgcccaccatggccaattgggcagaggggatccagagaggccatgccatctcgtggaaggaactctggacttagagttgcccagagctagttcctccaccccgtctctgccccttgctggctgtgtgacttcaggctagttgcctagcctctctgaacttgtttccttatctataaaaacgaggccacggtggctcacacctgtaatcccagcactttggaaggccaaggcgggcagatcacaaggtcaggagatcgagaccatcctgcctaacgcagtgaaacccggtgtctactaaaaatacaaaaaattagctgggcgtggtggcgggtgcctgtagtcccagctactcggcaggctgaggcaggagaatggcgtgaacctgggaggcggagcttgcagtgagctgagatcgcgccgctgcactccagcctgggcgacagggcgagactccgtctcaaaaaaaaaaaaaaaaaaagggcaaaacaaaaaacgaggccaatagtcctaactttcatggttggtgtggagataacaggtattccagggtgttgccactaagttggtatccaatacatgatgtatccttaaggaggtcacattctcattcatttgggaacaccccactccccatggcagggcagcagaggcagagaggacttggatccgccagccctgtgttgggacctcattcaggtcaggttctgctgcaggatcaaag

SEQ ID NO: 5083 - DNA, 1677 bp, Homo sapiens
tgccattggcctcctcacagcggaaacacagcttgtgagtgcatgtcagctgttaacaagtggtttttagtacattctgggctttgctgtatctatctagtgcctgtttgtgcgtttttttctttcttccgctgcttccccattttccttctgtcctttttctcctgctccttgttttcccagcagcacatggggttcctcggaggagcagaggtggccgccgtgggggggcgtttgggctgcggtgctgcgtcatttttcctttgctttctctttactttagacactggcccaactccaggcgtttcctttcattccctcagtgcttctcttctgacctgcatgttgagttctgtattgctggggcttccaacaaaaaccagagtcactgacagagggaacagcagagaccttgttggtattcagctgtgatggatatagagaatcagaggcaccttgttttcacaactaggataaaaatatctgcagggtcctttccattcctatttagagggagtcctggctccatgaccccctcccgagtggactgtccaagcagataggctcacacgagaaacagtgaggctgaaagggggggctatggaagagcggtagggagtccacggagaagatgcagtgaatgcttgcatgcattcacacgtgtgtgtgtcccagctagttcactcctttcgccgtgcgtggtggaggctggcctctctggctgggtgcagtgaatggccagcgggtttcttttctgctgggccaaggcgctttgggggtggagggggtggtgctggtgctgcactgggctgactgcggcgctgacgcagcgtttccccccatccctgttgcctgtgtgttgtgtggatctgttcctagtataggcaacataatgagatactgtgcttcccacctccccttcagttcagagccaaaatgggtctagaatctggcactttactcatttcctttgataaattgtactatgcagagctgtcaggaaccttcagatagcagtagaggactgcagctgtctaggtctgcggccacatcttggggacacactggactgttcccatgtgcagggttcagcagttatgtgggagtgctaggggttaggcttttgagcttgaacgcctgcgtgtgaacagatgaaaaatccttcagtacccaagtcccagtctgtcctatggggagcagtttgggggcggccggcagcaggagcctgggaaagaggccctcgccaggtgatggcagggccagggtggcctggggcacccagcggaatgtgcttagtatttggtcaccagccgtcatcctgggcttttcctactgtgtcttgttacaaggcctcagcaatccacagaactctctctccttccttccacctgtcagcttctctgcttctgagataagaaccatttgtgtaacaccaacacttaacttcagaaagacatgcattatgtggtgtaatcaaacccgatgctttcagatgacctacttacatcttcaatgtggataagataaagaacaaaacacatgcatctaaactgctgggcaatccagttgacttttaaatgtaagaatggaattccaaacacttaacacattcagctatatgacagaaagtaaatctatggatatggtattttgtgaatgatcttttaaataaaagaa

SEQ ID NO: 5084 - DNA, 1197 bp, Homo sapiens
tggtggctcacgcctctaatcccagcaatttgggaggcctaagtgggaggactgcttgagtccaggagtttgaaaccaacctgggcaacgtagtgagatcttgtctctacaaaaagttttttctcccatccaagtactaaccaggcccgaccctgcttcagttctgagatcaggcaagatcgggtgcattcagggtggtatggctgtggaccaaaaaggtttttctaaaaattagccaggcatggtagtaggcacttgtagtcccaggaggctgaggctggaggatcacttgagcccaagagtttaaggctgcagtgagctatgattatgccatcctgcctggatgacagaatgagaccccatctcttttttttttttccgagacagcgtctcactctgtcgcccaggctggagtgcagtggtgtgatctcggctcactgcaacctccgactcccgggttcaagtgattctcctgcctcagtttcccaagtagctgggattacaggcgcctgccaccacgcccagctatttttttgtatttttagtagagacggggtttctccatattggccaggctggtctcgaactcctgacctcatgatctacctgcctcggccccccaaagtgctgggattacaggcgtaagccactgctaccggccttttttttttttttttttctttcaagacagagtctcactctgtcactcaggctggagtcaatcttgcgatcttggctcactgcaacctccgcctcctgagttcaagcaattctcatgccttagcctcccgagtagctgggacttcaggcatgcaccaccacacccagctaattttttgtatttttagtagaagtgaggtttcaccatgttggccgggctggtctcaaacacctgacctcaagtgatcttcccaccccagcatcccaaagtgctgggattacaggcgtgagctactgtgcctggccgagaccccgtctcctaagaaataaaaaagaagaagaaagaaaaaatactgatctaatcttaccccacctcattgtacagctgggaagctgaggcacagagatgcccagggacttgcccaggccacatagtgagtcagatgctgtgtagaccctgctctcaggaccacccatctgaaccatagaccaccgtgggccacacggcccagtatggctgctcaacagggacagtga

SEQ ID NO: 5085 - DNA, 1200 bp, Homo sapiens
agcccagccttccttccggggcagagcagtggtggggacctgtttccagctgcttgtgccccccacttcatggaggagggaccagggatcctcagaggagagggtgatgtttgacagtggctgcctgccctgaaaatcgcccttgtctgtccagcctggcctgaatttcacccacatcaacccacatgggatactttatttatttatttatctatttatttatttatttatttattttagagccagggtctcaccctgtggcccaggctggagtgccgtggtgctatcatagctcactgcagcctcaaactcctgggctcaagtgatcctcccgcctcagcctccagagtagctgggactacaggaacacaccactgtgcctggcttatttttctttttttttttggtagagatgggggtctctctatgttgcccaggctggtctcaaactcctggcctcaagtgatcctcctgcctcggcctcccaaagtactgggattacaggtataccattatgtccagctaaacctgttccttgaagaaagtgtgaacctcaaattcaaagcccctctctttctcttccctcatcagaatcggctcccagacacctgccactcgtgaatgcatctgataaactcactcacactgaggccttggggactgaggtgagcagggcccagcagtggggagatatatgggggaagtgttagtggtggtgaatccatatggattcacctcagtccttgcctcctcagaagaaagaattccaccaaggggcatgaggcagagtgagggaccgaggcaagttttagagcaggagtgaaagtttattaaaatgttttggggcaggtgctgggcacggtagctcacgcctgtaatcccagcactttgggaggccgaggtggttggatcagttgaggtcaggagtttgagaccagcctggccaacatggccaaaccctgtctctactaaaaatacaaaaattagccagacatagtggcacatgcctataatcccagctactggggaggctgaggtgggagaattgcttgaacccgggaggtggaggttgcagtcagccgagatcacaacactgcactccaacctgggcaacagagcaagactccatctcaaaacaaaaacaaaaccaaccaaacaaagaaaaagttttagggcagtaaggaaaggaggtaaagtaca

SEQ ID NO: 5086 - DNA, 1200 bp, Homo sapiens; identical to SEQ ID NO: 5085

SEQ ID NO: 5087 - DNA, 1142 bp, Homo sapiens
cctgtcgggagtcatgctgacgtggtgagtggctgggccccggcaggggcaggagctgggacaaggaggggatacacggcatccccaagggtccccacactgccctccactttttaccttaggcccgacggtctcatgtaccagaaattccggaaccaattcctctccttttccatgtaccagagtgagtgtcccagatgtctgtgctgagccctggaggcacccgtggtggggggcaggggcagggaacccctcccggggctcagccctgctcctctgtcctccgcccggcccaggcttcgtgcagtttctccagtactactaccagagcggctgcctctaccgcctgcgggcgctgggcgagcggcacaccatggacctcactgtgggtgagtcgggagtggccctggcatctggacattcccctttcctcccatcccgggtctgagtggtagcgtcccctctgtccctggccgtcctgtgccctgaccttcctccccgcagagggcttccagtcctggatgtggcggggcctcaccttcctgctgccttttcttttctttggacacgtaagtcgtgcctctgtgtccctgcctgtctgtctgtccgtcctctgcgccggtttcgggctccagcagggactgggtcttctgagtaaaatgcctcctccctgcttagttctggcagctttttaacgcgctgacgttgttcaacctggcccaggaccctcagtgcaaggagtggcaggtgagccggggtccctggacaggatggatggggggccaggcccatgtccagccctcaccctattcctccggcaggtgcttatgtgcggctttcccttcctcctccttttcctcggcaatttcttcaccaccctgagggttgtgcaccacaagtttcacagtcagcggcacgggagcaagaaggattgaggctgggccttcccctgccggcccagaggggcttctgtcctgtgtgttgtgggaggggatgggaggcgcccctcgagtgtgcgtgtatcagggggtctcttctattctcccttgggttttatgggcgctgtgggccctgaaggaagacctgggcccagtgccctcaataaagagaggcccagaggtggcctgagcgtgtgtgttctc

SEQ ID NO: 5088 - DNA, 1199 bp, Homo sapiens
actatggccaggctccctgtcggagcctctgcctggggccccacctggaaaaatggctcctctaaggcgcttccagcctaaagcccgtcctcttccacctcttgggtgcagactggccctcccactccgaccgcaggtcccccaccggccacacagacggctacgctagaacccagccaaacaccggggttgccaggatggtcccacagctttcctttccgactcccggaagtggccgtgatctcacgagatcccggaggcgagcgcgaccggaagtccggtcactctcgcgaggccccagagagcaggcgctgggcagtgtggaggtcgttggagtcacttccccgtcaccagctcctgtgcctgccagtcggtgcccctcccgctccagccatgctctccgccctcgcccggcctgccagcgctgctctccgccgcagcttcagcacctcggcccaggtaggccagacgaggggcggcctgcaggcggaggccccccggcccgggccacgtgcgtccccggttcgcgggcagctctgaccctctccaggccagcctggaccgcagggatgcccggcactggctggagactgtggcgcccggggcaggccctgacactggcctggaggtgcgggggagaaagccggggaaaagggggcgaggtagtcccgctccagggccggtccatttgtcagggttcccccaggtctcccagatttcccagaggacctgctcttggcttgcacgccttcaaggttgggaaaccagggctctgcatctgaaagtaaacttacgtttttttctgcagcgttccattgctttgacgtagctaatctccttgcagcatccgtgtgagttgtgcgtgaataaaagaaatcgtatacttcctaattccatagtatggacaaaccgaggctagagaactgggccagggttacagtcatttggccagaggattagaattcagcgcttctgacctgaagacggcttcctcttaacctttttggaggatctctcctgctgtgggcggactgagcctgccgccaggtgtcttaacagtgcttgacttggcccgcgaccacttaagcctaggagcctaggctatttttagccatcttctagaatggtggttcttaaactctgcagtgtgtcagaatcaccagaaagctaataaaaaacagacgtctgggttcattgaa

SEQ ID NO: 5089 - DNA, 1376 bp, Homo sapiens
agacggtggcagagatgcctgtttttgccaatgtcagacatttacctacttagtgacacctgattcaggtgactgtgacaatgttttcagtcctttaccaacctgcggggagagacaagaacccagaaacaggctctgttggggagaatacggtgaagtgttcctgatgattgagttcctggcgtccaggtgcttgtcgcattgtcctcgtgttcacgaaggtggatggtgcttgttttatagctaaggaaacacatttggaaggtcagtcattgtccagggtacctgcctagacaatcacagtgctgggacccctgcctggcaccctctggctctgagcctcgcactcctgaccgcagctcagtcccacccacctgctcagcaaggcgtccccagcaaggcacccagaacccgcatgtgtagagagactcctcggcagggctgatggagcgacaggtcggggtttctctaacaagcactttcctggaaacttcattttaacatgttcccatctccctcagaaaaagggcatcgagaagaacctgggcatcggcaaagtctcctcttttgaggagaagatgatctcggatgccatccccgagctgaaggcctccatcaagaagggggaagatttcgtgaagaccctgaagtgagccgctgtgacgggtggccagtttccttaatttatgaaggcatcatgtcactgcaaagccgttgcagataaactttgtattttaatttgctttggtgatgattactgtattgacatcatcatgccttccaaattgtgggtggctctgtgggcgcatcaataaaagccgtccttgattttatttttcaaggtcccttctgtaaatgctgtgctttcttccctgtgagagccaactttagagtgtctgctacctcttcattaccaatcagaattagatgatgtttaactgttagactgaagcgtgacgctttcatcagtagcttcaagaaagtctaaattgttaatttatggaattggacacagtattcagtttacccgtacatgctcctcccgcccctcctgttggcacccttgcatcgcccaggcctgattcctcctgggggtagttcacccccacgggttcatagttcagcggcgaatgccaggcagctgttttctggctgagcaaacagcacctttctcattgagcttcctctactgacctctgtcccccttgggatttcatcttctgaccgaaccctgatgttcagtggcagagacagcccatagccagaactgtgggtagaccagggttggggtgtgcggtttgggacagcccaaaccccagccgctgtgtcaaggcctaggacgccatgctgccatcaaaagggggttccaggtttcc

SEQ ID NO: 5090 - DNA, 1172 bp, Homo sapiens
actttgatgtttctaaaaataaagtgagcacttttgttctttttaatattttatttatttatgtatttatttatttatttttgagacgcagtcttgctctgtcaaccaggctggaatgcagtggtgcgatctcggctcactgcaaactctgccttcctggttcaagcgattctcctgcctcagcctcctgagtagctgggattacaggctactaccaccacgcctggttaattttattttgtgtgtgtatttttagtagagacagggtttcaccatgttgcccagtctggtctcgaactcctgacctcaggtgatctgcccaccttggcctcccaaagtgctgggattacaggcatgagccactatgcccagcccactttgtccttcaatttcttccttcttcttcattttgacccccagtttacatcattaagtacatagtctcgaaacctcaaagtatcagtgttatccttatttttttttctccttctctgaatttgcctgatagtcaaaacctgtgcctactaccacttaaaggttttttttttcatctgtctgactagattgtccactgtctcaccaaatcttgctttgactagtaataatggcagttgagagtactgcctatcacttgaccagactagctaaatgctgaacattcattataatatttaaatctttaaaccaaccttgatttttattttgatttatgagatgactctaccaaaggttagattctgattttggagagctagatcataatagagtcagaattctgttcttaacttctacactgtactccaacaacagtcaaactgttactttctcattcagggtaaaatcctgaccaaacccattactgaaaaccttccttttttatctcagctcccagtctccaccccatgtatctgatacacctgtgacaatgatcttttctccatatctagaaaatatcaccaacttacagtgccgtgttatggtataggctcttatttccacttcctttcatcacagttctatttatttctcaatacacagttgaagatcagttgaaatatcaatttcagcataacttcccatacttgggcataatttaatagcttaccagacagtagcatataatgtagtgacttgggagccagacttcctgggtttgaatacgggatgaaaat

SEQ ID NO: 5091 - DNA, 1215 bp, Homo sapiens
aagaccagtttgggcaacccagggagaccctgtctctacgaaaaataaaaattgaaaaattagccaggcttagtggtgcatgcctgtggtctcagctacttggaaggctgaggtgacaggatcacctgagccagggaggtcaaggctacaagtgaatgatgataatgccactgcactccagcctgagtaacagagcaagactttgtctcaaaaaaaccccataaaatatggatatagattgattattgtagatctggagctgcaactacagaaatgaccattttttgctatgtgcagcagaagagtcagcttaagccttcccagcttccggggctcagctggcgctgctggggcaggtgctgcagagacttgtgttgctgggtggaagtcgcgctgccttctggagagggccacagagaaactttccagaatgggcttcccagaagcaaatgtgaagttttgaaatggggctgaacttctgtgaatccatgggaacaagagccagtggaatttgaatcgttcatgttactctccttttgtacccacagactggtgatacctgaggaaattcaagtacattgcaattttttaattaactttttttttttttttttgagacggactcttgctctgtcgcctgggctagatggcgcgatctcagctcactgcaacctccgcctcctgggttcaagcgattctcctgcctcagcctccagagtagctgggattacaggcgccccccaccacgcccgtctaattttttgtatttttagtagagacggggtttctccatgttggtcaggctggtctcgagctcctgaccgcaggtgatccgcccacctcagcctcccaaagtgctgatattacaggtgtgagacacagcaccgggcctttttttttttttttttttgacagcgtctagctctgtcactcagactggagtgcagtgggacatcatgactcattgcagcctctaactcctggcctcaagtgatcctcccacctcaggttcccaagtagctgggactataggtgcacaccactgtgcccagctaatatttttttatttatttttttaagaaatggggtcttgctttgttgcccaggctgttctcaaactcctaggctcatgcaatcctcccaccacagcctcccaaatactgggattacaggcatgagccactgcatgcagcctttaaattagctttttttttt

SEQ ID NO: 5092 - DNA, 3678 bp, Homo sapiens
gggtccctgtggcgatcccgccccttcgtctgatgtttgtgcctttgattggctcttaggtggatccctcagcgtggcttgcccaatggagcaatgccggctggtggcctggccgctccgccccttccctacccctcgcggagggcccgccccctgccccgcgccggctagcggaggagagtaaatacaacaggagcgcaaaatggcggaaccgccgagccccgtgcactgtgtcgctgccgcggcccccaccgccaccgtctcggagaaagaaccgtttggcaagctgcaactctcctcccgggaccctccgggttctctgtccgccaagaaggtccggactgaggagaagaaggcaccgcggagagtgaacggagaagggggcagcggcgggaacagcaggcagctgcagccgccggcagcaccttcgcctcagagctatggcagccccgcgtcttggagctttgcccctctgtctgctgctccctccccgtcctcttctcggagcagtttctctttctccgctggcacggccgttccctcctcagcctccgcttccttgtctcagccggtgccgcgcaaactgctggtccctcctacgctgctgcacgctcagcctcaccatctcctcctgcccgccgccgccgccgctgcctcggctaacgccaagtcgcgcagacctaaggagaagcgggagaaggagaggaggaggcacggtctcggtggggcccgagaggccggcggggcctcccgggaggagaacggggaggtgaagccgctgccccgaggtgggtgccgtgcggggagggggaggggagggcgccgtgggtccccgccgccccctggcgcccacggggcccgggaagggggagcgcggcggccgcgtgcgccggcctggaggggctgggaggcgtccggttttcagcagaggattttgcagttcccaaggggacaggaaatggagcctgtaatttcggttgcagagagggggatggccgacactcttattttctgtatcgtttcttcctcccagttagtgcgctgcaggatttgtgaaaatccatcttgaggactctcctaggtttgtttggctagggagagagatggagggaacgggatgggggaagggtttggttttgtaaaagatgcttgattgattgttagaccacttagacgtggtcgcgggaattcgtatttgtgacacagcgttcaaccccggataatcctgtcaaaaaaggggtgtggagagagcactggcgtcagctggaagctaccagaggcctgagcttttcatccctattagggaaatgaggtagcgtgcagggcccgaagtgcgctgtttcgtaaggtaccctccctgcaccctactctccgctgcgtattcttaagtgttttgggtggtcctgtttgaaataccacccttctgaaagaattttcagccatattctttttttccctgcagcaaatgataaaaccaggagctttgacgatttttcgccagatcaagcggctgcagaatgtttgagcattagaaaaaggcgaattcttaagggttcttgtcagacagggtcagttttgtttttaaatgtaggctagtcgtataatttttcaggtgtttccaccacttcagctacggatacacaatgatctgacaatagtgcaacatacggactagttgaaaatcaaatctttatgtgatcgcaagcttaaagcgcataatctttattataaatgtgcactgctacacagtgttgtcaaataactctttttgttttttagaaaaagaaatgtcaagcagtttcagcattgctgatctaacagtagctcagatcatgaaaaattctgtttggattataatggtttgttttcacaacttaaaacatgctgcatgtgcatgtagcaatagtgtcacttcttccttgatattttttgcctgtagcaaagctttaacatctaagcatagccatcagggactctggtgcaatgtaaatatctttcagcttctgggagtgttgtttctaggaaagtggttttgaggatgggattttggtacttttagtcaggaattccaggtgattagtattttaaagctattttgttttaacaatttatatgtaaaatttaggagataagtgcctggaagtttgtccatatgcagcttggtatcatcactagtgtttgtggtgtgtaaactgcacatttgctgtaagttctctgaaagaggaagtgaatatgagtattacatagttggagtaatggaatatttgagaagaaataagtaagcattctttaacaattctaacttaaaatgtggagtacacaaatggtccttaaagtgaaatggctgttaaagaggaatttttatagtcttttcaattacatttagaatccttcttcttttgagggttaacactaatattattaatcctgaatataaacagtgataggttttacattaagatgtgggaatgatcttttcccatgacctatgtgggttttttggagtagtgacaagatattaacactactgtaagattttcattttttcagacacaaatgctatcttgttgaggaaaaactatcagagaaaaagattcctttccagtgtcttggtggtaaatttaatggtgaaaatttttccctcgtaacttggggaatacttatatctttctaaagtttggatttaactgaattgatgttctgttttaacgaattaagaagattcttaaatagcggtattaacaagtggtatagcaagaatacatatatgcctttattatagatataattgcaaatatgaaagtcctgatttgcaatacaatgatcatttctctgtgctttttgtaaaaatcttagtgaatgggtgaccaagtgtttgtttaggtatatacctctttttagtgttgccctaagttggctgtgcatggttcagtaacccctcaattatccacagctggctgattgaacagtctgagtcagaaccagacattagctataaagacacctaaacaaggaagagattctccctcaacaaaacaaaactgaaccacacacactcgaaagacctagcctgcaccccaatttgattaaacaattaagctcctgtatttattaatagtagggcttttaaaaagtcctaagtcagaactgctttatttttacattggtgaccattctaacagaacgtatttgggttaaatgaaagcatgtataagaaagggcctagcagggtatttagtaaatgttatttgagtctgaagcatagttattaattttttaaccctataactaattgaaagatgggtgaatgctgatagaggaaggatcattgacagatatgaaagttaagaatgctgaacaagagaattatgaaagtatactaatatggccccatttagtaccagggcctgatgcctcacaatctctaaggccatctaatcatagtactgtagctgacttgcgtgatagcttgactcaccaagtaaaagttaaatttcttataagaaggaaaagtgcaaaacagtttagattttttttttttttttggaaacagagtctcgctcttgttggccaggttggagtgcagtggcgcgatctcggctcgctgcaacctccgcctcccgggttcaagcaattctcctgcctcagcctcccgagtggctggaattataggcactc

SEQ ID NO: 5093 - DNA, 1348 bp, Homo sapiens
gattttttttattgtgtatgggatgataagaagtttagagaattttcttactagtaagtacctttactaagtaatagctaagtataaaatctttagttacagaaagcttgtgagcaattaaaatccttttacatttttcttgcagaatgggagaaaaatatggcaaatacaaaactgtaaaataagggcaatgacaatgactcaactgccatatagagatataattaacaaaatactttgtggtacctcttatctctcaggatctcctccctaccctagcaaggcaaacaacttggagtacttccttttcgaaagaagttctagaaattaaattgaggtaggagacggattgacagtgcctaactaaagatgagtaaaacagacctctttaatgatagactcactatttgacactgcttctactattgtaattaaaaatcagaagtctttgatgtatgcgttgctgtaagaaactctgctcattgcaaatctattttgtttgtttttggtattattctgggcacatactttggttgatgactttcaattggggttctttgtgctgccttttgggttactgttggtatttccatttctggcttaatttatggtaaccatcaaaactgcttatatttctggttagggcgaagccatttaggaagaagcatttcaccagaacaagtaaaagttaattgcagcaatgatgtcagttttggcccctagtttaataaaaggataggcaaatatcataggaaatcttcatggtttgtaggaaatcagtgtttgcaacgtaggaagtttcatgggatagggaaggtataaatcaagatagtaagggttttgttttatatgtcattgtcttaccatgctccccacctatttaatcttctgttttaagctaaatttatggatttgcacctacctttttgagtggcagaagttcttaacaaaccagtattgagaaataagaagggatgtagttaaaatggttttctgtttctctttaaagttgaagaatgatatatttaacaagagttgtgttttatttccagttttccagtagcatatatgtagatgcattgaggtcatactgtgagaaaatgtctttagggtatccctccaaaataggagccttaaactttttaacttaaaggaaggcatatctaaaaaccatagtggttgcttttaggtatagtttcctatataacctatagtcagacttatctataatatgaaaatttaattgttttaaaaatgcatacatcggccgggtgcagtggctcacgcctgtaatcccagcacttagggaggccgaggcgggcggatcacgaggtcagaagtttgagac

SEQ ID NO: 5094 - DNA, 1155 bp, Homo sapiens
tggctgtccaatatgttaaatggaaatgttggaatatattgcataattccatcatatttatgatggtaagaattccagtttactgaagctataactatttggaaattgaaatttaaaactggtttcaatttgtagtttttatcaaagttctgcagatagatgttttcagagatagttatacaaaatttaggaaaatagcggccatagagccccttttccacagtttctgtttcccagggacaaacaggttcagctctttcaattgatattttatttaccattcataatgatacatgtttgacttccagtcatctgcagggtcatagagaaatagtcactcattggcatggtgtgagagaaaatggatcttttattttaacagctttcaactagtctgcctaaagatgggactaactttattcccgtttccaggggatgcttaaaccatgaatccctgaaactttgttttattgcataaattgggttaatattctcctttctctactattgctgtctgctgtctcggatctgctaggtcagttacaagtcacatatcttctttcaagcttcatttttgttgtttttttccgttctctctgttctcatgtatgtatgcgtttgctgtcatttcagttagatattgtaaggtagtaaagttagatgcttgtgtttagtctggctttttgtattctcttggaaatttggttattctttttatatattggaataactttttttttttctttgagacaagagtcatgatctgtcgcccaggctgaaatgcaatggtgcaatcttggctggctgcaatctctgcctcctaggttcaagtgattctcgtgcctcagtctctcaagtagctgggattacaggtgcgtaccacaatgcctggctaatttttgtatttttagtagagatggggtttcaccatgttggccaggctggtctcaaactcctgacctcaagtgatctgcctgcctcggcctcccaaagtgctgggatttcaagagtgagccaccatgcctgacatgaaataacttttaatagtttgcctgtttatagtacatgggtccaggacagatacatgtttcattttgctcaattcaattacattattttaaaaaactacttttattaattgacacataatgtaca

SEQ ID NO: 5095 - DNA, 1224 bp, Homo sapiens
aattttataatttatcattcaaatgatgagagtctagggtggtgaaaagtgaactattgataatcacgccaggacagcacagacaaggattgtccaggaaacttccatgtgtagtcaccctagatagtcttataagtaactagaccagtaatagaagatttcctatcaaatcagaaataagtggtggacgcaaggatgcagtcacacatagagaaagaagggcaggaggagatgagggggagaaaacactaagggcccttagaactacttttctccaaggttagaaatggcatatgtagtccagcattaggaatattagcatacaaacaagaacattcaagccattcctgttgtgactgtaaaacaaattcaagtccttcctttatgagattctcgggaaaaagacagagaaaagagaagtaaaacatagcacggcttgtcccactatggaaaggtattttcttttgttttcaattttcaaaattgcaagtagtggggacatcaagaagtctgttatcaacagagactattatcacatacagaatagtcacgtttgtctaaaaatctttggtagagatggaagttggggagatttttgttcttttctgggaattggtagtaatgacttagggtcaatgtttaaataattaatatgaagatccagaaggcccattgattaaaacttttttagggattttttgggcagagttatacttttatatatgtaagtttaagcttatatggaattaagttagtggggaaataattctttttttttttgcacagagttctccagcaaggattaatgaaattttgataatgtaaaggtacttaacacataatattgtcttgattgaatatgaattttcacatggaagttgagaaactctcagtatttagttatttttactgcacaatttcacacattaaaatattgatattatttgctgtgttgtgtaatggagccttgttcagaaatcgtttttctatgtgttgtgtgtttgtttgtgtcctcaacttcattgtaagcttctaatgagcagaggttatttttcataacttctcttgtggagtgccttgcagagttctagacacatagcgagtgtttcatatattcttgttgattgatgtggagcctggagttgccacctctgggcactgagcctaatgctctgaaatcagaggcgctgccagcctgctgggtgggagaatcttcctgtctct

SEQ ID NO: 5096 - DNA, 1194 bp, Homo sapiens
ttctaatcctggagagtgggcattccagatgcctggagatctccctgggcgtggagcagagagggacctactgcaccaagatgtctacacaggactggtggggcaactcaggctgttgaaccaggccaggaggttttctgaatgcctggagatctgcctgggtgtggagcagatagggccttgctgtaccacaatcaatgttcaggaggagtggagtggcttagactgctgaaccagatgagtgggtgctctgaatgtctggaaatctgccggggtattaagtagagaatgcctttctgcatcaggatttctgcatgagaaagttgggacaggtcagcttgctgaaccaggtgagtgggtactctaaatgcttgaagacctgcctgggtgtggagtgaagagggttcccctgcagcaagatctctgcacaggagtggaggtgacttaggttggtgaaccaggcagacaggtgttctgaatgcatggagatctgcctgggcatgtagcagagagcccgctcccccaccatgccacaccacgccctgcaccaggatctcttcacaggaagggtaggacagcttaggctgctgatccaggtgagcttatgctctgaatacctggagatctgcctgggtgtggagtgtagagggtctcactgcatcacgatttatgtccaggaagcgtggggttcagttttgcctattcttaaacctagaaaaaatgaatagtacattgcaatgtcttactgcaatcttaatgctcaggtcccatccattaaggcccccctagccaaaattcagtattactgaaattaataactttgtcaaattagcagctggtaaatatttttctattgtacatttgatgaatatgttctgtttggtccttatttcaacagtctctcagctgtagtctgccttcacctttgaaggtattacaatatcccctagcctatgcatgggatatctcaacagatttgtctttgcatgccatctttgcaagtaagatcttagttgcatccaactttctccaggaacacaggtatgacactttctcttgagtagatttgtttgacacacacttattggaaatatgagtacatctttttgtctaaattaaaatcaacagacattcctgttagtatcctcaaaggcttcctcactgtggaagctttaatagtgttctctcatgcct

SEQ ID NO: 5097 - DNA, 1219 bp, Homo sapiens
gtagttctgtaatctgaaaatggaagagatcaaattgcaaaagacttttaagagaatcataagaaaatgaatcaattgtacattaagaaaattgttacttagatgttatgtgttttaggaaagaaataaaattaataaatatagaaaatgataataactgcagaaagaactgaagaccaacagacttgcagaatgtttagaattatatgttaaacacatttaacatctaatatataatatcacccatagtaattgtttaatatgtgttaatgaatactatgaatactggacataattagaaagcccttgtacatatatttctattattgtgtgggtatttgttttgagcaggaaggaagatgagaatccttcaacaaatagcaatgtcaagattgtattattatagacacttttttcaggaaaatttaaatttaagagagaacattgggcaaatttgctaatattttgcaaatagagcttcacgtattcttataagctttcattagtaagactcaactggtcttttttcatagtccaatttctatttccttatttgtagtcaattctatacataggatcatattactgaagctttgataaactgcctttgaaactactagtcatgaaagaattgtaagactcagtaacattcaagcaaagaaaatttctaaggtggcactgggtcaaagttaaagacttttcaatctgttgagtgttgacaattaacatataaataacccctccatttcaaaagctactgtgtgtgtgtgtgtgcgtatgtgtgtgtgtgtgtgttcattcctcagtttgccctcaagcatatattcaagtcagtatggaaatttttaagagtgttctttgtcatttcttaactgacacagctcatgctagcctggtttatattctcaactatgcattgacaccaaagacactaaagtggagtgatgctaattcctgttttaaacagttaaattccaactcagtagtgcacaatggctaacaaagaaggtctttgagtattgacattctagatggacaaacagatgcaaattaagtgatttaccaagtatctcacagaatattaacaaagcaatagttattatcatcttctattctttaaatcccattgacttccacatgtctttattagtgttcttaaaacccacaaaggtatttttatatagaacttaaaaatacataaaagcataaataagaacat

SEQ ID NO: 5098 - DNA, 1171 bp, Homo sapiens
ggtgtaatcccgcgcccggcctacatgctaatctttaatgctaatcatgttctgcatttttctttaacaattggggttttaaaaatcaaagtacatatttttcttggttttaaaaataacattttgttgtaaaaaattgttaatatgaagtgtacaaattgatagtgaaagcctctctgaaattccaaccctacctccaaggcattatgggtttgatttgtgtactgtgtacttccaacccaacgctggctcactggaaatcatcttgagttaaaataatttttagtttgcctattatctagccagtttttaaatatatgtacagatggttcttgatttatgtgattcaacttataattttttgactttatgatggatttatcaggatgtaaacctatcataagtcaaggagcatctgagtatcccatgtatattcatgctttattacacaatgatctgattatttgtcagcacatttttaaattctctaatgaaatgtgtggcttttgtttatagactgtggcagggtataccattcctccaggacatcaggtgtgtgtttctcccactgtcaatcaaagacttaaagactcatgggtagaacgcctggactttaatcctgatcgctacttacaggataacccagcatcaggggaaaagtttgcctatgtgccatttggagctggtaagatgattatattttagattggaaatgtttgttctgataacatatttgtctctgtcaaaatattccgaattgtgtttacaaattatctctccctttcctcatagggacatttttgcaaacttttttaggagaagaatctttataagttggagaaaaatatttcctttgtaccaaatggaattgttccataaatccttatataatgcttcactacttcctaacctgtctggttttattaggtctaatttttatagaacatccttgttttcccttacaatggtatttaaagctctttgtggattctcttttaaagaaccattggagtcagcacaccattcagggaataacagattactagcatttcacaaaaaagcaaaggcagtcttttaaaattaaagctcttctcgatcgttagtcaacatttttgctctctgaatatccgtatgagaaaatggtctttaaatttgggcaggttgtgtgtag

SEQ ID NO: 5099 - DNA, 1178 bp, Homo sapiens
aagcaatctccccacctcagcctcccgagtagctgggaccacaggcacacgctaccatgcccagataattttattattaatttttgtatagagatggggtctccctgtgttgcccaggctttcttgaactccagggctcaagtgatcctcccacctcaacctcccaaagtgttgggattacaggcgtgagccaccatgcccagccttaagagtgtttgattttcattcattttcctatatatattatttctgttggggaaaaaattccaaggaagataaatagtaggctgttggtacatttctcaacttacttataaagctttttagatatataaggttaatttatgaagaaaatcataagatacacaatttaagataatatttttaattttattttttatttgttaaataaatttttctcctttcaggtgtcacgtcttgaaattttaaatgtcctcagtgactctctacctctggcagatgatgttgaccttcagcatgtagcatcagtaactgactcctttactggagctgatctgaaagctttactttacaatgcccaattggaggccttacatggaatgctgctctcgagtggactccaggcaagttatatgaggaagttgttatgacattttatgagtgataaaagaagtacaatgtcaaaatttccaccttaaaaaatgctattttttaaacaactttggtaaaactgtatagaaacataaatttacctttagttgaatgttccatagttggaatatgggttttgcagagaatttataattatgaagtttgatgtctgtttctttaacattaccttaatattggcaaaaacatgttggtgtttgcaaggatattatttaaattgggataccatgaattaaatactacaaacaaaaataattagagttttttgtttgtttgtactttaacttttaaaaaataatcagttaaagttgttgttttgaagctcacattgttccaatctggccaataggagccccttttgtatggctcctgtatctttatgacatgtcctcatcattcttgaatcacttcctcacttccagatacagtaagttattcttggccaggtgcagtggttcacgcctgtaatcccagcactttggcaggccaaggcaggaggatcatttgggcctagtttgagaccaaat

SEQ ID NO: 5100 - DNA, 1138 bp, Homo sapiens
ttgcacatatgttcactgtgaaatgctgaaattccacatctctgagtttcagaatcctactactgtagtattttaagagccatattgaattccacttcttccataaatcttttctgaatctgtccaaccttaattgctcctcccatatttccaggtgttgccaaagcagttttacctctgggataatacctagttaggtggatgttggtctcccataccagatggtgaactcctggaaagcagtggcagggtctctttcatcttcatattccccatagcacctcacattcagggtacattgtggtatcaaactggtaaaaaaaaaaaagtataaaattctcatctttactatttttctgtgattcattcattcttgtttcgcggaatgggattattcctgctggtaagtacattgttcttgagtagaagttgggtactgtaaatgccacaggggaagatcacttatgaatactagtacaaaacaaatcaggaaagaatagatctctctgcatacctagtttaaacataacttgtagcttccttccctctgttacacagcctttgaagttatgtttttagtagtaaatctgtagatacgtgaagctacaagtcaaatattttagctcagttcccccttttctggcagccatccaccgaactgcagggacaagttttcacagataaagaaacattttgtgggagtttttatttttgtgctgaaaaatgtagttcagtgatcttgctatccaaggcttttagtaagttgtgagcttggagtgagcagccttgtggttcataaggttaattaccatatttacaaatccattaatgacttaaaagaaagaactggcctgatagggtttatctctctaaaaattgcagccactagccaatcaggaatatagaaacccaaaagagatcgtagaagtgacaagagtaacggcaataatgtgttagtggagaagatgctatcagagcaaaaacaataagtggaaactaatcaaaacaattggtcattttaatgtactcatatcatatgtcttaagtaactggtaaatcatgaaatttgcttatttcacttaaattattttgcctgaattttattatgtaattgttattgcttatttaggatgcagca

SEQ ID NO: 5101 - DNA, 1201 bp, Homo sapiens
tgagagaggtgaagaaatgatagaaaaattcttctgtcatattttctaacttttccctgcagctttcacttctgcctcacacttagaactttctcctccactccagttgttaggtcagaaatgcagtcactttcactctgactgtatgaagtatatttctaatgttgaacaactttctcttttccttattctctctttcatagaagggccccatgcacttttgtgggattgtaataatgcaaacagcagtttgagatggcttgcatccctgttgttgaagatgccacgggcgttcttgggctgagttcatatttccaagacagaaaagctcaaagatgagtttctggcttgtcaacgctcagctgatctacaggcggctacttgtaattccttgaatgcagtgcttgcttgctctggctctggctcccctgctttggaagtaataatccccagtgtctacattttaaaacttaaagatgttaccttgggaaataaataggtagcctcaaaacattagttgctggcatgattattgttatattcttggaaacaatatgttagtaaaagctacagtgctgttttcttcttcggtcactctttggtagaattttattttattttttgtatcttcatgtaagaatttttgtgcaatgtttatgcaatagcagtttaagtgcatttgattatttaaaaaccacgcatgtttagcacatttcactttgtatctaattgtcttagactaatcaattttttggaatagatctttggcatcctgtaccacgggaatcgccatggtatctgttgtgacatgtacgcagactcttttctgataaatgaagccgctcatttaaaaaatgtataggagttaggcagctctggtatgaattctttcccattctttagcttttcacttccttatctgatcaccactttgattattatggagatttggggttcgctgcaaatttgaaagaagggatcacagtaattttcttacagcagttaaagtggaatatttgttacctatttcttcagcagtatgcatggaagtatagttgctcttttaccttggaaagcaaaataagagaaaaaatagccctgaggttttttgtttctccttcttagcaaattcatgtttcttgctgtgcagtaaaatgacattggcttttctcttctatgaaatagttaatcagtgtagcac

SEQ ID NO: 5102 - DNA, 1198 bp, Homo sapiens
ccctccacacctccctgcaagctgagggagcccgctcccgccttggccagcccagaaaagggctcccacagtgcagcggtgggctgaagggctcctcaagtgctgccaaagtgggagcccaggcagaggaggccccgagagtgagcgagggctgtgagggctgccagcacgctgtcacctttcattaggacctgctaattggtttcacatgtgtgtggaaccatcccaggactggattccaatatgaggagagaaatgggttatttcactgaaaggtatgactgagttagactgaagaaactcttatatgacactgtactatggctttaatgagcattagtgttaggatgacattttgtttagagagatattgatggtaaaaaagaaaaggatttgaactccagttcaccatttcctaagcatgaccttgagctattcattcactctatgtagtcatttaataaatatttattgagccctatataggccaagcactctgtgaggtgatggaaattctcctgccctcaaaaagtaacagtaattattatttgcaatctacctccctaaggcataacaatgcctatctttcagagttatgtgtaataggatttgtaagtggatttttttttgtctcataattgtctacttggctccaaagttagagacaaataggtgaaaattaggagacaaatagatgattggtaaacaccagtcattaagaggcaaattcattctgctactccgcttaccactgtactcactaatcttgaggggactactgaattgtaaatcttcagcctcagaaagggttctgtgtcttttccttttactctttctcagtgccccttatgcataatccaatggagtattccaaggaaaatatttttaatgactgggggttgcctgcaataagttgagcctgaaatctcatttttcagttggatacctactcatgtcatggatctgtagtattctttttgcttactccagcagtaggaaataatatagggacagaactcaagagagagaaaatgagcaatagggcaatgaggcacactcccattgtctggtagaaaaaagatgcatgagtcttccatatgtcaagtagatactacaaaggtaccaggcttgaactattgtgaagcaagttcatcctagactgtgacttactaagagaagagaccccagcagcaaaagc

SEQ ID NO: 5103 - DNA, 1239 bp, Homo sapiens
ttgggattacaggcgtgagccaccgctcctggccccgatttattaatagatcttataaggacattttaggcctcacgcatcagtttcttaggacaagcttttctctgcactgcataataaatcagacggcagtgcaacaaaaaaacggtgatgatttcccgaagaacaaaccaagttcagaagcctccctaattgtcagaacagcaggtagcctgggcggagctctgaggctatccttaaacaggcgcactgagacgcaaggcgctggaaacaaaagagctcctccttgcgcccttccgccgccccacttagtcctgctccgccccggacaccccgcggccccgcccctgtgcgcgctggttggtcctcgcaggcatgatgaaacttcccgcacgcgttacaggagccaggtcggtataagcgccagcggcctcgccgcccgtcaagctgtccacatccctggcctcagcccgccacatcaccctgacctgcttacgcccaggtgagccgggtcctgcgccccgtgccctgcgccccgcgccagcatcctcctcgcgtgccctggggctgctccggaaggaaggggtggaggatgcggtcttcagcctggcacccggcagacgcggttcgcgggcgcctgctgatgctgcggctcctgcggtagggagggcggggcggacgcctagcgattgttacgcacctgacagctagcggaaggacctttctgtcctggttccctgaagcatcgagagggaaccgcggccggcaggccggaccgctccggagaggaggcagcggcagtttgagcccctgtaaatgttatatgtgtacttttttttactatgtggcgtcgaagcctgtggacattttcgcggtccgggtccctgcggcggacgggtcggatcgtgctcgtggccagggcgcagtcaggtgtcgcgtggtcctgatctaggaagagactgcggccttatcaccgtctcggtgtctgctttcaccttcaactgcccccctcctcacctggaccgctcaccctcctcctcccctctcaccccgccatccccaccagtccccacctgtctctgtagactgcaagactcatcaagtgacttgctgagcaaaccctgccgagaagaggtctgtttagggacacaggcgaccaagtacagaaaaaggcaaaagaactagcatgcctttttcaatggctgtcattttgcagggctggcttcagatgattgttat

SEQ ID NO: 5104 - DNA, 1166 bp, Homo sapiens
tcccaacccggtcattgtcatctcagatgccggcgatggtcacagaggcacagaagtgacccctgagacgttcacagctggctcccagggttcataccgagactctgcgtacttctcagacaatgactctgagcccgagaaaaggtctgaggaggtcccgggaacctccccatccgccttggtgttggtacaggagcagcccctacccgagccagtcctccccgagcaaagtcctgctgcccaggatagctgcctggaagccagaaagagccagccagatgaaagttgtctgtctgctttgcacaactccagtgacctggaattaagagccacgccggagccagcacagactggtgttccccagcaggtgcatcccacggaagacgaggccagcagtccctggagtgtgctgaatgcagaacttagcagcggcgatgacttcgagacacaggacgatcgcccctgcaccctcgcttccacggggaccaacacgaacgaactccttgcctacaccaattctgcgctggacaagtccctgtccagccactccgagggcccgaagttgaaggagccggacatcgaagggaagtacctggggaaactcggggtgtcagggatgctcgacctctcagaggacgggatggatgcagacgaggaggacgaaaacagcgacgactcggacgaggacctgcgggccttcaacctgcatagcctcagctccgagtcggaggacgagaccgagcaccccgtgcccatcatcctcagcaacgaggacggaaggcacctgcggagtctgttgaagcccacagcggccaatgcccccgacccactgcccgaggactggaagaaggaaaagaaggcagtcacgtttttcgatgatgtcacagtctacctgtttgaccaggtatctgttccctctaaatcattttctatacacatccatataaggattccaaaatgtgctaggaaattgagtgtggtctgttttctagttgccattttgaggcagcagattgtgattactcacaaaaagtaatttggggttggttagagttctaagaatatgcagaaatgtcatttgctcagggagttcgtattaaattaagagaaagagacccgaatgctcttcctgggtcttctaatggagtcttcctgaattagtcacc

SEQ ID NO: 5105 - DNA, 1148 bp, Homo sapiens
ggccgctctggcagacctgtgcccgcctcttagcagggtgtggttctcagggtacttgggtgtgatttaattcttcccttctccttgggttcttttgtgtcccattttcctcgttcaccttttacatttgatctcatttcatcatttcagcatctttttactgagagcctgctctgtgtcaggtgatgttctggacactggaaacacagtggtagctggtcctcagtagggtgtatgttctagtgaggggaaataatgaacagaaagaagtgctaatccctcaggaggcgagatgggtgccggggtaaagcagccagggctggtggggttggagagggtggtgtcgtgttatttcatcttctgtgtatttatgggagttgagatttttcatggagcaagatggggttacaaatcattgtgtttgttgtttccaccctgatgttctccttcctggagctcctctaccctgtgaagtggtcaggtgccaccagctcttcttagactcttggattctaaatgtggagagggcggtcctcaccccaggcacacaggctctttctctttcacctcatttcccaggtctggccattgttccctgtgggaattctgtggaggcagcaacccctcgctgggctcttttgacactgtggggccaccacggggtcctcacccctgcacctctttgggacagtgtgtacatcagaacaagccatggacttggggagcaggagcggactgtaatcctgagacacaaaaccctgaacatcataatcccggatgttgaaatccctaaagatcaaaatttctaacctctcaaatcccgaaaatataatgctggaaaaaaacaatttaaaaattctttaaaacatacacagagataccccaaataatactttactaggtaggtttccaggtattccttagtccagtcaagttgatgctgtaaacatggcacccataggcatctccttaaaccatgcagacagtaacatgtaatagtttctaacctgatgcagctgtgctgtgatgatgattttttcagggattttgatctttgaggatttcgacacttggggttagggtgtatagaattgtgtcttttgggattctgatccaaacccccacggttggagttgagcagctttatc

SEQ ID NO: 5106 - DNA, 1229 bp, Homo sapiens
ccaaagaggtcatgagaaccacgtttgcaggtgcttagtgtggctgtggggtttagcaggcacgttgggaaaaggcacgcctgcagcagggatgccaggctgtcccgaccttaggcattgctggacaaagagccgggcagggagggtggcaaagggcatggacagcaggaggaggagttttgaggactgcccattagctaggtttggtgtctgtaccatcgttctcccagtctcctgtctctcaggagccacaagctgaggttttaaaattggagacaccataaggaaagtagtgtttggggtgaacagtaaatgaaatgtgggatctcaggtgtctgtggtgtaaatgagagtgcttcctttggtaattgcatcataagatctttgcgataatcatgtccccaatggactctggtgtgtttttcccgtttgatctttactgacatttaccgcagagtctcttatgctggtcccatcaggcagcccagcaaatcatcgaactccaggaagctgcacaaatcaacgcaggcttacagccaaccaacctgggaaggaacaacagcctgcacgacatgaagacggtggtgaagacctggaggaaccgactgcccatcgtgtctgacgacttgtcccactggagcagcatcttcatgtggaggcagcatcattaccagggtaaaccgacctggtccggcatgcattcatcatgtaattttccagacgccccacggttctggtttcgtctctgtgttttggtttggtttggtttggtttttttttcccccaggttttctattttggggtagggaatgacaggtcggggtggtaatggtacagggaaagatgaaggtggtagaagaagtaaagttttgttttttgtttctgtacctgttacatttttctagttggggcagaatcgtacaggccggggggatcaatgctctgagccatggcactctgcgttgaaggtcccatcccaggacgagttgtgctcaggtggctctgcgtggccttttctggttttcctggtccccctcttatcccctaaacctgtcaggcatccacgtgtttagagcagcctttgtcattttatgatttggttagccaagatggtaacactccactcaagaattagcaccttttaaaagttgcttatggcataaaatacaaagtaacgagggtttatcacagagctgcccattttcataagccatgtgtgtgtgtgtttc

SEQ ID NO: 5107 - DNA, 1099 bp, Homo sapiens
ctccagcctgggcaacagcgagactccgtctcaaaaaaaaaaaaaaaaaaaacaaaaaacaagcaatataatcaaaaacaaaaacacaacaaccttaaagctgaaacagcaataagtcaaactgccgcggcagttcacagttttacctggggtacctgctccctcattgcaaggcaagactgcatttagtatatatgtgaccaagaagaatgagagaagtggaaaacactggagaacagaaagtatcaagaacctttcatcaggcaatgccaaagcgctctgctcttttcctcttctttgcctctgtatcctctgtggttccagttccagctgaacttgtgacaatcccaaatcgctccttcctctttttcagtttcttatcatcttcagactttctggaaattgaagagacattcaaaccaaatctttgagctctttccttcggcttatccaagttaaccataggtgtgttcagatgacagacttttgttggaactgaagaaatcccaaacctagctgcctgagcagctttcttactctccaagctcacaggtacactgaattgttcggccctcttctgcattctctcagcctgtggtatttcagatgtaattttcaccactttcttctctgctgccacatcaacagtttttttcagggggttcttcctatttgacaaggggtttttttcttcttctgtttcatctcctagtacatcttcatttgcctcctcttcagcatgttcttcaagatatgcctggagtctgtggataagatcttgctttattcccttggtctccaaaccacaagaagacattcttgctttagtttagcaagcttcagcttatggagctccaccatctcagttaccatcttgttacccctccgggtgtgctcttttaataattgtatgtggggtggggtgcggtggctcaatcctagcactttgggaagccaaggcaggcggatcacgaggtcaggagttcgagaccagcctgtaataattgtatgtgggccaggtgtggtggctcacgtctataatcccagcactttgggaggccaaggtaggtggatcacttgaagccagtagtttgggacc

SEQ ID NO: 5108 - DNA, 1175 bp, Homo sapiens
aaaatacagcacactgtgaaaatttggctcgattttcctagtagccaatgcagaaagagaaatgagttgagtgggataatctggtaccccagaaaagcatggctgttccggctctgaggcttgagaggagcttgtctggtgggagattggcgggaggtgtcggtggcagcctctgactaggctgtttctgacagtgtagtgtacaccccctacccccacctcactcccattctgtggcaccagggcggtcctgcctctgaaggacgggttctctggggctgtttgtctgagcgtgtgttccctctgttccttctggaaagaaagtggttggccaggtggcaggttggctcctgaggtgtctttgtgccccccgggtctgctgattctgcagagacaccggcaggcgggtcatgggtcatctctgaagggaattctcaggaaggctttgtgtgatctcagcctgcttcctgccatgctgtgccttcactgtaaccttttaagatacttaccatcttgccttcctgacttcagagcacgagcggctccgcaaataccactgaagaggacacactctgcacccccccaccccacgaccttggcccgagcccctccgtgaggaacacaatctcaatcgttgctgaatcctttcatatcctaataggaattaacctccaaataaaacatgactggtacgtgtgctgattgcctgcctgtctgccgtagccattatcccatgttccaggggctcctgtggcacaaggtggggggaggtcgtctttccaggccgttgaccggtgaaggcctttgtggacttcccagaccaccactctggtcgtgtcccagctccctggagggcagggtgtcatccagaccttcccgaagcagcagtgccgaagtccgtcccttgccatgagtgctgtgggcaggtgcatttgcagacattctggcctttagttggctggccctttatggtgtaacacaaaggcttgcgtacctgagagcgccagatcccaccccggctgtcctgtggctccaggcagggatggcccgcatcctgtgtttctgcatcaccctggggcatcaagggctacagggtgaggtgacccggcactgtctggagagacctcaggcagcactcacgcccaggctgcagggattgtggccctccggctgag

SEQ ID NO: 5109 - DNA, 1184 bp, Homo sapiens
gtggatcgcttgactccgggagttcaaggctgcagtcagccgtgatcaagccactgtctgaaaagtaaatgctcgtctgaaaagtaaaaaataaaaataaaaatagactgggcgcggtggctcacgccggtaaccccagaactttgggaggccgaggcggggggatcacgtgaggaaaggagttcaaggccagcctggccaacatggtgaaaccctgtctctactaaaaatacaaaaattagcttgctgtgctggtgcacgcttgtagtcccagcgcggcctcttcccaccttttaaggtagagagcccaggctgaggcgcccctctctctaactgcaggaccctcggatttttgctgtccaggcacctcgcccttcgcttcatggccttctagtagttccagggtgttcgcagttgtgacctgcttcccgtgagcctctgctctacgcccctggatggggcgtgcattccctacccagcagccctcgcgcggtccggcacagcggacaccaggactccaaaatggcgtcagttggtgagtgtccggccccaggtaaggctgtttggactccgtggtggaagcaggagccagggtccagggtccagagccacactgggagagaaggaagctgcggagctgcctgccctttgctcaggcacttcgccacgacctcacttgaggcgcgccagaccccgctccgcctgcccaggcgcgccttcctgctgcccagggcctgcgccaaccgggttaggcgtggagggtgaaggcatctggggcacgcgcttctgggcctgggaatgcgccgccttgggccactgttcctctttccgctaagaaatagccgcttccctctcccgctgcgacccagttgctttgcacttgaatgttaggcgcagcttttgcccttttttcccaaggcttaagctcagatgaagctccaggaggagctcaggactaggactgtacctgataccatgtaaggttcgatgcatatatgttgaatcagagaggcgaggtgacctgttcaaggtcacaactcgtgcgagggctgagctggtattcaaacctgaggattcgtggtaaatgaactttattctctaggacggccttatgactagcaggcttttccgagacacccatgtgtaaatcgctacattcatcccgctgtgcacactgatgattt

SEQ ID NO: 5110 - DNA, 1184 bp, Homo sapiens; identical to SEQ ID NO: 5109

SEQ ID NO: 5111 - DNA, 1099 bp, Homo sapiens
gcaggggacgctccgggtttgtgcggcggctctcggggcctgtggcaccagcttttgagtatttttggcggtgtcaagtcttcggcagcgagaggagcaaagtccgaagaatgaatggatggtgaacgcctggacttggttttgttagagtgggagatgagccgtggttgttagtggaaggtgttcacgtgattgtgaagcggcattttggattttgtcaaaagttaacagtcccctccagttaaagttttaagagtttattgtgcatgcagaggaacagctggcaaattgttccaatggcagcttggaaagctaaatgaggaagtgcagtgatcttgattgtaattggccattatcaacttgcattccttctagggtaagtcgagctggatcagcctcgcatctgtagctgattggttcagtttatcatgcggacgagaaaaaagcttctttcctggtcagcgcacacttttcagggaaataaggaattgttgttgctgttgtgtttgagacgaagtgttactctgttgcccagtttggagtacaatgggccaatctcgactcactgcaacctccaactcccgggttcaagcgattctcctgcctcagcctctcgagtagcggggactacaggcacgcgccaccatgcccggctaatttttgtatttttagtggagactgggtttcactatgttggccaggctggtcttgaactcctgacctcatgatccgcccgcctcggcctcccaaagtgctgggatttacaggtgtgagccaccacgcccggcctgttgtttttaagagagacagggtcttgctctgtcacccagggtggagtgtagtggtgccatcatagctcattgcagtctccaactcctgaactcaagggagaaatcaatgtattttaaatgccttacatggctgtgggtggttggcctagggccgtacccaaaacatggactccatttaatttttcattagcaagtctgacattcagatgcacagccttcacaaacacattcagtaaatatagtgcaggggtgtccaatctcttggcttccctgggccacattggaagaagaattgtcttggactacac

SEQ ID NO: 5112 - DNA, 1177 bp, Homo sapiens
aacctgtcatatttccaacctttttagacatcagagactacataaaggggaaagaccctataagtgtgaagaatgcgagaagagcttcaaacagcgctctgacctctttaaacaccacagaatccacactggggagaagccctatggatgttccgtctgtgggaaacgcttcaatcagagtgcaaccctcattaaacaccagagaattcacactggggaaaagccttacaaatgtcttgaatgtggggaaagatttagacaaagtacacaccttatccgacaccaaagaattcatcaaaataaagtgctgtcggctgggcgtggtggctcacgcctataatcccagcactttgggaggccaaggcaggcagatcatttgagatcaggagtttgaaaccagcctggccaacatggtaaaatcctgtctctactaaaaatacaaaaatgagccgggcatggtggtgcatgcctgtaagcccagctattcgggaggctgaggtaggagaatcacttgaacccaggaggcggaagttgcagtgagctgagatcatgccactgcactccagcctgggcaacagagcgagactccatctcaaaaaagaaataaagtgctgtcattttgatatgtttctatgtgacttggcctgtttcttttcttgtccagaaccacattccttgccatttggagtatatcagtcaattatggatcttccttgagtatctcctacaagataggttcaatctgtcctgagcctcattacagactgatagtttcagtgagtgaggaatgaggaagtagggggccttctgaaatgtgagctgatgccaggtaagagacttctgatgataagagccaggctgacatgtaacggggttctgtccttgttatctgcgctctacctttatgtattatttttgagactgggtctcgtcgtagccctccagcgggagcccagtggtgtgatcgtggttcactgtggcctcaacctcctgggctcaagtgatcctcttgccttaacctcctgagtagctgggaccacaggcacacaccaccacacccagcttttttttttttttaagagatagggtcttgctatgttgcccaggctggtctcaacctcctgggctcaaggaatcctcctgcctcagcttcccaaagtgctggaattacagacac

SEQ ID NO: 5113 - DNA, 1190 bp, Homo sapiens
tcgctcaggctggagtgtggtggcacaatgtcagctcactgcaacctccgcctctcaggcccaagccattcttgtgcctcagcctccagagtagctgggactacaggcatgcaccaccatacccagctaatttttgtatttttagtagagatggggttttgccatgttggccaggctggtcttgaactcttggcctcatgtgttccacatccagccttaaaatcaaaaggttttaataacttaattttaaacggaaaaaatgtaaagcaagtgcatattttgaaagcatagagtcggccaggtgctgtggctcacacatgtaatcccagcactttgggaggccaaggcaggcggatcacctgaggttgggagttcgagaccagcctgaccaacatggagaaaccccgtctctactaaaaatacaaaattagccgggcatggtggcgcatgcctgtaatcccagctactctggaggctgaggcaggagaatcacttgaacccaggaggtggagttgaggtgagccgagatcgtgccattgcactccagcctgggtgacagagtgcaactccgtctcaaaaaaaaaaaaaaagcattcacgtcaatgtcaagagaacctgctactaatgctttctttgataggcagtatgataggttggaaagaatataaactgggatcaagcttgggttccacttaccagctgtagtatgttgagcaaattatttaatctgacactcattttcttggtttataaaacatgaaaaataatgtctaccttctgggtacaggattgaattagattatgcatataagtacctggcttgtgtcgggtgcggtggctcacgcctgtaatccagcactttgggagggtgaggtgggcggatcacaaggtcaggagttcgagaccagcctgaccaacatggtgaaaccccgtctctactaaaaatacaaaaattagctgggcatggtggtacatgcctgtgattgcagctacccaggaggctgaggctggagaatcgcttgaacccgggaggtggaggttgcagtgagccaagatcatgccattgcactccagcctgggcgacagagcgagactccataccccccggccaaaaaaaaaaaaaaaaaattaagtacctgccttgtgctagttactttaatattttggaaagaatagcaagcgatatgagc

SEQ ID NO: 5114 - DNA, 1207 bp, Homo sapiens
tctgtttgcaaatcttgatatatgaagtgacagtggagattgtacagttttttcctcgatttgtcaggatttttttttttttgacggagtttaacttcttgtctcccaggtaggaagtgcagtggcgtaatctcggctcactacaacctccacctcctgggttcaagcgtttctcctgcctcagctttccgagtagctgggattacaggcgcctgccaccatgccctgctgacttttgtatttttagtagagacggggtttcaccatgttggccaggctggtcttgaactcctgaccgcaggcgattggcctgcctcggcctcccaaagtgctgagattacaggcgtgagccaccacccccggcctcaggagcgttctgatagtgcctcgatgtgctgcctcctataaagtgttagcagcacagatcactttttgtaaaggtacgtactaatgactttttttttatacttcaggaatagtaaagaaacacatcataaaacctcccaggacataaaggtgagcacagaccctgtttggatcaagtcagttcctggagcctgaatgatgactgctgaatcacgggaagccacgggtctgtccccacaggctgcacaggagaaggatggtatcgtaatagtgaaggtggaagaggaagatgaggaagaccacatgtgggggcaggattccaccctacaggacacgcctcctccagacccagagatattccgccaacgcttcaggcgcttctgttaccagaacacttttgggccccgagaggctctcagtcggctgaaggaactttgtcatcagtggctgcggccagaaataaacaccaaggaacagatcctggagcttctggtgctagagcagtttctttccatcctgcccaaggagctccaggtctggctgcaggaataccgccccgatagtggagaggaggccgtgacccttctagaagacttggagcttgatttatcaggacaacaggtaaaaagaggtgaaacctattatgtgtgagcagggcacagacgttgaaactggagccaggagaagtattggcaggctttaggttattaggtggttactctgtcttaaaaatgttctggctttcttcctgcatccactggcatactcatggtctgtttttaaatattttaattcccatttacaaagtgatttacccacaagcccaacctgtctgtcttca

SEQ ID NO: 5115 - DNA, 1090 bp, Homo sapiens
aagcagcagcttggcttgttttattaaagacataacaattagagggtttgagggctgaaaagcgagtatcgctctgtgtggcgctgcgttctcccctgtggatgcccagagcctgtgctgagttctcagtgatgcattttcacatatgaacactggtgagcaaagtgaatgtggctctgaggtgtttctgtctcttccccacttgaggttcggctggctcatcgggaacaggtggctctgtatgtggacctggacgacgtagccgaggatgaccccgagttggtggactcaatttgtgagaatgccaggcgctacgcgaagctctttgctgatgccgtacaagagctgctgcctcagtacaaggagagggaagtgagtggttagagaacaatggcaaacaaagggcgaggcgtttaagcttctgtagagaggctgctcagatactgatgttttctgagcaggcagaaaggaggggcacttctgcctggtgttctctgtgctctcctttccccatcctgttgctcttttttttttttttttttgttcttctcctttaggtggtaaataaagatgtcctggacgtttacattgagcatcggctaatgatggagcagcggagtcgggaccctgggatggtccgaagcccccagaaccagtaccctgctgaactcatgcgcagattgtgagtggtctctgtcgggaaagatgtagggattggttctccaggatcttgtttgtgactgttttctccccttagtgagctgtattttcaaggccctagcagcaacaagcctcgtgtgatccgggaagtgcgggctgactctgtggggaagttggtaactgtgcgtggaatcgtcactcgtgtctctgaagtcaaacccaagatggtggtggccacttacacttgtgaccagtgtggggcagagacctaccagccggtacgtgtggagcaagaagcaggaaagcacttacccattagttgttttgtagagattaatttgatcctgtgatgcctattgttttatttggttgtaaaagttgcctgtgtgttcgcctttcattcttgggtatgtagtggtctttctaccta

SEQ ID NO: 5116 - DNA, 1205 bp, Homo sapiens
gcaaaggaggaggtggcagtgcccgctacaaccagggccggagcaggagtgggggggcatctattggttttcacacccaaaccatcctcattctctccctctcagccctggccctgcttggacctcgataacgggggaggggtgccctagcatcagaagggttcatggccctttcccctcctcccccctcagctgggcctggggaggagtcgaagggggctgcagagagggtagagaagggactttgcaggtgaatggctggggccccaaatccaggagattttcatcagaggtgggtgggtgttcacaatatttattttttcatttggtaatgggaggggggcctgggggtatttatttaggagggagtgtggtttccttagaaggtatagtctctagccctctaaggctggggctggtgatcagccccaacagagaaaatgaggagtttagagttgcagctggggaaggggtttgaaggaagttggaagtggggaggggtgggggcatctggtctcagaaatggaccagctggatgcagggcaggggactgagggtgcttgagtaggatgtgagacttcatgggcctgggttctgttgagttttttcagtatcaatttcttaaaccaaattttaaaaaaaacaaggtgggggggtgctcatctcgtgacctctgccacccacatccttcacaaactccatgtttcagtgtttgagtccatgtttattctgcaaataaatggtaatgtattggaccccatgtgtggcttctgtgctgtcaccatcagtgcctgagccctggctcctagcagaggtctcagagcctctgtgactggctcattttctgccggcttttcacttcccttggcacctgtcccccaggaggcgggcctagacaataacctctgatctccaaattgcccaccctctgggcctctgagcatcttcgtttgtacaacagggagaattgtggggaccaaatagaatctgtgtgaaaaagcaccttgtcacctgcaaaatgctctttgaacatgaggcttttttttttttttttttgagatagagtctcgctgttgtcgcgaggctggagtgcaatggcgcgatctcagttcactgcaacctccgcctccccagttcaaatgattctcctgcctcagcctcctgagtagctgggattacaggcgcctgccaccacagtcagctaa

SEQ ID NO: 5117 - DNA, 1186 bp, Homo sapiens
ccccgcctacggtgggtgggatcgcgcggcagagacaaaggagatcagtagggccggacatagctgcgcagggaagtagggtgtcagtttggggtggtgggcttttgcgggggctgtgggggggttatatttaaactcccagagccgttaagttggttcgtagtctgatgcgcgcgcaaccagggtggtggcggagtgcgcatgcgtggttcccgggcgaagggaacgcgcgctcaccgtgcgcgctcgcggccgggtggtagtggcggaggagaaaggggtcggcgcacgcgcggttgagtcctcgagtagttcgggtctcgcgggcctcttgttttggtctcgcgggctagtagggcgcacttggcggggaggcgcttgggcgcgagactaggcgtgaagagcagagctgcgcgcgcactcgggaaaggggggaagggagcagggtccaggcagggggggttaggccccctgatccccctcgttaccccgactggcacggaataaggggaggaaatgatcgagatggcggcggagaaggagccgtttctggtgccggccccgccgccgccgctcaaagatgagtcgggcggagggggcggccccacggtgccaccgcaccaagaggccgcctctggggagctccgcggcgggacggagcgtggtccgggtcgttgcgcgccatctgcggggtccccagccgctgcggtcggtcgggaaagccccggggccgcggccacctcctccagtggtccccaggcgcagcagcaccgagggggcggcccccaggcgcagtcgcatggggaggcccgcctgtcggatcccccggggcgagccgctcccccggacgtgggggaggagcgccggggagggggcgggacagagctgggtccccctgctcctcctcgaccccgcaatggctatcagccccaccggccacctggggggggcgggggcaagaggagaaatagctgtaatgtagggggaggcgggggaggcttcaaacatccggccttcaagaggcgcaggcgggtgaattcggactgtgactctgtgttaccctccaacttcctcctggggggcaatatctttgatcccctgaacctgaatagcctcctggatgaggaagtgagccgcactctcaacgcggagacccctaagtcatccccccttccggccaaagggc

SEQ ID NO: 5118 - DNA, 1105 bp, Homo sapiens
gctgctgctgacgtctgtcccttgtccttgtccacctgctctcctctcccccaggctgacctgtgctcgccctcggatctcctccagggcactgcccgggggctgcggaccgcgctggaggccgtgaagcgggtggggggcaaggccctaccgcccctctggcccccctctggtctgggcggcttcgtcgtcttctacgtggtcctcatgctgctgctctatgtcacctacactcggctcctgggttcctaggccccaaaatcggccctccctcacccctttcccttcctctctatttataaggtccctgctccacccgaccccacctgcggtgccttcagccccaaccaaagacactagtgcacccccttcacagacactgacctcagaggccccactctggtgcccccagaccctgggcccccagcctctggcctccctccagtagccccacgagtccccacctctcagtgctgacggtgccttcatgtccccgccggccctgcccctgccctctgtaccccgtgaggggtggcaggagctggagtctcccccttcctcctgtgccctccccttccccccccaacagctgctatgggggggctaaattatctctattttgtagagaggatctatatttgtaggggttcggggcccaggccgggtccctatctctgtgtataaactgtacagaccgtggccgccctgcctgtgtgtgtgtgtgtgcgcgcgcgcgcgcgtctgctccgcgtgttggtggctgtggccatggctctgtgcccaccagcatctccctcctgagatgccggcctctcatgctcccggagcgtccgccaaccccccgtgtcacctcccttctgttatcgctgacagctttcttgcgtctcatttgtcgccgagccccgagcgcacggtgatgctcgggtctgcccccgaccccctgccacaggccggaagccgcagggggcaccgtggggaagctaacccggccccttcccccaggagtcactgtgccagccccaccacatcctggaagaggagggggccccgggaaggggcctcccctacatcgctgctgtcgtccacgccctgctggaccggcctt

SEQ ID NO: 5119 - DNA, 1158 bp, Homo sapiens
agtatataaaacaaactgtaaacgatctgatttgatcttgacctagcaaccctctgatgctggcagggcgcagatgagcagctgtgttagaaacgtggacacaggcacagaaggggagctggtgggtgcatcagctctaggtagactggcaaggtcagaaggggccttcaaggtcacccagcagccctgctcaccccagcaggggctctcaaacacctgagtcgggatgctccgccactcctcccggagatgccagggccagtgccagagcccaggtggcccatctaatgtgcttgttgtgatgcactgatagcctctgccccaaagcaggcatgccttttgttcagcaggcagcagcatgtgtgtgtgtctgtgtgtgttatgtcttgtgtctgcgtgcatgtgtgtgtctgtgtgtatgtatgtgtttgtgtatgtgtgtgttgtgtctgtgcatgtgtctgtgtgtctgtgcatgtgtgtctatgtgcatgtgtatgtgtgtctgtgtctgttcgtgtgttgtgtttatgtctgtgttatttatgtcgtgtgtgtgcgtgtgtatgtttgtgtgtctgtgtttgtgtgtgtgttgtgtttatgtctgtgttatgtcgtgtgtgtctgtgcatgtgtatgtgtgtttgtgtctgtgtgtgtctttgtgtgtgtgtttgtgtttatgtctgttgtgtgtgtttaggtctgtgttgtgtgtgttgtatgtgttgtgtgtgtttgggtgtgtgttgtgtgggttgtgtgtatgtgttgtgtatgtttatgtgtgtgttgtgcatgttgtttgtgtctgtgtgtatgtatgttgtttgcgtgtgtgtgggttttgtgtgtgtgtgtgtgtgtgtgtgtgtgtgtgtgtgtgtgtgatgtgtgtatgattcctgtgttgggatcaggtagatgcgggtgatgtgactaagatctggggccatctcttagggatttaatggcttcttgaggagagacagtcatagggaagttccgtcagggggttccccagacgggggctagagggaggtggcactggactctgcgtgggggtcctggggaagacttcaccggaggcgcaggcgcagtgggagccgaacattgaaggagaattccccagccttctgcatccaggcagaggac

SEQ ID NO: 5120 - DNA, 1333 bp, Homo sapiens
tggccagcaggaccaggctcgatgctgagtcaaagatcaacttaggaggaaatttgagttttgggtgagagcgactccctggtggcctcagccctgtgacactcacatccaggacagttcccggtgccaagcgctggttatgtgtggggggcttgactccctggtcccaacgaggtctcagtgtgttgcccaggctggtcttgaactcctgagttcaagcaatcgtctcagcccagcctcccaaagtggtaggattacaggcgagagccactgcgcccggcccctggtcccagttctcaccacagcccctgcagtaagcagtcgggtatgtcactgacagagcagaagctcaggggactaaaactccccgcctgagttccctggtgaatggatggtggggccgagttccattccaggctggatggagcccagagctgtgggtctcctaccctcccatcccctcattccagcttgatcttccttaagagactcatacgccccaaccccttggtctgagtatcttagattgttctcgtggttcctccgtccttcaccactgaaggctgctgttcattctctctccgtctctgtcccttattgctctcacgtctgtctctgtcatcttttcactccttgtccctcttactccgttctttggcccccaatgaaagctgagtcagagacagacgcttcccctcagttcccagtgcctcccttgggggcccctccttggctgtatccgtcagtggctccagggtaagtctgccccccccaccctcgtggggcggggagcccggggcagcccagaggctggggggagggggtggacttttggcccgtttcggttattccctccatctcgtcaacagctgccgcgcgcaggcttagctcattcctctgacctgccaggaagcagagagacccacagagcaggagggaggcagaaagtggagacggacctgagcccgaggaagaggcaggcagaggctgaggctgattccaccccagcctgcctggacaaccctccttagccgcagccccttccagttccctaggggttctgcccctccccctctctggggcaccagccccccagggtcctgcatcccaccatgtcgatggctgtggaaacctttggcttcttcatggcaactgtggggctgctgatgctgggggtgactctgccaaacagctactggcgagtgtccactgtgcacgggaacgtcatcaccaccaacaccatcttcgagaacctctggtttagctgtgccaccgactccctgggcgtctacaactgctgggagttcccgtccatgctggccctctctggtat

SEQ ID NO: 5121 - DNA, 1202 bp, Homo sapiens
gcacccacgcaccccgcacacgcagatgtcttcacgacagccacttttcttctgctcggagcgttccttctacccaccatgcccggtcaacagatcctcaaccactagacaccagaggtgtctacaccgcaggctcggcgaggctcggggacggtcccctcctctacgcggcctcccgtcccttcggctcctaggaggcgcggcatcctgtaccttggaaaacaacgctcttccagtcctactgtcctttagctggacacggaccgtgcctcgttcatctctctgacaaaggccgggaactcaagaaatcatttcttgagtgaatgaaagagtaacggtaggaggtccgaacagaacgctcagaacctccgggcgactaggcttccgggtgtcggtttcgttggctcccgagagggaggaggaagcgcttcttctggggccgctctaggaggaggactcggtgggctggaggactcggagcaacgctcaaggcatctgcgcaggagccaccctaggcggggaggcggggccgagcgaagcccggtgcggggcacggggaccccactggccaatgaacgactcagctctgcaggaggggcgcggcgccacgccacctggaagtgaaagagaatgtccatcgcttttatcagattattttattttcagaagttgtcatctcgggtactaggcttagtacctgggtgacgaaaccatctgtacaacaaactcccgtggcacaagtttatctatataacaaacctgtacgtgtaccctgaacctaaaagtttttaaaaagtactgatcggccgggcgcggtggctcactcctgtaatcccagcattttgggaagccgaggcgggcggatcacgaggtcaagagttcgagacaagcctgaccaacatggagaaaccccgtctctactaaaaatacaaaattagccgggtgtggtggcgtatgcctgtagtcccagctactcgggaggctgaggcagagaattgcttgaagtcgggagaaggaggttgcagtgagccgagatcgcgccactgcactgcagcctgggcgacagagcaagactctgtcttaataataacaataataatgcatgaaagaaaagaatcaagtattataggttgggcacgatggctcctgcctgtaatgccagcactttgggaggccaaggtgggggtaccacttgaggccag

SEQ ID NO: 5122 - DNA, 1188 bp, Homo sapiens
cagtttgcaagctctttcaggtaccgtcagccacatgccaggccttcagtggggtgatgttttttgttgtttttagaaaatactgctattcactcatgggaaatagggacgagggcttagatttcagctgctttgcattagacaatgatttctcttattataagcagagctctctattaaccaaaaacacttggctgttagacatggtgtttaattgctgttagaatgtatttttgtcacactgccctataataagccaaagaactgtttgtgccaaacagtgaagggaagctaggggaggatgaaaactgtgcctgctactccacctcccttctttcgaggtcgtggtgttttgtttgctgttttagctgtggtgtgtgtgtaccactcgtacctttcacaggaggacacctcatctgaataccagtcaggacctgagacgcgttgagcccctccccacagtgcccacgggtaggtgcgccgctctctgccccttccgggagctctgctttttctacctttagagatttctttcatcctctattacgtaggcctgactttttgcctaataaaggaaaaacaaccatctatttagcactctttttttttttcccaaaatggaaatgactttctctctgatttttacaaagcaaaaaatgagagtaaagattaagaaactacaagaaattatggtgaagggagtaaagatggccatgaatcctatgactgccgatggtttggtcccaggatgcattattcagatattttctccctgtgggcttatgtaaacagaaagctaggtgagtggaagtaacacgtcaaatactgatttgtggctgggtgcggtggctcacgcctgtaatcccagcactttgggaggccgaagtgggtggatcacctgaggccaggagttcgagactagcctggccaacatggcgaaaccccatctctactaaaaataaaaaattaaccaggtgtggtggcacacgcttgtagtcccagctactctggaggctgaggcaggagagtcgcttgatcctaggaggcggaggttgcagtgagccgagatggtgccactgcgttccagcctgggcgacagattaaaaaaaaaacaaaaaaaaaacctgatttgcaacaattttgtgtcctagcctagagtttaccgtgctattgaaaatatctttcggc

SEQ ID NO: 5123 - DNA, 1197 bp, Homo sapiens
gtctttttagtagagacagggttttaccatttggggcaggctggccttgaactcctgacctcagctgacccacctgcctcagcctcccaaagtgctaggattacaggcgtgagcccctgcacccggctgaaccttcccatttctaatcagaactgaccctgggatcaactgacctccttggagtgtagaggcatcctggttgtctggggactttgggtgggatctctgccagttttgcctgcagcagaaggaaagggaagtgacttatcttaggcacctgctttgaacaaggcactgagctgagcacgttcacatgtatctactaatttaatcctgacaacagtcctgaaaaagatactttccccattttccatctggggagactgaggctcagagaggtcactggcctgcccagtatggcgctgccagcaagggttgagctcatattgagtctgggtcggtgtgaccctacagccatgcccttgacactatgccattcctgccctcctggctggttgtgttctgctcacttccaagaatgatttccaatggcttgcaaagttacagttagcacagtatgacaagcaaggcatgagactgggagtgagtgggaacgaagaggaaagaaagtgagaggaggctgggcatggtggctcacacctgtaatcccagcactttgggagaccaaggcaggaggatcactggagcccaggagttcaaggtcagcctgggcaacatagggagacccaatctctattgtaaaaataaattgtaaataaagtgagaggaaaaggcagttagaaccagaattagacaactatccaaagttccccaggccctgtgtactttgtaaagatgagatacagacttgattgtgagcttcccagcaaccaatgcaaaaagggcaaccagataagtcatgtgacttacgctgtccacaagctcaaaacaaagcatgtgttgagggaaagcacagctcctctggtgttggcaaaaaaaattctccctaaagatcctcgtaaaaagaagtcacttggtttcattgccggttacaagttgctggcaaccaagtgccactggcaggtatcttacagcttaatagaagcagcattacattggtctaaaagaagacaagagaattacaggcccatttttaggagtggatacacctctttctataggtagaggaacttctgt

SEQ ID NO: 5124 - DNA, 1195 bp, Homo sapiens
cttctgaattaccaaattatggggtttcattagaagaaatgacagcgataacatgattaataggagtttttttagcagaatgccctcatgttaagccttccgaagcctttcttttaaacccctagtttttctcgcaatgatgttatttttgttttttaatatggaagactagaggttactctcagtcaaaaaaatatgaaacagttcactaagacccacagaaaaccctaccgtctgcttctcctacagagcgtttaattagtatttcctagataaggaacgtagatggtcgtggtaaaagacagctattttcaggcacggtttctcgtgtgctttaattacagaaagcactccaaagacctccgccagctgcagccctgcccctgagtccccgatgagttccagtgagtcggtgaagagcctgaccgagctggtccagcagccctgtccccccatcgaggcgagcaaggacagcaagccaccagagcccagtgacccgccagcatccgactcccagcccacaaccccgctgcctctctccggacactcggccctcagcatccaagaattagtagccatgtccccggagctggacacctacggcataaccaagcgggtgaaggaggtgctgacggacaacaacctcggtaggttctcctctcggctgctgagtcaggaggtggcagggagtttgcaggaggagcaggtgaagggcgggccctaggccaagccaaccacagagtctcaacttgtgtaggcaccctttgagaacatgaaacatcctatagttgtgaacagtaaggagcgtgccgtctgcaggtcagtccccacctcctccccaccctgcacccccacggggaccagttagaagatgagcatggagtcagagtggactcgggaggatccacacagactgtctcttttttttctttttttttttttttttttgagacagtcttgctctgtcacccaggctggagtgcagtggcacaatctcagctcactgcaacctctgcctccccggttcaagtgactgtcgtgccccagcctcctgagtagctgggattacaggtacctgccaccactcctggctaatttttgtattttcagtagaggtggggtttcaccatgttggccaggctggtctcgaactcttggcctcaagcaatctgcccacctcagcctccaaaattct

SEQ ID NO: 5125 - DNA, 1317 bp, Homo sapiens
aaaatacaaaaaattagctgggtgtggtggcgctcgcctgtagtcccagctacttgggaggctgaggcaggagaatcacttgaacccagaaggcagaggtagcagtgagccaagatggtgccactgcactccagcctgggcgacagagggtgactcctcaaaaaaaagaaaaatagctaaaatatgattgtaccactgcactccagcctgggtgacagagtgagaccctgtctctaaaaaaaaaaaaaagaaaataaagaaaaaagaatgtcagcatgtcagcgttcctccaaggagtggctttgggtcaagaagacaggctggctctcctaaacaaacggctccccacggctgggagaggcagcaggcccttactctggcctgagtcttttgggaggggccctgctgggccttctcctgccacctaccttcctggaccatctgtgcccctgcccacgcagtaccacactccccagactgtggaacgcatctccagtgccatctgggggccagttactgtacctggtccccaggcagagctcttggcctggcagcatccaggcaggtattaagtgcccagtgatggtggcacatgggtggggacggagccacatccaagtctagccctctgattaggaggatgacagtcttggaatttcttgttctctttctcctagggttctcgttctcccagctccagcctttctagtttcgaggcatgaggcaaaccattgctgtgggaatagcagtgaccattggtagggccatggtggccgggagaggaaacctcagggtcaccccagagcctgtggggagacggagggtgagctgttgttggagctgcagaaacgccttgaagggcagcatgggcgatgaggaatgccattgcagcctagaaattcggtttctggaggtttagcctgattttgaagagtatttaagaacagagggctccagaccaggtgtggtggctcacatctgtaatcccagcactttgggaggcagaggtgggcggatcgcctgagatcaggagttcgagaccagcctggcccacatggtgaaaccctgtctctactaaaaatacaaaaattagccgggcgtagtgacacacgcctgtaatcccagctgctcgggaggcagaggcaggagaatggcgtgaacccgggaggcggaggttgcagtgagccgagatcacgccactgcactccagcctgggtaacagagcaagactctgtctcaaaaaaaaaaaaaaaagaacaggggcctctgcctcagtttgcccgggagccagccagggcccatcctaatttggagcac

SEQ ID NO: 5126 - DNA, 1164 bp, Homo sapiens
gccgggatcgaagcctgtgagggacccttacggtaggggtgatgcagggtgaggagatgagggctttaaggagcgggcttgggagtggggaaggagctggaacgtgggtgggttcgattacaggtcacctcggggactctggggggatctgcctgtaaacctcgacgtagcctctcgggtctggcgctgggagcttcacgggcctgcagggagatgacacggaaagggtcgatcgagggtgctgaataccagtccaacggtgcctgaaggccgtggactgcaatgggcaaggagacagtgaattccagttaactaacgaaaaggaactcaaggatcgctgcaacccaggagctggaggctgcagtgagctatgatcgagccacctcacttcagcctgggcgacagagcgagactctgtctcacaaaaagaaaataaataaaaaaagaaaaagaactcagcgcctttgggctggcatggaaggactgtggttggttgcaagggcattccaacccagaaaactgcgtggggtaggaaggtggattggtgatgcctcaggtgagagagatgaggctggagaggttgtggggggggggaggtctgatcacagatgctccccggtgcatcagctgagcaggctggacttgtcccaaaggccctggagagctcttgaagggttttaaaggagtgatgaagtcaaatgtgaattttagaaagatcctgggaagggaacgggcagatatgaaggtgtggaggctggtaagccagtgaagactgccccaacgtccatggtaaaagtgcccaaggtcctatggaaacagcatggcatgcctcatgaattaaacatagaattacccatgatccgcaatcctgcttctgggtatatatccaaaggaactaaaagcagggtctggaagagatatttgcacacccatgttcatattcacgacattattcatgacagcccaaagatggaagcaaaccaagcatctatcaagatacctgggccgggttcagtggctcacgcctgtaatcccagcactttgggaggctgaggtgggcagatcacctgaggtcaggagtttgagacctgcctggctaacatggcgaaaccctgcctctactaaaattacaaaaacttgccgggcttggtgaggcacatctgt

SEQ ID NO: 5127 - DNA, 1182 bp, Homo sapiens
tgcccaggctggggtatggtggcgtcttcatagctcactgtagcactgaactcctgggctcaggcgatcctcccaccttggcctcccaaagtgctgggattacaggcactacaggcacctagctaactttctttttttttgtagaggcagggtctctgtcacccaggcttgagtgcagtggcacgatcatagctcactgcagccttgaacccctgggttcaagcaatcctcccacctcagcctcccaagtagctgggattataggtatgtgccaccacccagctaatttttttattttttgtagagatggggtctcgccatgttgcccaggctagtttggaactcctgagctcaagagatgctcccaccttggcctcccaaagtgctgaaattacaagcataagccaccatgcctggcctcccttcctggccttctggtctccagactggagagagggccacaaagtcctgcccagacagagggctgctaaggctggggtggggctgggggtgtgcagaagggactctgcaggggctgacctctgagtctcaggggacagggcaaattttttttttttttttttttttgagatggagtcttgctctgtcgcccaggctggggtacaatggcacgatctcggctcactgcaatctccgcctcctgggttcaagtgattctcatctctcagcctcccgagtagctgggattacaggagtgcaccaccatgcccagctgatttttgtatttttagaagagattgggcggggtggggggtggggtgcgggtttcaccgtgtggcccaagctggtctcaaactcctgacctcaagtgatcctcccgcttcagcctccccaggtgctgggattacaggcatgagccaccgcacccagcagggacaggacaattttgccagctggagaaggggtggcccccaaatgtccccttcaccaccctcctgcctcttccttcagaacactttttccctgaagccctcctgggtagccccctacccacatgcctcagcattgggaggtggggagtatgggggtcccccttctcctcagccccatttggagtaatgtcctgtgcagctgagctcacaactcctcctccacctgtcccttcacccggtgtcactggcaattgctcacttcctgggcctgcacccactcagctcccct

SEQ ID NO: 5128 - DNA, 1188 bp, Homo sapiens
ggaggttgcagtgagccgagattgcaccactgcactctagcctgggcaatgagagcaaaactccatctcaaaacaaacaaacaaacaaacaatttatttggactcttaaatgcttttggttggttggcatttctttgtgaattatttgtcaaaataattttttgtctataattggatgaatgctttgcgacaaatttgaagttttaacaaaagaaaatacatttttttaaaaggtaacaaaacttacttacttttatagtcttgttacgtgaaattaaggaaagaaaaatgaaaaaaattcagtaacttaggcttttaaagccatatgaaattctagaatgttttatctttcacctgaaaaacaactcagttggatcaaaaggtcctatttatcatatattctttactcttcaatttgcattttttttttttttttttgtgagacagagtcttgctctgtcgcccaggctggagggcagtggtacaatcttggctcactgcaacctctgcctccaggttcaagtgattctcctgcctcagcctcccaagtagctgggactacaggttcgggctgccatacacagataatttctttttgtattttttttttttttttagtagagacagggttttgccatgttagccaggctgttctcgaactcctgagctcaggcagtctgcccacctcgtccttccaaagtgctaggattacaggtgtgagccactgctcccagcctcaacaatttgcattttttttttgaggtggggtctcactctgtcacccaggctggagtgcggtggcatgatctcagcccactgcaacgtccaccgcctgggtttaagtgattctcctgcctcaacctcccgagtagctgggattacaggcatgcaccaccactcttggctaagttttttgttttttttttaatagggttttgccatgttggccaggctggtctcgaattcctgtccttggcctcccaaagtattgggattacaggcatgaggcaccacaactagccagcaatttccatatgtatagcactttaaactactaactcatggtctccttaaatgactaacagacatttaaaacaacgtttaggagttacaatctttattgaacagatgaataagcccaagtttagagaggctgagttactccctgcaagctaacatctctagtta

SEQ ID NO: 5129 - DNA, 1126 bp, Homo sapiens
agaggccattttgctatgccttcaccttttggtagagaataaatgagattgtctgcagaaagggtgaatatgagtttgaagagaggtttgaaatggccttgtggatgaataactcagtgacccacagacttgtcaattagtgtccaaggctaatggaagtcacatgacatgagtactgggaaaatcaggcaggctgtgggcagttcttggtccctcaggcagacctatgcagactggaagccagagtgaaaagctggtgcttctttttgggttggcctgagaggagtatggggtcagagtgagaatgacattgagagttgaggaccacaaagccctagccaggaagagagtgtagaatagcaatacagtatacttctaagtccctgacttatgatatttgtgcagatagaagaaataaatgagcaaatcagaaaagagaaagaggaagctgaggctcgtatgcgacaagcatctaagaacacagagaaatcaactggtggaggtggaaatggaagtaaaaattggtcagaagatgatctacaattactaattaaagctgtgaatctgttccctgctggaacaaattcaaggtactggttttaatgaaacttttcttcaactcacactggagcctggagataatgtagacagactccaaatagcagcacttgttatcacagaaacttgcagagataaattctgtgccacagcagaaaagtgtgaaaagtgaggtgcattttgaagctgtcagtcttacccattgcatcagtacacatgcacatatacatatgacagaatacttgtttctcaggaaattgaagatcatgagacaagtcttgatttatgttggcttactctgtcatggcttgttctagggattaggttttctgtagtttttcttttacagtcttgctctttgttttttcccacctcaagctggagcttgagtttaactgcaagaaagccctagagatccagcgtccctaattctatagatgaaaccgaggctgttttcagaatgattgatcttctgaagaaatgtattaaactggcagtatacacaaataagtggttttatttatgttgatttgtacaccaaatctgtaagatgtatggacttaaaacc

SEQ ID NO: 5130 - DNA, 1198 bp, Homo sapiens
ggtttgataatggtaagatgattatgtttagaaaaaaactatcagggttgaaaactgaaatatgtacacctgaaatttagaaaaagttaaaaacagccgggcgcggtggctcacacctgtaaccagcactttgggaggctgaggcgggtggatcacaaggtcaggagttcaagaccagcctggccaaaatggtgaaaccccgtctctactaaatatagaaaaaattagccaggtgtggtggcaggcgcctgtaattccagctactcaggagactgaggcagaagaatagcttgaacccgggaggtggaggttgcagtgagccgatttcgtgccactggactccagcctgggcgacagtgagactccgtctcaaagaaaagaaaaagttaaaaacatttacactgagataaaattatacctgttcagttgtcattgtctgtttttttgagatggagtcttgctctgttgtccaggctggagtgcagtggcgtgatctcagtttgctgcaatttccgcctccaggttcaagcgattctcctgcctcagcctcccgagtagctgggattacagctttgtaattatgttgatggatgtatttttgagtgtagatactatttttgtgtttgtgcttttagacctggaatcatttttctgataatgaggcagagcgggttaaaatgatggaagaagtggaaaaactttgtgatcggcttgaactggcaaggtatacctatggaactgctattgaagtcttcacttgagcttaggataaagtttcatttcttctttttttttctttagcttacagtgcttgaatgaaacactcacatcatgcacaaaagaagtaggaaaggctgctttggaaaaacaggtaatagaggaacacatcactcctacctatatgtagcatttaattctgctttgacctgtttcttcacctaatatataagtcaccaagtgcagggagtatctgatttctctttatgtttcccactgttttgttgttgttgttttatgtgttcggttttttggttttttgttttgagacagagtcttgctctgttgcccaggctggagtgcagtggcacgatcttggctcactacaacctccgcctcccgggttcaagtgattctcctgcctcagcctcctgagtaactgggattataggcgcacaacaccacacctggctaatttttg

SEQ ID NO: 5131 - DNA, 1099 bp, Homo sapiens
ttttctgttttgtttttgcttgttttttaataatagctatcttaataggtatgtggtggcatccaactgtggttttgatttgcatttcctaacagtgatgttgtccatttgtatatcttctttggagcaatgtttattcaggttatttgcccacttaaaaaatcaggttgttttcttgtgtggtaggagttctttatatattctggatattaactctttaccagaaatagattaccttcactatatttgtagatgtggccactacttattgtgtctaatatgccaggcgttttacaaacactgtaaagtttccttctcacaggtaatcagtccaaaaaccagcgtgccaaagcgtttccccagggctctgtccggactctgaagcactgcataaaggggtctgtctgagcccaatttacttccggtggggaagggaaagggaagacaccaccggaagcaaggaaggtgctgtgtaatcattaaggagcggaggcttttggagctgctaaaatgccggattacctcggtgccgatcagcggaagaccaaagaggatgagaaggacgacaagcccatccgaggtcagttgacatgggccggagctcggagctggggcgggactggagcggagctgccttggcactggagaggagctggattcccgctcctggctctgtgctctggcccttttgtgcccctagtaatttagtctggacaccggccggattaacttgcctgccttctcagtctccctcatccactacaagttctgtattatctgctgatggaaatttttattcattctcagctctcgggtcttgaagaagtcacgcaccctgcttggcctaataggccttgaaaagttctgcctggcggtgctcggtcacctgatcctctttcctctcctcctccttccccctgtgacagccgggagctgtcactgtgtagccacaattctgagacataattttcttaaaaaaattatttgaccagataatacattcacagggttcacaattcaagaggcagaaaagatatctttgaaaagcctcgcatccttggccccagccaccaacttctccacagaggcaactaatgtt

SEQ ID NO: 5132 - DNA, 1102 bp, Homo sapiens
catattcttttacaatctgtaataatgttgaaataaaatttagtttctctttactctgtgccagatgaaagtctctttttaccaatgtttttcgtgatagaagacactctaattcattcacttgagctactttgcttcaataatgatgtatttttgagctaatcagttaaaaataattttgtatctcttttgctttttatgtggacagtgataattaggggtagcaaaaatactgttaaatcttacttaagtacaataaaactattatattaacttaaaggatattataatttcaaaataaaaaacgattttttttagagacagcatctcactagtttactcatgctggtcttgaactcctgagctcagcaatcctcctgcttcagcctcctgagtagcctagcatattacagtaatgttttctaaaacgaatcttcttgtagcaatacacattaaaatatttacagatgatgttatgactgggatgtgtttcaaaataaaacaagagaaagtgaatgtcagctataaaggaaaccagattgaccataaattgatcattgttgaagctgagtgatagttcacgggggttcaatatactaaaatctttacttctatatatttttgaaattttccataatcaaaaggggataaatcttttgttgaaaagagagcctagcccacctccctgattatgctgatagtacgacaccaggcatagaggtattaaatgactcgttcaagaggatgcttacccctgccagagttttcactccaacagaatcaataaaattgacttgagtgaaatccaaaatgacagtgtggacgttatcccctgggggcataaatctttgcatttcctcaggaaatgtgcttttgatcactattgggggatattttacttcaccatcctcttcttcaggcttggtagcatcctctccatctacttctgcatcctgtgtcaaaaattaaaccaaaccagaattttatgaacaactcacatttctggttgtgagaaagatttataatggaaaatctgctcttgtgttcttaagctactgactctaccagaccccttgtaaaatatttgtcatattctagcctt

SEQ ID NO: 5133 - DNA, 1176 bp, Homo sapiens
ctatgggatggactctttctatcttagggaagagatctctttgctgatgctgagctacactcaccaccactgctcaatgaaaagtcctggttgccctagaaagaactgaaagagaaatgacttcaaggtttgggattaactggagaagaaaatgttacatttctaagggagaggacaacagatgtctcatgaaactgcatctaaccccataatgtttcaaatttttgtctttgtgaaggcaaattataatcatgtgggtgtttgcctaatcaccacttgttacacaaagtgtcttgtgctagtggttagcttatatcctgagatggctatggggccatacagattttcccccaaaacctatgaatatgagtgtactattggagttattttcatttactaaaaatggaatcttaaaattcattggaataattactgaaagggactgaaaatccagttattagtgaggttttatgacgataagcatttggaatatattatactgaattccatttactctgaatagcacctaggttagttagaataattaaaatcaggcattcacttttatgagttgaatgaattgcaaactcctaataccagctttttttttttttaattttactttaagttctgggatacatgtgcagaacatgcaggtttgtcacataggtatacgtgtgccatggtggtttgctgcacctatcaacctgtcatctaggttttattattattattattattattattattatattttggggtacatgtgcacaatgtgcaggtttgttacatatgtatacatgtgccatgttggtgtgctgcacccgttaactcatcatacagcattaggtatatctcctaatgctatccctcccccctccccccaccccacaacagaccccagagtgtgatgttccccttcctgtgtccatgtgctcccattgttcaattcccacctatgagtgagaacatgtggtgtttggtttttttgtccttgcgatagtttgctgagaatgatggtttccagtttcatccgtgtccctacaaaggacatgaactcttcattttttatggctgcatagtattccatggtgtatatgtgccacattttcttaatccagtctatcattgttggacatttgggttggttccaagtctttgctattctgaatagtg

SEQ ID NO: 5134 - DNA, 1100 bp, Homo sapiens
agcataatgcctgctgtattaagacaggcactgtttggccaggcacagtggctcacgcctgtaatcccagcactttgggaggctgaggcaggtggatcacaagttcaggagattgagatcatcctggccaacatggcgaaaccccatctctactaagaatacaaaaattagccaggtgtggtggcatgtgcctgtaatcccagctatgcaggaggctgaggcaggagaatcgcttgaacctgggaggtggaggttgcggtgagctgagatcacggcactgcacaccagcctggcgacagagcgagactccagctcaaaaaaaaagacaggcaccgttcaataaatagtaactttgctatttactcttttcttcctgctgtgtctgttcagttatctctggttttttgggcttagccagtccttgaccctaggactttcacatggatatttgtgaagaatctctgattacataggatattaaggtgtggttgtactttaatgctactatatgttattactctcttttcctaattcttttttttttttttttgagatggagtttcactcttgttgcccaggctggagtgcaatggtgtgatctcggctcactgcaacctccgcctcccaggttccagcgattttcctgcctcagcctcctgagtagctgggattacaggcatgcgccaccatgcccagttaattttgtatttttagtagagatggggcttctccatgttggtcgggctggtcttgaactcccaacctccagtgatccgcctaccttggcctcccaaagtgctgggattacaggcgtgagccaccatgcttggcccccttaattctttcgtaggttcttgacaagctctgatttcttcctcccctccatcccctcccctcccctcccctccccctctttctttctctctttctacaaaaatctcactctgttgcccaggctggagtgcagtgatgcaaactaggctcactgcaacctccgcctccgagttcaagtgattctcctgcctctgccttccaagtagctaggattacaggaaagcgccaccacgcccggctaatttttgtatttttagtagagatgg

SEQ ID NO: 5135 - DNA, 1133 bp, Homo sapiens
atactgtaaatatcctggcactgcttttcagaattctcaaatttactttgggggtttctctctcagctttagatggtgcttctgcctatttaaaaattacttttcattctgtttttttcttcttcttatctatgaaacgtgtattatttgtgtaatttttaaagatttttttggtaaagccaagagaataatgcttctttctctcttttgttcattcattgttaaatatgttatttaaaattacaacatagtgaacatgctgttttgttgtacacccgagagctacagataaaagcaatagtctgtgtttttgaagcaattataattagtggaatagacggacatgtaaatcagaacttctcctgcagtgagataaatactgaaatagagatatactttggatgttaatgtatgcctgtcaacaagcatgggagttgatgtggagggaacacaggaaagctttcatagaaaatgggatgctgagttttaatttagttcaaggcttctcaacctctccactgttgcccttcggggctggataattctttgttgtagggactgtcctgtgcgttgcaggatgttttgcagcatccctagtctctacccactatgtagcagtagcaactccttgcccagttatgatagcaaagaatgtctctaggcattgtcagatattccctgaggccagaattgcccccgattgggaaccactggtctagattctagaaggatgagtagagatttcctggggctgggtaggatttaggattgttttttccaaaccaaaaaagcaggttaagaaaagacgttggaaagcatatttggtacctggcatgtactttagtttttgaggagcatagcgagaaataaggatctaggagttaggcaggatgtagatcctgaagggcctgttaggtcaggttgagggtctttgcctcaaccttaatctaaatggggattggtgtatagaggctggattatggatcgccggtggagcaagacatgcaaaactagagaccagggctattgacgtattctggggagggagaataagggtctgaacccagttagtcacagtgaaggtaaaagagaaaggatgaatttaatagctgtactgtgtcagacacatttag

SEQ ID NO: 5136 - DNA, 1317 bp, Homo sapiens
tacactgtatgaagtatatgttgatactatgacatgttgccaacaccttgagaagcattatttgtttctaataaaagtaatggctttgtcaatatattggtgggtttaaaactttgctgcttttttacataaagcctgtgcctttcctagaaagttaagatgtaaatgtattctcacatgtaaatttgaaagttcaggggtctattatgaaatgatacacatttttaaatgaaccataatttttttcactaagctgtttgccttccaaagtgtttacaccttaagccttaacatgtatcttcattcagaaaacagttatattgtcataccatagtaggaagaaaaacctttatttggaatatacactactgtaagtttgtacagatcatatacctaccacctgtctttgcttaaagagccttgattacataaatatgtaggaaaaaacatattgagttcaaaatttatatctaacattgtttatgttatgatttttttttaattgcaaagactaggtgtatatttttttctgtttttctaaatgacccgtggtacttaataggtgtactaaaattgtgttgggagcagggatttggaaatttctgagagatgtgtagttaatttagtaattctgtttcatgagatatgatctgttatgctagtggtttaataggcttgctatgtaagtagaacgtggctcaactagatatctttatatgtatgggcattactcttagtgatatttgtttcctgtcctttgttgctcatgctgtttaagtgcaggctgagacccagcctctttgtaagtacagtaaaataatccaccgttttttacagaccctagtcaaagggttaaaaaaattaagattgctttccatgtttgaaatttaccattgagagtcaatgaagttgctattttgagtttagcattgatattgtgaaaataagtgcaatttggatttcatgtttcttaatattcattcttgtttcacaaatgaatgattaaggaattatgcatcataaaggaacctaagtgaggtatatgatgagtgtattgtctttgcacacacatataggtatattctgaatacaagcttattcacattttgcttcctaatctttttgttgtacagggattcaggtttcttattcttacaacatgattgtttatatgtgaagcacatcttgctgttgccttatttttgatgcttttattcatgacaagaattgtcaatataagaatgtatatcttttttgcaaccaatttaataaaggagttgaaagaaagagtgcactgattgttaatattacaaagaa

SEQ ID NO: 5137 - DNA, 1226 bp, Homo sapiens
catctcagtatggttttgatttgcatttccatgataattagtgatattgagcatcttttcatgtgcttgttggccagccatttatttatttgctttggagaagtgtctactcaagtcctttgcctgttttttaatcatggtatttgtttttttaattgttgaattgtcagagccatttatatattctgaatattaactccttattagatatatggttagcaaatgttttcccccattctgtaggttgcctttttactctattgattgtttcctttcctgcacagaaaatctcaagttaggtatagtccagtttgtctatttctgcttttgttgcctgtgttcatggtgtcctatacaagaattattgccaaatccagtgtcacagagcttttctcctatgttttttttctaggagttataatttcaggtcttaggtttaggtccttaatccattttgagttagtttttatacatggtatgaggtaaagtttcaactttattcttttgcatgcgtatatccagttttcccagcagcatttattgaagagactgtccttttcctattgtgtagccttggcacccttgttcaagattgtatgactgtatacttgatcgtttatttttttgtctctctactccattggtccctatgtctgtctttatgctggtaccatactgttttgattcctgaagcttggtaatatggttttttccatttggatgggttttatttgggtttttagagataggatctccctttgttgcccaggctggctgcaaacacctaggctcaagcaattctcccacctcatcctccaagtagctgagactacaggtgtgttccactgcacctggctctgtaatatgtcttgaagtcaggaagtctgaggcctctagctttgtttgtttgttttttccctcaagaaagatatttggatatttgggatccctggagattctctattaattttagtatttttttatttctgcaaaaatgccattgagattttgagaatctgcagatcatttggggagtatggacattttaacattattaggtcttccaacccataacacagtatgctttccatttacttgtgtcttctttaatttctttcaaccatatcgtgtagttttcagtatacaagttttttaccttcttgaataagtttattcttaagtattcttttggatactgttataaaagtagggtagttttcttcatt

SEQ ID NO: 5138 - DNA, 1166 bp, Homo sapiens
atctcaataattttctggtttgaaaaattgagtttctgccaggtgtggtggctcacgcctgttttcccagcactttgggaggctgagacgggcgggtcatgaggtcaggagattgagaccatcctggctaacacagtgaaacctcgtctctactaaaaatacaaaaaattagctgggtgtggtggcgggtgcctgtagtcccagctactcgggaggccgaggcaggagaatggcatgaacctgggaggtggagcttgcagtgagcggagattgcgccactgcactccaacctgggcgacagagtgagactctgtctcaaaaaaaaaaaaaaaaaagaaaaattaattgagtttccttattttgaattttagatcacaccagcttttctaaggtgtaaatgggtgatataggagcctaggaacactcaggtgtaacttataagagcatcctgactttggattatacattcgtattggcagtaattaaatagcagtacactgaagtgtctatcagcttcaaaaacttcttgcatcattgtttgtgtgttaatgtgaatgtgtctctctgtgtgtgtgtgtgtgtgtctgtgtctgtgtataggtgctgtaatttagtcatgtgggtaaagttaaaacttgtgtgcttggctactctgtttaccagttctagggccaaaagagtcgtgagaagcctggctccttggagggatatatttgtctgctcagctttactttaggtaattggattctacctagaattcccatcagactgttgattggttttctgttcttttgtaggagttgagaagattgccatcaactttttaattaggccagagaaattgagcccctttcatcttcatatatcttaagtttattgatattgataaatgcattgtaggaaaggatacatgagaatacgatatggctcctgttgtttgggtaattaatcagggagtggttttaattgacaggatgaaatatgaatatgttaaagtgtctaaatcactcattttagggctaaagaagaggataacttgtttgctaataaaatcgatagaatgctttatgttttcattatgctattggcaatacaatcagtctcttagcataccatttttgtagctagactagaataaatggtgatcaatatcttaaaaatttgtg

SEQ ID NO: 5139 - DNA, 1149 bp, Homo sapiens
tctgagttcccacatctgtgaaatagtgattattataacacgtatcccatagggttattgtgagagttaaatgggatcattcatataaaacatttctgtttaaagtattattactgctaagaaggggttagcaaccactgaagtcacgcatgtgctagaggaagctgctacagtctctacctgagccattggtcaattgttgtcgatggttgacaccttcccattttcacagtgaagtgagtattctaaatgccacatcttgtcactgaggttcatgattaagtagatcagctagcattgcttattcccttctagcctgtgactgtgaccccaggggcattgagacgccacagtgtgaccagtccacgggccagtgtgtctgcgttgagggtgttgagggtccacgctgtgacaagtgcacgcgagggtactcgggggtcttccctgactgcacaccctgccaccagtgctttgctctctgggatgtgatcattgccgagctgaccaacaggacacacagattcctggagaaagccaaggccttgaagatcagtggtgtgatcgggccttaccgtgagactgtggactcggtggagaggaaagtcagcgagataaaagacatcctggcgcagagccccgcagcagagccactgaaaaacattgggaatctctttgaggaagcagagtaagtagttaatgagccagaggaattactcataaagctgaaaaaatattgtgagttaacagcaaagatttcctggcatggtgcttccatcaggaggttttgttagtcctgtgggtgagaacagattctgagccatttattttccagcagtcttgactgggcatttgggtgagtgaacgttggcacatcagtggggaccagccttctggaggctgcagtacagaatatgcaagcattatattcagtgctcctccttgcaaatcatgttctaagtcagtaaaatgggaggaatgctggatttagaagacaaagatccataattgagtcttggctctgatgctaggcttgtgaacttggatgactcaattcctgagcctgtattttctctcctgtggagaaggggtaggataatatatgccattaccttatgaagtaatgaaaggatttatatataaaataacaac

SEQ ID NO: 5140 - DNA, 1180 bp, Homo sapiens
tcctgatggagtgtgaagaaagaatctggagaagaacggggactaaatttctgacttggttgactcagcaggtggtagtgccttcaccctgatagagaccatccgagggattgagggcttctgtcttagatccgttggtttgggatgctctgggacagccaagctggagatgttcttcagggagctggatatttgagcctaaatctcaggaaataagcaaaagatgtaacatgccaaagcaagaaggtttgggatgtggaaaaccttcatgtgatgcggacggcgtgttagtcaagagagggcaagggaggtaaaaccgagaagaccaggttctcagccacgcttctggagtttgggattaatccataggcactacttttttccacatatgtattttctgaagaaaacaagaacatgctatgtatttggtcctgtgtactgagtaatggcagctgtagagctgcttctggcgggttgactcgcgtgaccatgaactcagctgatgtggctcctcctcccttccagttgctttgcggagtcaggccagtgctcatgccggcctcacatgattggacgtcagtgcaacgaagtggaacctggttactactttgccaccctggatcactacctctatgaagcggaggaagccaacttggggcctgtgagtaggggagtgtgtggcaggtcggtaaagcagtgttttggggtgtagtggaacatacatgctttgtaaagaccccatttcagaagcatttttatagctttgtcagtgagcacaaaataaggatcaggaccatgccttcctgagaagagtcatatttaaagctaagtaattctataactcacaaattggctttggagcattcactgataaggcttttggttggtttaagaaatgtgtctttacaagaaacttttcttctctctacttatgctccaaagttatcaacctagcatggtaaatactgaggcaaggatattttttcatctattcatccccaaatttagtgactttaaatgtatgcctggctcttgagctggggtggctgaaacagctggaggctggctgggcatttctctccacacgaacacgacctttcttttttctttttttcgagactgagtttcgctcttattgcccaggctggagtgcagtggcactatctcagctcaccacaac

SEQ ID NO: 5141 - DNA, 1243 bp, Homo sapiens
gaacagatgggggccatgtggctttaattaaccatctctgtttgtctccggatggcaccagaaacagcaggacctggcgcttccctggaatggagaagccttgaaaccactccagagccccagggactgtccatgggctcccctagctccggaaagcggcgtccaccgcgagccccggcgcctcgtccccagcgaagcgccggtgaccctcgcgcgtgcacgcacacgcactctcgcttcccaagctcacagatctccacgcgcacactcacaccgaggatgcgcgggctgccgcgtgcacgcgggttcacgtgcgtgggtgtgtggccctttgggggtcagcctccctgcgccgggctccggacacgtcgaagtggagggtctacacatccaccctttgttgggggagctgctccccggggctgatcagggtgggcgcgagcgtcggtgggtttcccgggagggaggctctcgctgctggacagacctgatgacgtgtgtgggtttctttccgtgtccttctcctttcggagtccctgccttcccagcctctcctgcgctcatctctccattgtcttttctgtgcattttgctttcttccgaatggactgtcctctctccgcacccactcccccgcccccgcttgttcgtttttttcgggctccactccctgcttgtgtccccccaactctgttgcctgtccttcccgcagccctgtgcagagcccgagtgcgcgctcaggaacccgagttcagctacggctgcgcagaaggcagctgctatcccgccacgggcgaccttctcatcggccgagcacagaagctttcggtgacctcgacgtgcgggctgcacaagcccgaaccctactgtatcgtcagccacttgcaggtgagggctgagagcggggttcgaggctctgctagcgcctcctcccgtccagacctaaggggcaggccctggggactccgcatccttccagcaatccagataggaagcgcagccagccggggagtcccgggattaggcttgtagctcaacctttcgccccatctcagtttgcacagttgcatccgccacacatttcctgccggcgcggtgagtatggaaaggcaggactgccgacagccctggctgccctgacccagagcctccaaaaggcctgattgtgtgtgtgttttttaaaactttagttttggaagtgtgcattaaaggtgatttatcctctttttaaaacccttgggtt

SEQ ID NO: 5142 - DNA, 1191 bp, Homo sapiens
aagaaagatgtcaacatgctagaaaattaattttaaaactaagttattccaacactaaaagcatacaacagcatgccaacagtaatatattattctccaagactttacctatgtaagtgttcaaaactctgcagcattaaacaacgtgtatgcaaattgttatggatacatttcagaatctaagaaatcaggcaagtgcttaaaaggccaacggtccaagggattacatctgcagtttaaaaagtaaatatatattctatcgtattcataaacaatatctatcaaatgggttacctccaaatatgaaaatctataacaacctatggttgaaggaatgctcagtttcatttgccaataaattggtttctcataacttgcatcaagtttaattttaagtaaagctttttatatgtagatattttgttgaatttgtaaatacacttaaaatgtagatgctatatgcttataggtgttacatacaaataaacatgcaatgtttatgttgtactgtataagaggtaagctaattaatgcagtgaatgggattggaaagcatctacttaaatatctattgggttcccccctccccccaccttttttgctgtgaaactgaaatagtgaacttttctacgtattgacagcagatttttcgatgaaatcttcagagctttgcctatggggcacagtaggcctagtaacctggcatgtttgatatatgtaggtaaagcataatttaaagtaatcccaggtaaagatggccctaaatactttcatgtctctatattcatttttcacagatccacctgtctcttgaaaatataaaaagacaaaacaggtttgccttggcatcagagagcacaaagattaaaagttactttaaatttgccaatattttgggagaacaataaaactacattttttcctcttccatactggtagatgcgaaatttatctgtgcatgaaagggtcacttctgtaatagtgcaacagatttggtattaaaaattaaatgtggttttaaaagttcctctctcttttgtaatttatgttcccaattgagtgtgaatgtccaagtaatggtgtatgtaatggtacaggcaaatgtgactggatttccctcaaaaaagtaactattaaacagtcttgatctctttgtgacttttaactttttcaaacatatattgcctaatg

SEQ ID NO: 5143 - DNA, 1177 bp, Homo sapiens
gtgcagaatactcaatagaaaactattgtgtaaatacatctggtgtatgtttacatagatttgaaaacactacctgaaaaaagtcaatgtaggtagtaattccacaactatttgtagcagctttcttactctgccaggtgctaccccagccactttacactcactttgtcatttcatcttctccacagccttttcaggtaggtactgttatagctcccattttttctacggtaaaactgaagtagagagatgttagtgaagtcatccagtgtcacacagctcataagtagaggacttaggatttgaacgttgttccctctgacttctagatgccaagttatacttcatgatgtgatgtaaactgcctaaaagtaagtattcttttttaaacaccgtactcctatataatctattttttccggttattagtaaagtttttatcatatgtgggatgtcaaaaaataattgtttactttagtaaaaagaataatcactgtctttaaaattgtcatttctgcagtgttgatgaatattatttctaaaaagagatttcccaatgatacctattatttgactgtctggaaaaaaatattccttccaaacagaattcagaaaatcaataataaaacaaggttttatgtctttaggtagaatttaagattatatcaagaagataaagagtataaagtgactgtagcagtttctacacttagtaaaaccagagtatagttttcaaagtgactatcattgacaaaattttgagaatactttgataactcagaaaaaactcttttaattatagtttaaaaacatttagtttgctagaataaagtatcttggatgatcacagcaattttggaaagcctgaatttccaaaatactcaaaatataacatttcttaatttgggctaaatcatgtggttgaacaaaagtttccttaggctaatttaaaaaaaaaaaaaaaaaagccaccaaagagaatgaagagtggtgacgacaagggcaaacagatgaaggctgcactggaagcagcctgttcaaatgaagaacgccagagtggcaaaatagtcaccaagcaattatttaagagggacatgtttattagttgtttttaaaatgcagttccaataataatttcaagctgtctccaataaagcttaaactcaataaaaataca

SEQ ID NO: 5144 - DNA, 1255 bp, Homo sapiens
aaaatttggtgtatctggtaaggtcccattttgaggtattctgtcctgatttccccataaaacattgtagtagcccagacattgaatacccctgcatctaaactctgtttctcccaggccatataaaacattcctagcaaacagcttctttcttatgataggtcttgcaaaagagcaagctgtattattaagagctgactatgaaagtaggaaagcctggggttgagtgcaggctttcacacttcctaatcttgtgatttcctgccaagctacctaactactctaagcattgattttctcatctataaaatgggggtaacaccagccctcatggttattgaatattacataaaacaaagtatggaatgtgagggcgatctggctgtgacatctgtcaccccattaatcgccagggttgattcggctgatctggctggctaagtggctgtccccttcctccctcaccactccatgttcatgcctcccaaagctgtgttctcagtcaaagaggacaaccatctccactagaagaggaccagtctttggtcaagggtatacgagtagctgcgcttccctgctggaacctccagacaagctctcaagtccatttgtaggagaacatagggtagtcaagcttccaagattccagacacatccaaatgaagtgctgcatgtggcagtctgcctttcttaaaaaaaaaaaaaaaaaaaaaaaaaaaagaagagtatgtgtagcatctgctagtgcctgagacatgtgtacctgataaatggtagataaaatgcaaaattttatttgtatttttatcaccgaaggtatatttgaaatcttagttttctgcagctatcgtttgagttttccatttgtatttatgctaatctaaaaacctaattatcatttgtaaaatatagcttttgagaaaatttcattcaagtttctaaataatctaaatttttggaaagatagtttaagttggaatagccagcatacccacaggggtaatgataactattctctagccttcatctctgtccttattgcctagcaccaatactgaatatttaccatgtgccttctgtgtatgttgccttatatcgactcagcactactatttttcaagagattttggtgctgccttatcaggtctcagagataggaggacagttaattgaatgatatatattgccaactgctaaaataaactaattccctacatgctctcataggacatactctctgctcctcattatcatt

SEQ ID NO: 5145 - DNA, 1229 bp, Homo sapiens
tgtagtttatgacttggcagtccttttattaatacaaaatccctaagtgactgtatatttattcctgaagttaatgaagtttaaagaaagattctagtttttaaaaagaagattttatttttttagtaacagcattggtacttttttttttttgagacagaattttactcttgtccacaggcaggcagtgcaatggtgctatctcggctcactgcagtctgtgccacctgggttcaagtgattctgtgcctcagcctcccaattagctgggattacaagcgcctgccaccagggccagctaatttttgtatttttagtagagactgggtttcgccatgttggccaggctggtctccaactcctgacctcaggtgatctgccggcctcagcctcccaaagtgctgggattataagtgtgagccaccgcacccggccagcattggtacttttaaactcttgcacattgtagaaactttcccttaaaggtagtttatctgataggcttttatactatatcaaataccaaaacttctattttaagccttttttgtcttctctcacttcaagttgtctttaaaactaccctgccttaactccttaattccccttaacataagacatgtgtaacctaaaaacccattcaccagttcatgtttgctaagtccagccattctcattggaaaatatatttgtcttattcttatgattatctatgatacaacactatttctggatctgttttcattgtcttcatgatttgaaatcatggtctagaaataattatttcatcttcatatcagtttttttttttttttttttttttttttgagacaaggtcttggtctgtcgcccaggctggagtgcagtggcaccatcttggctcactgcaacgtctgcctccgaggctcaagcgattcttctgcctcagcctcccgagtagctgggactataggcacgcaccactacaccgggctaatttttgtattagtagagacggggtttcaccatgttggccaggcaggtctcaaattcctgacctcaagtgatctgtccgcctcagcctcccaaagtgctaggattacaggcgggagccaccgcgcccacctttgtatcagtttttgtgtcataaaaaaatgagtgcgtcggctgggctcagtggctcacacctgtaatctcagcactttgggaggccgaagtgggtggatcacgaggtcaggagttcgagacca

SEQ ID NO: 5146 - DNA, 1188 bp, Homo sapiens
ttttttttttgtttctctgaaaacttggcatttgtaagatatctatgattttgatttgtcttggccaaagcccagattaccaaggaattacattttgaacatattcaactaagaattatctttgtagcaacttttcctttgccatattgaaattttgggaataaaatcagattttgttttaaaaaccagctatgtttctttctagtgccagaatgattttttctgtgttaaagcagaataaagcaatgcttatagtctatctaaaacttattttaagcatactgtggagaaaagagccccatttttgcatttgcagacctgggttcaaatgtttgctctgccagttagaatttatattgatttttggtaagttttgcatgtgaaaaaaaaatactaataataatttctttatttggttatataaaatttaaatgatcaaatatttaaaatacctgacacatagctggcacttacttgatggtagtagtctctcttttgccctttattctttctatatgtagggataagtgtgcaaataaataaatgtgtgtgtatgcttatgtgtatatatgtgtttgtactcccacacatacttatgtatgtacttatgtgtctgttgtcttctctctctctctaacctgtattgtgtaatattttatgtagccacttattctattaaattcagagggaaagaattcttataggaatgatatagttgttgaattcaggaaatagggattttattcaccacgtaaagttattttaaaagttattatgtttttgtgtcctagtatttctgtaactttatgttaacctgaatttttaaaactggaatatttataaatccttaaaaggggatctgatagatatttatgtttcttctacaaattcccagcaggcattggagaaatagcttttttcttcttcttcaacatgtaattcacagaataatatactgctccatcttgattagtgttcagaaaaatgtgcattagtcaacttgagatgtatgggaatataagaaacaaggtaatttatttattaaatgtccaaaaagagaagtgtcagttttgacaagatggaaaaatgcaagatgggagttgaatctttcttaaaaattgatgtttgtttcattcaggttttactaaatagcaaggcaccagtttcctgagaaggtttgtacagctg

SEQ ID NO: 5147 - DNA, 1112 bp, Homo sapiens
ctgggcttcctaaggctcactccatcctgagaagtttcactttaatgttatacatacagtgcttctaaaataaacaattaaacaattgcttccacaattgacacaaaattaaaattgatgcttttgggagatcaggcaaactgtagtaatatgatgaataaaatacagcagtggctgggcatggtggctcacgcctgtaatcccaacactttgggtggctgaggcaggcagatcacttgatgccaggagtttgagaccagcctgatcaacatggcaaaacaccatctctactaaaagtacaaaaattaaccgtgaatggtggtgcacacctgtaatcctagctacttggaagactgaggctcaggaatagcttgaacctggaaggcagagttgcagtgagtccacattgcgccactgcacttcagcctgggcaacagagagggactgtctcaaaacaacaaaaacaaaaaaactacagaagaatattgccaattattatcactgggtattgagattacgtgtgtttttcttccctctcttgcccactgtctcactctcttttctatctgtattataccctggaaatacctcatttatatgatgggaaaattatttttaagtgaggttgatacatttttataatgaaataattgaggaacctgaccaaatgcttatctgggtaaaaggctcctcctctgtagagaggtagtcccagagagaagcatctaccagcagggttaagattttctttaggagacagtgttaggtttatctcaatgcaggttaaaatgagtgatcaagaatgtgactttcttggacattaagcattattgtggtatttttaactaggaaaaaataatttaaatagcattactaaacatccaatgcagtcgtaaaaatattctgaatgaggtacaggttgtttaacgttagcaatatagcttctgtaaactgcaaatcaatagcagattttaaccctaggttacgacatgaattacttggaatttaaaacaaacaaacaaacaaaaaaccttcggaaatgattttgttttaatttcttacatgaaagatgaaacagccaaggctctgagttgttaatgagctttctacag

SEQ ID NO: 5148 - DNA, 1258 bp, Homo sapiens
tgcttttaaactaaagaacgaagaattggaaaattttttttctagggcagagagaggccacttttcatacccagtgtaatataaattccagtgtgcatccggattgaactctacttacacagtatctataaattataactgtaggtggatctttggcaagacagttaattacagtgtgcaaataaaagttttgtgaaattgctcatttaaaatatagcttttaggagcttgctatttaaaggacttctgtggtagatactttttgaagataaaacattttaaagcaattaattgccccaaaagatttgttttataaatctttagtattctatgttagggtttctttaaagcaagtatacctgtatctgtgtcttgtgtgtgcattttgattttcttttcctcataagattagcatgccagaatttttgttccagggctctgaaataaaatgcacccacctttttagaaggttcgctttatgtgtggtactacattgaagcaggaaggaacacattttagccatatgcagagaaatcaaatttgtaaaatcctaccacagagctttactatgagtatgcttttagttataaatttgtacctcctcccacaaagaacaccatcattgaagaattctttcattttctatagtttgtatattgccattaaaacatttgttgttcttaagtaatactttatatatgtataattgatagtttaagatgtacagccttaacattctaaatagacatcaagagaatcctaagaaactaagaactttagtgtgaacaaaggaggtgactttaaggaaattcacatgacactttcaaatttagttgtgtgtgctgtagagaaaaaaatatggtttaagttcttaccacattaataaatacattaattaaattacctgtctgatgtggtgagaagcccttttgaatgttgtctttcatagtgatttttataaacatttacacattcattgcaaagatagctatatttaatctattaaactttgaagagaacaactcatgttttcagttcatggcagagtgatttttttgtattagaaaagagcatttattttgctttcagcacaatcacttttgtactaatggcatcattatagcactgaaggggatatctttcaaaactgatatttgatgattcaagaacagatttattattaaaataatttaaggggcccaaaacacttctattaaggcctttgcatgaaacactcttccttccacgtggttttcag

SEQ ID NO: 5149 - DNA, 1197 bp, Homo sapiens
tcttgcaaattcttaggacagctcactcattcatggccacctctaaccaactacctgctttttcctccaggtagaatatcttacatttccttaagtcttctgtgcatgacatgatttctacacccattatcacccatattgctgccttggatgttccttagtttatgggcctacactacttgttattttcttctactccctagccaatctctgagtaaaagtagttgccaaaactctgagtagagtgtgacttagtaaaatttaaaataagaatatatttacattaaacaattattgctcttttatgttttctgtttttctgttaaacatttttagagcatatttgtaaaaatatgtcattagtccagtattcttcattaaactaactgtaatagcacttggtgggagttttgaatcagtagagattcccagcctccagtctatatattcacctggccgcaccaccagaaatccaaaatcttgagtattagcaggaggtatctgtatttttcacaaagcccccagcatattctgaggatggagattgatggcattctcccgtctccttccagggacactgcttggaaagctgaaccttcgagcagccacttgcagctgcatggtgtgccatcacagctgttcaggtggaagcttttcaggaatcagtggtttccctggctctaccttggaatcatcgaaaaacttaaaagttactgaggcctgtccccacaaccggaactttcttggtctggggtccgcatgggcaactcagttgtcaagcactcccctggtgatgcggatgtacaaccagtgtattgaatagaatgaataattgcctgagcctgctttaaccagcaaggggattggcaatgcagagggaaggatagtgactagaatacacctgggtgttctctaggactggccgtacagctgtgcttccagagtatcggagaggggtgttcattaaggatgtgggacaggactcaactcgcctcatttcatgttttcaaagctttggttttgagtatagcatcaaatgattgaataaaatagaaatctgcctttagggtcctcatattttctgctctaccaaggtgtggtagtttggtcagctccccatagttttcaaatgtactttagataagtttgcatttcaacctctatctggagaatcacatttatcttgcccttcattaa

SEQ ID NO: 5150 - DNA, 1161 bp, Homo sapiens
agacaggcccattttttttttttttaatgccaatgttggcataatacttagaaatgtcataaaatttactagtttatatgccccatttcaaactcaatctaaggaggaatgtttgctctagagctaatgatatttgctttttgttttgattttttaggagcatattaatgaaaagtgccataaactgaaaaaccaaacatgagggtagcaggtaagatatttaatttagtagaagtaattgtactttttgtgtaacctgtttgttaaagaataactaaaggagaggttaaataatctttatattgagaaggttaaactgaaataaactaaatcattcagccctttgtttttaggtagttggcaaatcacaaattggacatttagtcagtatcacataaatttttttttttgttcaagtcttttgttgaaattacacattgagcttcttaaatctgaagatctgaaatgctccaaaatctaaaactttatgagcagcaacacatgatgctcaaaggaaatgctcatttgagtatttaggtttcagattttcagatttgggaagttcagctggtaagtatgatgcaaatattctaaaatctgaaaaaaaaaaaaaaaaaacctaaagactgtatataatgcccatataaagaatggtttgacaacctagggaggctgatttttgtttttgctatgttctagcgtcttgagaaaaatgagttataaagttttaaagtttaaatgtctcatatgtatgtacttaaattaagatgtgtgtgaaggattcgataaaatatgtgtttttgctcagtatttgttcaagtttaatctgcataggtgagtttatgtgtaagaactttaatctgtttattaagcagcatattgagaaaattgaaaaacaccattagatgttcataatattaaggtagttatatttaaatattctaaaaagacacgtttataaataactggaggggctgatgacctcttcctgtgtagtaaaaataagtctgtttttccccacccttcccatcaaccaaagccctagaagaaatgcatactttacatggaaatttctactaagcgtgtgcccaacataggtaacttgtaatttctcaaaatcaagataattagtctttttcttaattgtcatctcagcagcaa

SEQ ID NO: 5151 - DNA, 1161 bp, Homo sapiens
ctgtgggccatggtaaaataaagtttgaaagccactgacatagatgaaaagacatacttctgatgctcaaaaaacttgtgaaatattattaagataaaaaacctcaccagctaaacttttaaacactatagcctatttcaatcaaatagaagataacaaaagatatcctttcttactcctgattatgtagatgtgagaattaaggtaatttaattacttaatattcaacatttgatggtggaatagattatgagatattaaatgaaagtagtaactaatagttaaatttcagttgttctgataaatatctgttgaagagtaaaatccaatgatcttttaaaaaatttgtattaacaggctgaacatgaactaaatctggcaagaaaaatgagggaatggaaactatgggagccattagtggaagagcctcctgccgatcagtggaaatggccaatataattattaagtgactttggtgtgttcatgggaaactgatgtaattaaatattctgttatattaagagcgtgttcttattactgacattttgtaatcaagaaaagtgatatagaaaatatgtaggagactgttaaaattggtgattatggtaatatggtcatgtgaatcaatttttgatttataaagtactcacacaagttgtttcaaagatgatatttctgtgaacagagaggccatgggaagatttgaaaattattaaagaaaaattcctacagattttcaatgcagagaccataatcaaaaagtaaactttctttagtagtatgttcaatacatcatttaattttttaagttatcctgaagaaggaaaggtccttaattattatagtctaaacaaatttatagattactgtttgaagtaaataatacgagtgaatattttcaaatgtgataaaatagcacaagtggctggtgataaaatttgaaattatggttaacctcagctgtgatcttatgtatgtaaagtgaaatttaaatagataattataggttgattacaaaatccatagtgtcattttattttagtcattattgaattataccatttactctgttttcttatagtcttaattttattatattttgttgttactgtattatatttgaaaaccttcaaattagaatacattgtacagttaaagaaa

SEQ ID NO: 5152 - DNA, 1171 bp, Homo sapiens
ataactgctattgcatgtcaaagaaaggaatttttaattttatttctagaacctagcacttgtgttcttccattgcaggcactcagtaaattttgttagatgaatgtgtgaagagtggctgacagcaaggggccaaccacaaaaaagattgttacatgagatcaaatgagttcggtggaggaataatgagatcagagataaaagagacctttgattctttcagccccattgtagtatcatttttacagatgagaaaacaggtctgagtacattcagtcatttgaacctggtgaacaggaagatgatataaagatattgtattggagaaaaattattcttgggtggaaagatgaaaggagtcaaggaagtgagaacaggaaccatgggctccaaggtctataatggtagacctgacacagcagaggccgtgatggagggacatgcccaaaaatcatgcagagaaagagccaggagttagtgattaagaggagagctgagaacaccaaatgcgcgtatgtgacaaaggagttagtgccagttatggcctcttagctggtagcttcggagattatctgggtgaactcctgtttgctatttgtatgaaaaaccctgaatttaatgttctgacttcagggattggagactcacttaaactatgcagacagacatgcagttcttatttcaatttagatgttaaaaaaccactcctgcttgctttgacatgagaattctttaaaaaagtaaatcctctctcaaaatagttttgttttggcactggggataaaaagcatatacatatacatataatgtctcagggtgtgtagtgttggggttatcataacctagatgttttgatattaaacgatgttcttttaaacagcttgtacttgtctttgtcagggaataccactaggaagaaggcagttctgggctcattaataaacactatgttcttattgtgtattctcaactagagtaggagatctacagatgtgtatcttgctctcactgtctgaggagatggatgcattgaaggtaagaggggcctcactgaattgtgcagcacttgctgtctcttggttgttcacaactgtggaagccaacctcaggtgactgagttcatataactccaactgccagaactttagggattcctttatttctcagatcc

SEQ ID NO: 5153 - DNA, 1109 bp, Homo sapiens
actttctcttttgccactggcttttgttttgttactaggtcttcaaatatggattaaggtttccttaatgtctttttttctttttatatactcttagtgattcctctattcccgaggtatcacttatcacttccataaagatgactccaggtccgttttctagtctggctgttctccttattataagaccatttgttttcaaagttgaatgtcagacatctccacatgaatgtgtcaccagtatcttaaatgcaacaaaaaactcagtaatccaaacttatcttccttttaaaatttcttcctatgtgctccatgtctcagttgttctaacccctacccttccggttacctatgctagttggaatcctggcaaatgccttaacttctttcttttatactctccctaatctgtgatcaatgcctatccatcctgcctctgaatgtttttcacgtttgcttccccttcccatctccacttttagtagttttgttatcacttaccttcactattgcagtagtctcttaactgacctcttttctaatctgtcttccgtgctgttgttagaaatatcttcctaaaacacagatctgttgttactgtatgttcatcgcttgactaatttacttatctttcaggtctctgccaaatgtcacttctaaataaagtatgtctgtcttctttgttgtttgtttcatgttcctttcctactgtcatctaatactgtttgtaattgtgtttatatttgtgcattgatttgtttaatgtctttcttcccactggagagatttatgtaagggactggggagagttatgtagaccctgggcctagcacaatgctcgggacatagtaacacttaaaacatatctgttgaatgagtggatggataatagcaaagtacaggcagtgcaggcaaacagataccaagtagcaaaggcagggaaattacagggtcctagactcttagtacattctcacagaccttaatctgtagtttaaaatagtaatgggcttctctcttttgctttttgcatttatttccctaaggatgagagtgaacaacttactaccccacactgacacttcagtgagggcactgtggaacctttc

SEQ ID NO: 5154 - DNA, 1177 bp, Homo sapiens
gtcaggctggtctcaaaactcctggacctcaggtgatccgcccacctcggcctcccaaagtgctggggttacaggcatgagccaccgtgcctggccaaaaaatactacttgttaaagaaggttttggaacaaatgtagatttttaaaaaatgcaacataaaatgagtagactccctatacttttcgcaagtctatatatattttaaaagttcaccttctatacctgtgtcccctgtattaaggcatttaatgtatttaatgagtattaaattagtttcagattcaggttctaaagcaaaatattagtttgagtgctgtgagggttaaatgttgtggtttgattatcacacgtttttttatttgtgtggaaaacttgagatgaaaccatcttttagaagtaatttactgttgcatagttttaaaaactaggttttattagtaaactcaaaagtgttcatttattcccatttctcctcagataacttcaagtgatgtacgaaaaggtttggagttcatttttgtggaaagactttaaattggtgttagaaccactaaacatcttcaaatggtactatgaggaaaaaaagaaaaacatttttctaaatattcaactataactgctgttttctgactaaaataaccatctaaccacttgtttctaaggcactgcctattccagcactttcaagtagctgtgatattacatgttgtcatcacagtccatcagctatccacccttgaccttgtgcatttggtcgacagtttctacaaaaatgttacaaattttgttttctaaacaatttgttgattaagtgatcaacaacctgaagaaaatatcaatttttaattgacaaagactttatatcttagtgattttagttttgtttctctttatttggcaacattttcatctgaattgtatagatatatgattttctagtgagtgtatgttaggaacaaaagacaaaatagtatcaacacattataaatatttagcttactaaatatttgtaattatttttacatccatttatttctagcttgttctccagcacttcagtgtttgaaagtttcatcctaaaatatatactacaggaaagctgcagttcattttcatgcatggatcattacatttttcacttgtaaatgtaggtttttatgaaaattaaacattccc

SEQ ID NO: 5155 - DNA, 1203 bp, Homo sapiens
acgtgtggcggcggcggagatcgcgtctctttcgctccgtgtcccgctgctgctcctgtgagcgcccggcgagtccgtcccgtccaccgtccgcagctggtagccagcctgcccctcgcctcgactccctttcaccaacaccgacacccacattgacacctccagtccggccagccgctccactcgttgcctttgcatctccacacatggcgtcctccgcgcagagcggcggctcctccgggggacccgcggtccccaccgtgcagcggggcatcatcaagatggtgagaacgggccccggacaccgacccctctgcctgccttcgggcgggagtcaggcattgactccaccttccgccagcctgctccatgtcccagatcccctttcctctgcccccttcctcacttttcgtcgattctccgaatcctctcactagacggaagcagacacggagtccccttgttccttgcctcccggacaccttgacatcaggggtcacagtgatttccgaggttgcggcattcggatctcctgtctgtttaccaggacagatcgattactgattgattaacagagacaattcgttgatatctgtcctcccatcccccgtctttctgttcattttgacatatgctgagtagttagtagtttttcgagatcctgacatcggctcttctctactagtacttggccatcatgaaacttttctgttcccacaaacgctgttacttgactcccaagttttctcactctgtggccctcttttcctctctttccctccacctcttgtgtcgacctgaaagctcctgatctttgtgtacttttgacttctaaaaggttaggccggcaagaatcttagtaatcatcattgttctcccgtcccttaaagataaggagataggcttgaagaaggcaagtgacttgcttaaggtcacatggtggtttgggttggagccatagcaagagcccaagtgttcggattcctggtctagtgctcatagcactatagattctgcctgattttatataccctcaactttttgaaaattcttcaattttgaatttgaacctgcaaagtttatttttacaatttactcctagctccatgataatttgataatataaattcagtttatcacttgcccccagttgtcctccccaaaacccttccaaatcttggaacctgacatttcttggtttta

SEQ ID NO: 5156 - DNA, 1130 bp, Homo sapiens
aggctggtcttgaactcctgggctcaagtgatcctcctaccttgacctcccaaagtgttgggattacaggcgtgagccactctgcccagcaaacaagcccctctgaaccacacttgagttaatgagtgactctgggaagctcctaagtgtgagtggggcctggttactagagatcgagttcaatcactgatggccagtcatttaataaatcatgccaatgtaaggtaacctccttaaatgatggggtttggagagctttggggttggggaaaatggggaggtgctgagagggtggtgtgcccagagagggcatggaggctgtgcactccaccccccatatattaccttatgtatctcttccatctggctgttcctgagttgtatacttttatataaatctagttactagtaagtaggctgttttccagagttctgtgagctattctagcaaattaataaacccgagaagaggctcatgagaacacacacctgatttatagctggtcagtcattaagggtggcttgagcttggcatcttcagtgggaggagtattgtgggatggcacttttgacttgtgggatctgacactaattccaggaagacagtgtctgaattgaattgaattgtagaacacccagttggtgtctgcagagaattagaggattgcttggtgtggaaaaaaacccacacacatttggtgtcagaaatgtttgtgtgactgtagaagaaaaacaaaaacaatttttttgtcctttttagggtggtaggtggtagtaggaatgacaatatctggcacggagaacacttgttttttagagttgtttggggagatatcactggaccaggggatctggtttgcagcctttctggatactgggaagtgctcatcctaatcctggtattggtttacccaaagtttcccaggcttcacatgtttctgtactcctgcagtggttttgacataccactttattgagttttggaaatcgttttgacagtcaacatttttttttttttttgagacggagtctcactctgtcgcccaggctgcagtgcagtggcacaatcttggcttactgcaagctccgtctcccgggttctcgccattctcctgcctcagcctcctgca

SEQ ID NO: 5157 - DNA, 1237 bp, Homo sapiens
aattttctgtgtctgggtgtacaactactgtttcttctggagttttccttgtcatctccccagaggtccaggaagaggagcatctacaatggggattcccagaaaccagcttcttatgggaaatctgagctgtgaggggctgaggatggctgtggaaagtggctgggtctggcaggtgtcttgccagtgagtgtgtctcctccatgcaccccagctctgcagaagggcagcctgagccaaatgcacccttgttctaaggatggggacaagggcaaccacgcctgtcccagctgactgactccttcccaccaaggtgccacctggccagcctgcatggaccagcttgcccatgtggctgcaagtcccaaggaacagctggtcacctccatccccacagggaaagagggaaccgtcatggctgcactgcctgaagggccaaaggtcagcctctcctagaaacacagttcctttatctgaggagacagctgtctctctcctaccctctgtatgcttcttggcaacctcaagtgccagccactttgtgtatggagacaccttgcttctgctgtcttctcaattcaggtggcagtgtgcaccaccccacccaccacgaagtgagctgtggcaccttgttacaggactggccctagtgctgggggctgagggccatccccaaggctttggtttgcatcttccgtgacctcacgcctgctgcccacctgagcctgctgggaaagaagctccaccccactctccccaaggaggacacctgatgctgtcacccaaggcacttttacttgaggagtctttagcagtttctgctttcatcctgtgtgttccgaattcatcaacactgctgaggggccgccttcccccaagccaaaggagcagggtggggctaggatgggagccctcaacagcttgcaggctcaggggccatggcccactcaggaaccagcacagaatgccggtctctgttaacaagctcagtgccgggaaaggagggagctggcaggaagagggaagagcacctgcatgggatgcagagcagaggacgtgctgagggattcaggactgcaggggtgcctgctggtaggaatgagggagcagactcctgggtcaggagggctccatcccagttcacttaaggtagtgctgacagtctcgtctctgaggccgagtgagtcccactgatcctcagagctgcaagcgtcccagaagggctgggagcccaggt

SEQ ID NO: 5158 - DNA, 1179 bp, Homo sapiens
tagtgctgggtagctgagagcccagaccggtttctcagggctccgggccttgatcagggtccgcggaagagtattggggattggggaacggcagaaccgtgttagaggtgccctggggagaagggcaaggtgggtggccccggctgggggagaactcgggggtggggggggtggggggtgtgggggtgtgggggggtggggcctctgctggggggtcctgggtggctggatgtagagcggcggagggggcgtgtcccggcctgacccggtactctcccccgcagccccacacctcctacccggtccgggcttgcggggtcgcagcgccgctgcaggcagctgggggcgtgcgcgcggcgcggctgagccctttgtgcggcgcgggcggaggcggcggtttccgcgggaggggcgagaagggcgggaggggcgggaggacagggcggcgccctggcccgccctgccgctgccgcagcccccgcccccgcccccggcccgcccggcccgcggcagcagcgtggccgcggcgcggcgtcagcagtagcagcagcagcagcggcggcagcggcgggcggccgcgcgggtgtttatgtcgggtcgcggggtctcgcggcagcatggcggactacctgatcagcggcggcaccggctacgtgcccgaggatgggctcaccgcgcagcagctcttcgccagcgccgacggcctcacctacaagtaagcgccgggtctcgtacccctaggtgcgcgcatccacgcgccgcgacccccgggccggccctgcacgtgcgcggctcccccggcgttccctgcccggtgcgagtgcctgctgtgggcgctgggggctgggcacgggaaggaaggaggcccgcgccggagcagacggacgtggcacggcgacaccgcggccctcagagccctgacccgtttctggccagatccgggttcggcctgtccccttcctcctctcagcggcatggaggggccctcgggcgtgtgggaactggagatgtgggcattatggggagacttttcccagccgctggtccaggacgccccctcccagcctcaccacgagggcagagggtccccggagccaagcttaagcagccgcttccgcatggccccaggagaggcccagccaggtggttggggtggcttcttttccaactgtctagtcc

SEQ ID NO: 5159 - DNA, 1226 bp, Homo sapiens
aggctgatctcgaactcccgacctcaggtgatctgcccgcctcagcctcccaaagtgctgggattacaggcgtgagccaccacgcccggccaagaccctgactttttaaaaaatgttaaacataggccgggtgcagtggctcacgcctgtaatcccagcactttgggaggccgaggtgggcggatcatttgaggtcaggagttcgagaccagcctggccaacttaatgaaaccccatctctgctaacaatacagaccaggcatggtggctcacacctgtaatcccagcactttgagagaccgaggcaggtggatcacctgaggtcgggagttcgagaccagcctgaccaacatggagaaaccccgtctctactaaaaatacaaaatagccaggtgtgatggcgcatgcctgtaaccccatctacttggaaggctgaggcaggagaatcacttgaatctgggaggcagaggttgcagtgagccgagatggcgccattgcactccagcctgggcaacaagagtgaaactccgtctcaaaaaaaaaaaaaaaaaaaaattagctgggcatggtggtgggcgcctgtaatcccagctatctgggaggctgagtctagagaatcatttgaacctgggaggcggaggttgcagtgagccgagatcgcaccattgcactccagcctgggcaacagtgagactccgtctcaaaataaaaaaacaaaaaaaatgtaaaaaataaataattgtattgaatttattagttgtgtctcagtctccttcagtctacagtttaggcttgcttttgcacctttgcattttaaggtaagaggctattgtgtaaactcgaattgggtttgttggtgtttcttcatgatttggttcaggctctgcattttgggcaggaatattcagaggtgatgctgtgttcctcccataggatcgtatcaggcgacacatgattatgaatttccccattattggtgatgtcacttagttgtgttgtctgccaggttctgccactgtaaagttaataagtattttgtagggaagtgctttgagactaaatatcctgttcctcatcaaacttctaccccctagtttcagtatctattgctgttttttgtctgaataactatgatagttgccaaatagtggtttctgatccttccattccttctacactgattggttggtattttgtacagaaaagctttctcatatctgatttac

SEQ ID NO: 5160 - DNA, 1168 bp, Homo sapiens
agagaactgcctgagtgtaggagatcaccaccaacctggtcaacatagcgacactttgtctgtactaaaaattaaaaaaaaaaaaaatgagctacacgttgcagtgcacacctgtagtcccagctactggggaggctaagactggaggatcacttgagtctagaaggttgaggctgcagtaagctatgatcacaccattgcactttagctttgctaagagcaagactgcatttcttaaacaaaataaaaattagatgggaatattgcttaagccctggaggttgaggctgcagttaactgtgattgcaccactgcagtccagcctaggcgatagagcaagaccctttctctaaaaataaaataaaataaaataaaaattaaccttctatcatatttccagtaacaccttctctcctacgtttctcctagaagcgcttaaattttgtttttcacataccatttaaaacttttaagtgctgatgtctgtctgtgtcatccctcttttttttttttttttttttcttagaatgtctttttgttacttctagctggacctaccatgaaagacttctgaatccaggaagagagactgactgggaaacatgttattcaggtacaaaaagacttggactgtaactcaaaaatggtcaaataatagtgcatgcatcaagtgcaatgggaagctcttctggagagtgagagaagcttccagttaaggtgacattgaagccaagtcctgtaagatgaggaagagttgtatgagagtggggagggaagggggaggtggagggatggggattgggctgggatgggatggagtgagctgcccagtcaggtaaaccagcactatacagacctgaacaatgaagatggcacattttgttcagggaatggtgaattaagtgtggcaggaatgctttggagagacggtcatttgcttgtatggaattttgcccaagagacctcattacagttcctaattttttgatgttatcatgcatcactgcccttgtcagatagtatcatgatcacagtaacatcaagcataatatttcattgattctcacaaaaacaggtgggtgccacagttatccccattatatgcacaaaatgatgaagacttggggttaatgagcgatttgcccaagctcacctgaatattaagact

SEQ ID NO: 5161 - DNA, 1231 bp, Homo sapiens
cagctcctgcccagctcccagaggccctggtaggcccacaacttccctaagccaagctccccaggcccagctcaggcctcacggtggcctctccaggctcagctcctgccctccgatggcatctgcaggccccaaacggcctccggttggtgggcttctctaggcccagcttgggcctcccggtggcctctgcaggcccaaatcgtcccgaagtcggcctctccaggcccagctccggcctcccagcggcctctgcaggcccaagtcgtcctcaagtcggcctggaagtgggcctggaagagcagcaagtcggcctccccgggcccagctccgtcctctcggcggcctctccaggtgcaaaacttcctcgagtcagcctctccaggcccagctcttcctgcctcccagtggcctctttcggcccagcccagttcatggctctcggcggccttcccaggccccgcttttgacttttggcagcctcttcaggcgcagaacttgatctccagtcggcctttgcaggcccggcctcctgcctctcaaaggcctgcacgggcctggccttggccttggcctcacagtggactctccacgcccagctagctctcgcctcactgcggcctcccccgtccaaagctcctgcctttcggccacttcggcaggtccagctactgcctgccagtggcctctttaggccaagctcattcctcacaacggcctttccaggccccgtttttcccttccggcagcctcttggcctctaatttgtttatcttttgtgtataaatcccaaaatatggaattttggaatatttccaccattatatattttggtaggtaatttatttggagtgagtttctgcaccatgcccgaactttttgttttattttccttattatttggtgttaaacaggtttaatgacggtcatggcaactttttggcacaatgaaaaatatcgcccatgatcaacgtgttctgttctggggaagggggcaaaggcagggtgaatcactttcttaaaaagtatagctcaagttgggagtgcagagggaatggggagaaaacccttccgctgcctgtgtcgaagtgcaggagcccccacccccatactcacctgagtccagcccctctggggaaagaaggggtgcatgaactccccttagtccacaggcgcctccctgtggcccaaggccctcttcacactccatcttgtagccccagcaggagct

SEQ ID NO: 5162 - DNA, 1394 bp, Homo sapiens
tctagaccctaactcccccaacccactcacccaattttaatatacacagaattttccaggaagttaaccatcatgtaaatcaagggaagatggtactttggggtttgtgtgtgtgttttgtttgtttgttcttggtgcttaaccaaaagttgttcacagtttggaaaatcattacaaagttgctcctaggacagtaaaacctatttaataagtggggttcagatcccctacacaaccttggttttagttgggattcactctgagtggggcttggagggaagggtaaagccagcaggaaaagacaggcggctcctgcagggcagctctcctgggtccagaattctccctacaggtctccccagatcaagccaaggaaatgggcgccaagtaaccagagactgctggagtcattgccagtggtcccgtgaatcacagccagcctcaagacctcaatttcttcacccggccatgtaagcagagcggacaactctgagggcgtggctgggcggggttcttggggcagcccggcgccactgccggcatctacgcaccctgaacgcgcccgatctggtctcatctcggaagctaagcagggtcgggcctggttagtacttggatgggagatcgcctggaaataccgggtgctgtaggtttttggcttcccgctccctctctctttcccccttttgtcgccgcgcttttcaaccgccccctaactctgctcccccttttactccgtcgcagcccgggacctcctggtgggggtccgccactgcagcaccaggcgccactgccataccaccctgaacgcgcccgatctcgtctgatctcggaagctaagatgtggccgcatttaggaccccaccggcttggctgtgcctctcccagccccctggcggagcggactaaccctagcatttcattgattcacaataacgccaccccaccccgactgactattttgagccccatttgccaatctgtagtggatctttactgttttggagtagtaaattcaatacacctttatgggtctatttttgtaactactgcattctgggtacaagcttctgattctatttcatggcttcgaatgaagtcgtgcacaagcatttacatattgacttatgcattgttttatattttccttgtatattacagttggggcaggatatcaatttttaaaatttgtatgtataggtaggttacaatcattattaattttatttcaggctggtgaaacggtgtgacaaaatatttgtcgtaaaaagaggacttgggtctgacagggttgagaaccacaacactggaggagtgttgacctccccagtgcttctctgttgactttggtggcacttagacagctcctgcaccatctctgccttctcttgccc

SEQ ID NO: 5163 - DNA, 1165 bp, Homo sapiens
tttggacaatagttaaattagcagtattagttatgagtttggttgcagtgttcttatcttgtgggctgatttccaaaaaccacatgctgctgaatttaccagggatcctcatacctcacaatgcaaaccacttactaccaggcctttttctgtgtccactggagagcttgagctcacactcaaagatcagaggacctacagagagggctctttggtttgaggaccatggcttacctttcctgcctttgacccatcacaccccatttcctcctctttccctctccccgctgccaaaaaaaaaaaaaaaggaaacgtttatcatgaatcaacagggtttcagtccttatcaaagagagatgtggaaagagctaaagaaaccaccctttgttcccaactccactttacccatattttatgcaacacaaacactgtccttttgggtccctttcttacagatggacctcttgagaagaattatcgtattccacgtttttagccctcaggttaccaagataaatatatgtatatataacctttattattgctatatctttgtggataatacattcaggtggtgctgggtgatttattataatctgaacctaggtatatcctttggtcttccacagtcatgttgaggtgggctccctggtatggtaaaaagccaggtataatgtaacttcaccccagcctttgtactaagctcttgatagtggatatactcttttaagtttagccccaatatagggtaatggaaatttcctgccctctgggttccccatttttactattaagaagaccagtgataatttaataatgccaccaactctggcttagttaagtgagagtgtgaactgtgtggcaagagagcctcacacctcactaggtgcagagagcccaggccttatgttaaaatcatgcacttgaaaagcaaaccttaatctgcaaagacagcagcaagcattatacggtcatcttgaatgatccctttgaaattttttttttgtttgtttgtttaaatcaagcctgaggctggtgaacagtagctacacacccatattgtgtgttctgtgaatgctagctctcttgaatttggatattggttattttttatagagtgtaaaccaagttttatattctgcaatgcgaacaggtacctatctgt

SEQ ID NO: 5164 - DNA, 1160 bp, Homo sapiens
agaagcaagtataaaagtttcagctttagacaactatccttgtcctgattcatataggctgttttaccaagtaattcatccctcggtataattgtaactccctgagctttgcattctttcttacattgccatattcttaatacctggattgccatatatgctcttaagtcagtggtttacaaactgctctgtgaatccctgggagttaacgttgactgccctgagggaagaaatggaagatgaaatagatgggtctcagggcctgttgacaatatgtaagtgagatcagctctatttttatgtgttttatttattgtggttctgaacacatttcactttttaaaagggttcttttgctttaaaaaaagaaaagcaagtatacctctgttttaataaactagaagttttcctttagtttcagatatgtaatctctgcttggcttttcttcttagaccctgtgttgggctatttgatgaaaggcctgtgtgaaaagcccctggcttctgctgcagccaaagccattcataacatttgctctgtctgccgagatcacatggctcagcactttaatggactcctggagattgcccgctccctcgattccttcctgttgtctccagaagctgctgtgggcttgctaaaaggtactcacttgatgttaaccactaatagtcacctcaaagccactacctggggtaatcttacatctgtcatatcccagtttttcagttgcaatgtacttagtgtttaagaatttataagatgaggaagatggcttttccactagaggggatagtgttgactatatgtacatgcattcttttcttggattatcttaagcctatataattaattaatactacttgcggtatatatagcaccgacctagatttgggtagagacaacatattcaaactaaacacggctgctttttaagttggaagaataaaaagggagaccaaagaagcattgccataccaaagaggtaaatgggagttgaaaggtagtatacatggatcagtgccatgagtagaagtcaggggtcctggtctcttagcagcctttaaccattactgatcagcttatactgagtgattgtctatccagaggcaaacagccattgtgatgaggctcggacttaatagaagaactagagata

SEQ ID NO: 5165 - DNA, 1100 bp, Homo sapiens
ctgatttcaaggcagactcagttaagaaggatgatccctgtctactgttatttttgctggaaggagcaagttagggattagtcctgtgttctgattccttgcccatgtctccggcaggctcgagggaaagtgagtgagatcatcaacaatgccattgtgcactaccgagatgacttggatctgcagaacctcattgattttggccagaaaaaggtatgggtcagccagtggtctgggggactgtgggtaaaagtgaatgtcatcccaagagatgcctcaccctctatgcctgtggggctcttcattacctgccaggtaatggcttctgggaaggggtttggcaaaaaagcacacgtagcagagtgctttaaatgtacttttaaagacacagaacagtatatatagtaatctactgtgttataaatggttacctacagggggtgaggaactgggcagattcttgaatattacctcttcaaaagtgacattttaggctggtccaaagggagtgagttatctcatttgattgttcacagtcagctacagatccaactccttgttctactctttccccccttctcactgctgcacttgactagactaaaaaaaagaaaattacatttaaaaaattgtgataaaatttacataatgtaaaatttaccatttttaagcatacagatccgtggcatgaagtaccttcaattgttgtgcaaccatcaccaccatctccagaacgctcatctgccccagatgaaactctgtatccatcaaacactaactccccatttcctctcttgaatctctgtatccatcaaacactaactccccattttcctctcttgaaactctgtatccatcaaacactaactccccattttcctctcttgaaactttgtatccattaaacactaactccccattttcctctcctgaaattctgtatccattgaacactaaagccccattttcctctcctccagcaaccaccattctactttctgtctgtaaatttgacaactctaggtacctcaaatgaagggactcacggtattaatgcttttttgagtgggttatttcacttagcatgtcttcaagtttca

SEQ ID NO: 5166 - DNA, 1199 bp, Homo sapiens
gcgcggggcggcggcaggcggggtcaccagatccccctagcccgggcccctccaggcgccagggacgctgacgctcgcgctcttcctctctcgcctcccctccccacctctccgctccttcgtccagtccctcccccagcctcggcgcaggggggccgggcttggctccgcgaggcccgtgcattccagagagcccagcgagctagagcaacaaaggagccgggtcgccggcggggagagttcggggggctgcggcgcgctggggcgaaggtggctgctgggccgcgggctggcgcgggggcggagccggagctgcactcgcacccccggcccgcgtctggcctccctcgcggggcggggaggtggctttaatggtgggagagggaatggggctggggattgggggcccaggggtctcctagggctgaagacaacttggattgcgaggctagggcttggggagtcgtgcatcccgttccgggcctccgcagcccaacatgggccccgggttccaaagtttgcgaagttgggcgccgaggggccggggcgcgcggagcgtccgggggggcccgggcccggattctctgggcgcacaggtcgcctgagccgcctccgcggccgccgaggtcgtgcgtgtggccggggggctccgaggagcaggcgggggcgccggggcttttgctgagttggcggggttggccatggccgctgcccgcccagcgcgggggccggagctcccgctcctggggctgctgctgctgctgctgctgggggacccgggccggggggcggcctcgagcgggaacgcgaccgggcctgggcctcggagcgcgggcgggagcgcgaggaggagcgcggcggtgactggccctccgccgccgctgagccactgcggccgggctgccccctgcgagccgctgcgctacaacgtgtgcctgggctcggtgctgccctacggggccacctccacactgctggccggagactcggactcccaggaggaagcgcacggcaagctcgtgctctggtcgggtaagtgcggcggagccgggtctggggggcgggaggtgccgcggtaagatgggggcacccttggaaagaacaggctcaggcctgagttttggagagggcggggacagcacccgggagagttggagggacagatcccgaaactttgggggcaggttacgtgcaggatg

SEQ ID NO: 5167 - DNA, 2022 bp, Homo sapiens
ctgtaatcccagcactttgggaggccgaggtgggtggatcatgaggtcaggagttcaagaccagcctggccaacctggtgaaaccccgtctaaaatacaaaatttagccgggtgtggtggtgggcgcctgtagtcccagctactcgggagtctgaggcaggagaattgcccgggaggcagaggttgcagtgagctgagatcacgccactgcactccagcctgggcgacagagcgagactgtctaaaaaaagaaagaaaaaaagaaagaaagaagtggggaaactgaggtacagagaggccaaataatttgccaagccagccctgggattcaggtcctggaagtgtatctccagccaccctgccatgctacctagatacctttccctaaacaagaggctcgtccctgagctgccttgacaccgtcttttcccatccctggtgccagaatgaggtgcagaacatcaagttcaacagttcaggccagtgcgaagtgcccttggttcggacagacaaccccaagagctggtacgaggacgtggagggctgcggcatccagtgccagaacccgctcttcacagaggctgagcaccaggacatgcacagctacatcgcggccttcggggccgtcacgggcctctgcacgctcttcaccctggtcagccgcgggagggcaggcccggggggccctcagcctggaacgtgggaagagagccagagggaaggggggcaaagaggtcttggtgggggtccccagggaagggtcatgatcagaagggtctggggctcagttaagggtgtctgtgtcagcagaataaccctaacctcacagaatggcccacttctctcttctaggccacattcgtggctgactggcggaactcgaatcgctaccctgctgttattctcttctacgtcaatgcgtgcttctttgtgggcagcattggctggctggcccagttcatggatggtgcccgccgagagatcgtctgccgtgcagatggcaccatgaggcttggggagcccacgtaggtgtcttggggacccagaggtgaaggtacagggaggaaggctgaagtgtgcgtttaccccaaagggagcaggtgcgtgtaaaaccgagatccagggcaggatctggctctgccctactgcatactgcatgcaagatctccagtgttaggatcttagtttcagaatcaggaccttcatggtttgtatctgctcaaaggggcggctcctagagcctcctcagatctgacctgggtcctgtctccaagccctgacttctgggaacctccagacctcagcagctgagggtctgggcacagggtggggagaccaggtagagggagtacagagtgaccgcctcaagtgacacctcacctctctgcacagctccaatgagactctgtcctgcgtcatcatctttgtcatcgtgtactacgccctgatggctggtgtggtttggtttgtggtcctcacctatgcctggcacacttccttcaaagccctgggcaccacctaccagcctctctcgggcaagacctcctacttccacctgctcacctggtcactcccctttgtcctcactgtggcaatccttgctgtggcgcaggtatagtgactggtaggaacgggagacctggatggggtgagtttgagggagggggccagtaacccaccttctgtcccaccccttcctgctgcaggtggatggggactctgtgagtgggatttgttttgtgggctacaagaactaccgataccgtgcgggcttcgtgctggccccaatcggcctggtgctcatcgtgggaggctacttcctcatccgaggtgagtgaagaccaggccaggaccagttgggcaacaaaatatactgggcacttgctgccagtactgggagctgccagcacggctgcccccatgctgaaaccccagctagctcctatagggccttcacacagtagaaggtgaccctctaggcagacgaaacaccgtgagcacttgctgcgggacagcaccttt

SEQ ID NO: 5168 - DNA, 1199 bp, Homo sapiens
ttgattcacttagagacagttctgtttcctgaggcaaaggtacttgaattttcaagtgaaatggccaaaaagcccacagtatacttagatttttttaaaaagcttatatctcttcttttacatctgggcttcttgacttccatctgcttgtctacagaagccatcatgtgattttaaagataatgttgggtatgaagaatgtggagtcaggttctatttaactaggcaattgagtctttcctcaattaactaaattatcttatgctccctgtgtcagtgtggatcctccaagacagacttagaggcataaaatttattgaaccacaaacaatcaattgggagggagccaggagtaggcagggagagctttttgaatatggtgcaagtctaatacctgtgaaggaagaccgggaagaaaaggctgggtaggaaatcttgcagaccacagcatagttgagaaaatcccagccatgcagatgtagagtccccaggcaaaagttgcttgttagcagaatcccgtatggggcaggtgggcaggcactactacccctgccttgctcagtcactggctgggagcagcttaggcaaagagtgctttcagtgttcatggggttggtggctagaggctgaactgtggtccatacaataggttctcttgaagcagatctgagcaacacatcttcttggttactacacttccctagcaagcttatttattcatttcatgacaaggttcaccaagttttaatgtgtcttgccatataacatttacaatagcataataaatactagggaagatagaaataaaagtagaaactcaaagaactaactattactattcctctagataaacaaaaattttctggggtatttttcaaggaggattcacactgaaaatactgagtgataatgacttcattgtctataatactcgtgcaataaatatatttagttgttttattttctaatggctcttttatgtagtgtgttttgagaaaacccaagggtttaacattataacacaactcattgatgataagtatgtggaagctaagattatatggaagagtcaggtagctgacagtctgtatggttagtatggagaatagatctctgaattttcagagaaggaaatggactgaacagcatttaaataatcttgcataaatatgacttctatcaaacaaattttgtgttat

SEQ ID NO: 5169 - DNA, 1165 bp, Homo sapiens
cactgcagcctcgacctctctgggctcaaggatcctcccacctcagcctccccagtagctgggactacaggtccccaccaccacgcccggctaatttttgtatttttagtagagatgaggtttcatcttgttggcccgggctggtctcgaactcctaggctcaagtgatctgcctgccttaacctcccaaagtgctgggattacagccgtgagccactgcacccagccccaattagatttttaaaactgttgttccctgtcagttcttactctggttcaggctactgtcatctctcctagagacactgcggtagactcctcttggtctccctgccaccgaaattgccctctccaaatccactacagcttgaatggtctttcaagaaagaaaatcatgttttttccctgtttaagactcttaaaaagatctgattaacacgtaggataaagtctaaaattctttgaggtggctacagggccattggtgatctcatccctgttgccatctctgacctcatctgccacagatatttctcaggctacactcaaaactgggaagctctcaggtcatttaagcctggaaattgtgccacctcacaactgttgcaagggctgttccctttgcccataacttcatttctctctacaccatctatgcacttacttgaatcctcacctgaataattcttaccattctttcagatcccaacattaataccatcgcctccaggcagcattttttcatctcccaagattgggtgcattagaccctttgtcatcacacccagtactccccacgtttattgagcgctcacgatgcgtcaggccctagtggaagcctttatgcacattatcttctttctcatttaattatcaagtagagcccacaaggtaggtactaccttttttttaacttttgagacagggtctcactgtatctcccagactggaatacagtggcgcaaacacagctcactgcagtctcatcctgggctcaagcaatcctcccatctcagcctcctgagtagctgggaccacaggcagatgcctgttgcccaggctggtctccaactcctgggctcaagccgttctaccttagcctcctaaagtgcagggattacaggtgtgcaactgtgcccggcctgggtagttactaatattatcc

SEQ ID NO: 5170 - DNA, 1160 bp, Homo sapiens
agtaattggatacaaggtcttgggggtaaagccacaggtcatccttcctgaagaaccaagtatcatttaaaaactagcatgaggaaggaatgaaactgagtagcattcattttgtgtgtgtgaaattttagttctggtttgtttgatttgttttttttttaattctaaaaagaatgacataaattttcactcgctttgccatctggctgctaggggagctgagcaagaggctcaccatgcgcatgtgtaagccgcaggtgtactcaaggtgctgaaggcgtgcaaggggcagcgctggtcctcccggggccaactcacagcaggagactcgcatgggagagttggaacacatctttcctttaagtgcctcttttttcacctagcttttaaagttattctttgtccttcatctcagaagggatctctttagcttatgtgtggatttaaaatgacctttgagctacggttaaaaagctaccatctggtgttcagttctgggaaagagaaaaccgtagcctccagacatgctcctgatttctaggccttatcataccatcccctctgtgatgggttgagttcatggagcctgtattctgggaagtcttataataaccacgcacctgtgaacgtgggtcctttctggggagtgaggaatgtgggagagaggcagaaaaaggagcagctcctctaggggcccatcctcccacatcttgccattaccagtctgtgtagcacttaacctcctgccaccactgccaggcttgctcctccgttctctcccagagcaagtcagtctgagcagctccattagtccaaaacagagctttgctgcatgacttcagcctggcctctggatatttggtggaaatatattctaaattgaacaagccaggctgtccagggtggcaagaggatttttgacctggatttatacagggaccaaagactgaatgctcagcctctgtgcttagactttcatggtccttaggatagaagtgagtctctagccctgctacaccagagagctgaagagagatgtggtctggttccatccatacttgctggcatcctttgttaagccttctgagggcagtcttctttgaggtagaccttggaggcctgacatcgaagacctgtgtgttttattttcataaaagtat

SEQ ID NO: 5171 - DNA, 2160 bp, Homo sapiens
tggtatatacccccaacacccacacagtggttataactgtaaaatgaaagttttgcatgtgtaacatgtcgtaacattcttatttcactgccttgtttgaaatgcatataaatttaaatgtgaacattttatactattcttttaaagattttaaatattatatatgtataatgctttattagattaatttcttcctgttaaattccctatgaactgtgtaacttgagataaaaatgttacaatcatttaaaagtgttaaaacatgcagtaaaatcttactcatttggattcatttaatttacaatttgtcagaaaattagagaagaattatgtttacttacactaacaggatgggaaaggggtcatggggtgagagttggggagggtttggtaagaaaattcccctaaaggaaatctcaattgcctagcgaattattttatgaaatcatcatgtgtgttggatgttactatttatggagaataagttggtattctaattactagtttcattaaaacagttcccctaaggacccctacctgataacacttttaagactggatccagcctttctttgcggaatcaccatggcggctgggaccctgtacacgtatcctgaaaactggagggccttcaaggctctcatcgctgctcagtacagcggggctcagatccgcgtgctctccgcaccaccccacttccattttggccaaaccaaccgcacctctgaatttcttcgcaaatttcctgccggcaaggtcccagcatttgagggtgatgatggattctgtgtgtttgagagcaacgccattgcctactatgtgagcaatgaggagctgcggggaagtactccagaggcagcagcccaggtggtgcagtgggtgagctttgctgattccgatatagtgcccccagccagtacctgggtgttccccaccttgggcatcatgcaccacaacaaacaggccactgagaatgcaaaggaggaagtgaggcgaattctggggctgctggatgcttacttgaagacgaggacttttctggtgggcgaacgagtgacattggctgacatcacagttgtctgcaccctgttgtggctctataagcaggttctagagccttctttccgccgggcctttcgcaataccaaccgctggttcctcacctgcattaaccagccccagttccgggctgtcttgggggaactgaaactgtgtgagaagatggcccagtttgatgctaaaaagtttgcagagacccagcctaaaaaggacacaccacggaaagagaagggttcacgggaagagaagcagaagccccaggctgagcggaaggaggagaaaaaggcggctgcccctgctcctgaggaggagatggatgaatgtgagcaggcgctggctgctgagcccaaggccaaggaccccttcgctcacctgcccaagagtacctttgtgttggatgaatttaagcgcaagtactccaatgaggacacactctctgtggcactgccatatttctgggagcactttgataaggacggctggtccctgtggtactcagagtatcgcttccctgaagaactcactcagaccttcatgagctgcaatctcatcactggaatgttccagcgactggacaagctgaggaagaatgccttcgccagtgtcatcctttttggaaccaacaatagcagctccatttctggagtctgggtcttccgaggccaggagcttgcctttccgctgagtccagattggcaggtggactacgagtcatacacatggcggaaactggatcctggcagagaggagacccagacgctggttcgagagtacttttcctgggagggggccttccagcatgtgggcaaagccttcaatcacggcaagatcttcaagtgaacatctcttgccatcacctagctgcctgcacctgcccttcagggagatgggggtcattaaaggaaactgaacattgaaaaaaaaaaaaaaaaaaaaaagactggatccaattgctgaaaggacttgaaaagaattatagatgcatttttttaaaagtatcatatatgtttagattttactcatccttgttgctttcttaccatttattctagatagtttaatattatatgctttagtgaaagctaacttatttttgctgtt

SEQ ID NO: 5172 - DNA, 1199 bp, Homo sapiens
gcaaacccctagcctcaagtgatcctctcgcttcagcctgggattacaggcgtgagccactgtgtctggcctgccttctcatattattacacaagatgtttaagaccacaaaatactgtctggtcctgccagctagactgagttactggaaggcagaaatcgtgttgccgtcctgcacggcccaggcacagtgctgggcacatggggagggtggtgtccctcacacatgtgctgcttgatgacagtagtggtagaggggtctggagggtgagttgcttcccccagctgcagaaccatcatctgcacactcagaactagcttgttgcctctgaggttctattttatttcttcagtgagacacatcatttctctgttgggagttgggtatagtcaaaatcacctcttcaaaaagcaactgttttctcctttctcctgacagctgtacctcccacaaggattaccccttccatgaagagttttgaagctgtggttgcctgctcgtccccaagtgacctatacctgtgtttcttgcctcatttttttccttgcaaatgtagtatggcctgtgtcactcagcagtgggacagcaacctgtagagtggccagcgagggcgtgtctagcttgatgttggatctcaagagccctgtcagtagagtagaagtctcttccagtttgctttgcccttctttctaccctgctggggaaagtacaacctgaatacccttttctgaccaaagagaagcaaaatctaccaggtcaaaatagtgccactaacggttgagttttgactgcttggaactggaatcctttcagcaagacttctctttgcctcaaataaaaagtgcttttgtgagcttggttttgtgagctttggttttttaaaacaatagcaaccttctatctcacttcaaccatcactctccacatacccataaggcaggccagtcagtgatgcaaaaggagtgaggacttgacttttctacaagtcctcaactgcaagttgggggcccctcaccccagtactttacccatttagctttagggttgtgggtctcatcctggctgcacaccaggtcacctttgggggctttaaggctggtgatgtctggacctcgccctggaggctgatctgattgggctgtgatcaggacagcaggagtgtacaggctctccaggtgattccagggtgcagccaagg

SEQ ID NO: 5173 - DNA, 1185 bp, Homo sapiens
taatttggatctgtgtcctggctcaaatctcatgtccagttgtaatccccaatgttggaggtggggcctggtgggaggtgattggatcatgggtgtggatgtcccccttggtgctgttctcgtgatagtgagtgagtgctctcgagatctgtttgtttaaaagtgtgtggcatctccctgctgtctgtctccctcctcctccagccatgtaagatggggttgcttcccctttgccttccaccaggattgtaagtttcctgaaacctccccagaagccatgcagatgtcagcatcatgcttcctgtacagccagtgaaaccgtgagccaattaaacctcttttctttataaattacctagtctctggtatttctttatagtaatgtgagaatggactaatacagaacccttagctaggagggcttttagcaactctcccaatccagaactctaacactcctcccctcccatggagaaaacccatgctcgagactgcccaagttcaaagagaccattctacattatctaggcactagagcctagagccatagaatatatctatttagggccagatgctccctttaccaggctggagtggcaaggagagctgggactacactcacttagaagagaacctggccatttctattttctgcttcctcttcattttgctggctggtgggctttggaccagccttcttcctcaatgcagtaataaggtccaagattcaaccgaagattcaactgtagtccaactaagatcagttggaagataccctgcatttggaggccaaggctccagccaataggaaaagtgctctttcgtccagtactggcctctgtacatatttcttcccttgggaaactcacagagaaggttgcctgatggtagggagccaaactgggggttcccaggtccgttcctgctaaatactacccttttaagatggtttataagctgcaaagacctgattgcaaatatttcaaaaataataataataatacaaataatggtaaatgtctattggcatttttcatccaacgggttgtgccacccatactatcatcacttttcttttctatatccccatgaagttaattggcaaatgttataatgttcacttacaagaagcaaagacaagtttagaacctgacctcaggacacaggaagagttctaacacagaa

SEQ ID NO: 5174 - DNA, 1150 bp, Homo sapiens
agccaatatcacagcttttgaaaaattaaaaaatcacactatattaatattttatatttgccaacagaaacatggcagataggtatcaatatgttttcaatgcctgatgacctataagaagaaagtattgaaaagaagagagattagaactgttagaaggagttgaaattttctaaaagacatagtatttagtttataattaaatgcattcttgaagtccagtgtgaattttattaatgctatcatctcgaccaagctcaaagcctacttattagaaacaatgaagttcacaataggtcataaggtctcttccttttctaaaattgaaagacaagaaatttagtgccaatattgtacagacagaaattccatgtatgagtctcaacaaagactacctttggctaaatgtctagaagcagagaagtaaagtgagcaaaatccagtgttgaggagtcatgacagtactttgatctttatatactctgaagcatttcttcaaacttttctacttttatttgtcattgatacctgtagtaagttgacaatgtggtgaaatttcaaaattatatgtaacttctactagttttactttctcccccaagtcttttttaactcatgatttttacacacacaatccagaacttattatatagcctctaagtctttattcttcacagtagataatgaaagagtcctccagtgtcttggcaaaatgttctagtatagctggatacatacagtggagttctataaactcatacctcagtggacttaaccaaaattgtgttagtctcaattcctaccacactgagggagcctcccaaataactattttcttatctgcagtattcctccagaagagctaaccagggcagggctggcatgagaagtgacatctgcgttacaaagtctatcttcctcataagtctgtaaagagcaattgaatcttctagctttagcaaacctaagccaaaggaaggaaagccatgaagaatgcagaagtcaaaccctcatgacaaagtaggcacaagtctacaataagctaaatcagaatttacaaatacaagtgtcccaggtagcattgactcccgtcattggagtgaaatggatcaaagtttgaattaaggcctatggtaaggtaacattgctt

SEQ ID NO: 5175 - DNA, 1254 bp, Homo sapiens
ttggaatggaaagtattaaagcatatattatacatgttcatgattgcacatgcctaatttacttaattgcttgtttctttaccattcatttacattttcaaactttttattaaaacattctgagacagtgactgtcatttcagtaatgtaatctttgatctgtgttttctgtgaagtaaataaaatttttgtgatctttagatagcatgatttctattttagaatttatgtgcagaaaaaatgagtgtctaacttttttcttgtttatttgtagtacacttataaaaatgactgaaaatagtgaaattgaaatttaggattattgtcattttctttttttgtttttagtatgtgtacaatcaacagtagtgtaccttttgggatgtagaaattaatgttaattggtcattattcttctgtgagaatgctcagattttctgacttttggatattattcctgtgtatcagaagtgagaatttatctggtgatcggtaaagtggtctatttttgtgttttcagatatgattcatcaacttccactgttgacagaaaaacagtacattgcaacaattcactctcgtcttcaggactcacagctttggaaactgcctgggctccaagccactgttagacttgcctgggcgctggcattgaggggaatatcccagctacctgatgtgacaggtgaattgattgtaggtaattttgttatgagaaacagcatgttagcacttaatgacatttttggaaggagtattatctttgacatacataagcataagcataggaagatatccagagttgtattaaatgaaacctttagtgtagtagtgaaatacagacttttttctccttgtctctcaaaaatatcatatgaaatactatttcccattcttggagccactgacaatgctcttttaccttcagggtatgagtttaaaatttggaatgacagtgtcacattaattttttttttttttgagatggagttttgctcttgttgcccaggctggagtgcaatggcacagtctcggctcactgcaacctctgccccccgggttcaagcgattctcctgcctcagcctcccaagtagctgggattacaggcatgcgccaccacacctggctaattgtgtatttttagtagaaatggggtttctccatgttggtcaggctggtcttgaactcccgacctcaggtgatccgactgccttggcctcccaaagtgctgggattgcaacacgtgagccacc

SEQ ID NO: 5176 - DNA, 1203 bp, Homo sapiens
tagcaaaaacttatttaaatatagcctatcaaggatggaatttgattctcttacaacaaataaaatttaaagattgtgttgaagggattagaaaattaatgggaatttaaagtttttgaatgaaaattgttttacgaagatttctgattttctcttcccaggctgtttatgaggaaaaaaaaaatcctggtttatttttgtttcttgtgtttgtattgaaaccaattcagatcttgaaatgaaaagttgaaaactaattatggtagaaaacagttttaacttagtttattgacatggctaacaattattccaggctaatgcagtcttatcgagattctactttattttctttttgaccaacttttaacagttttctgaattcagactatattcagacagtcttagtctgttgagttttttaaaagtttagcttgtgtcatctttatgttttaggaagttgaggctcacacatgccataaacaaatttctattactagtaattgtcagcatctaatttaccttttagagtaatggcgttagacctctgagaattatctaatggcaaaaggtttttcactctattttcataagtgtcttatttttagttctgggattttgtttaagaagcttttagaaaccctctttacacctaattaaaaataaaaattaacatcttacctattatggtatgtgttttataaaacttcatttagctttgcctgaaattattattagtattgttatatggttaattttatgtttatactgtcacagtttagggtttcaatgtcaagcatattaaaatagtattggattaaaaaaatcttattgtaggaccaggcacagtggctcgcgcctataatcccagtgcttaggtaggctgagacaggaggaacactgaggcaaggagttcaagtacagcctgggcaatagagtgagaccctgtctctacaataaaaaataaataaataaaaataaaaactattgtataagtgattctcagccttaattaaatgttaaaccacatcattaattgaggtattataaaatcatgcaatttaagtttaatttttcttatgtatttgttttgtgaaatcaaaaccaaactatgatagttttttgagttatgtatttgaaaattactttaaaatattgttttatatatcagtgtcaaaatacgatagattcaggatctttgtgaaa

SEQ ID NO: 5177 - DNA, 1144 bp, Homo sapiens
caaataggaaaagaagtcaaactatctttgctcatgatatgattctatacctagaaaatcctaaagactgccaaagggctcatcgaattgataaacaactttaataaaatctcaagatacaaaatcaatttaaaagatcagcatttctacacaccagcaatatccaggctgagagtgaaatcaagaacacaatcccacttacaatagccacaaagaaaatgaagtgcctgggaatacggctaaacaaggaggtgaaaggtctctacaagaagaaatacaaaacactgctgaataagatgtcttatacataggtccttttaaaaatacgtttaatcagtttgattactaaatgtacttccatttaaaagcactactgaatgccaagtactatggactgaatatttgtgtcctcccaaaattcctatgttgtaggcctaacccctagagtgatggtattggagatggggcctttggaaagtaattagggttagatgatgccacgagggcagggccttggtctgatgagattagcacccttctaagaggagacactgtgtgttcactccttcgcccaaagccctctctcttctctctctctctctgtacctctgtatgcacacaaagaggagaagtcatcatgtgaagacacaatgagatcattgccacctacaacccaggaagaaggcctccacctgaacccaaccatgctgacaccctgatctcagacttccagcccacaaaactctgagaaataaatccctgttgtttaagtcatgcaacctatggtattttgttatggcagtattatttacagtcctcagggacagcagaaaagtgggaattttaaagttgtgatttatctacatatttgattttatatacttgctgtactatcatttatttgagtcattagcaatttagaaagctttgtatagcattgttgtaaataatgatttattgaacaccaattttgattctgaaaggaaagaattctaattttaaaatataaagaaagaagaaaggaacacaattggatatacagagcttataaaatacagctcataaaactgctggtctttaagtttctgggatgtgagagagtcaaaagtgtatatcaagtactactttctctcatttcttgtta

SEQ ID NO: 5178 - DNA, 1144 bp, Homo sapiens; identical to SEQ ID NO: 5177

SEQ ID NO: 5179 - DNA, 1118 bp, Homo sapiens
tacacttgtaaccaggtttcccagagttgttgataggcttctgctgaacatatgccaacccacctgcataatatatttttgttgcttttataaatcatgcattacataaagtgtgacaacttcaaaatgtattctctgttcttggaatacagtgccctaaaatggtgttcttatgacctgcagaaaatatttacacatatttccaaatatttatttcatgagcagtacagctaattaaaatatataagcttaaattttatatcttacatttaaaatattaagattcctttgacttgccatccatataagcttgctaaaaatattaagaccaagtcatgcaataattgaatgtacctcaaatttttaggggagggtgggttagggactgatactcagattgtggataataattgaattggtttttaaaggcaacatagcattctacagcagggttaatctattatcaagaacagtcaccctggttaataacaagttttactgatcagttgctggttggttggttggttggcatgtgggtgtgtgggtgtataggtgtgtgtgggtgtgtgtgtgtatttttccccatgagtcctttttttaatcctgtggctttttcacttacaactagcctaaccctgtaattttcctacatccaagaaaacaatcacaaagtagtggtttaaatactttgttgtatttggctaattttgctgtcttaatgcagcctattaagagttgggttaaaaatcagtaatcagtactttattacatcactgaactaaaatatggagacatcctcattgaaaatggagggcactctatcagtctataactatcaacgtagtgcaacagggtgttttgatacctttgttttcacctcttgacataatgctatttaaaggcttgaatttttccctttatataattttcacctttactttcaaagtgttttgttgtagttggctattgcagagagtgcattgtcctatcattcctaaacctggtctgctttctacattcatggtatggaaaccatgtgattctttgtacagtttatcctgatgttgcttgtaatgcagtagaggctatttcgccttcgcttttctttctcgaccttt

SEQ ID NO: 5180 - DNA, 1118 bp, Homo sapiens; identical to SEQ ID NO: 5179

SEQ ID NO: 5181 - DNA, 1194 bp, Homo sapiens
accgtttgtaaccatgtagagctgttgttttatatgaaagagattttcttctttttgaaatcagcatagtacattttagttctgctttttcaaaattaattactttgattttattattgcataagcttctttaatggataccctgtagttttgttaggcagattttttttgaaaattgattatactctttcaaaaattcttagttgctaaaatagagttgttccagtgcatcttttaaaagttataatcagtgtttatattaagtctaatttgttctgccttttatcaaaagtagaattcttatggattattatgaattcacttgaaaagacttggtttaagaactttccagattcattgacatttccaatacattatccagttgatttatccttagcatacgaaaaaaggcaaaataataaacagggatttagaaactcagtatgatcacaactaataggggagaaatcagaaaaacaaacatgattgctagaatatttgaaatcaaactttatatgatatgctgtatcatttataatttattataaacccaaatacttaggtattattatctctcttttatggataaggaaaccatttatctcggggtggtctaactgcttgaaagtcaaatacaatgtaatggaatcaagatttgttccaagatgtaggattcagcagcctgtgttcttactattacttgaaattgcctttcagaagtactgtcaggtcagttaatgagaaatggaacatgtacatatctgcaggtaaaaagacttgtggcctcatttttaattggcaagctggtaaatgagaaaaatgtagagatcaacagatgagaggcttccatttcaaagtttaggtgtgagcacattctgtggtgttctctttttgcccccagtgacagaaaagatgtttttaaagtgagttgatcagtatctgctttggaccagaagaattggatccatcaaacaagaaatgataaggaaaccttgaaagacagaaaacaagcagggtagggccaaagaagaaattcccaaataagagcaagagagtattgttgcaaaaggcaagagctgatccaaggccacgcccagaggtgcctagtacccccaagcaacaaatggagtgacaagttggatgcacttcaggaagaagcaaattaaacccaaaaggaaagactgagatgcaaga

SEQ ID NO: 5182 - DNA, 1194 bp, Homo sapiens; identical to SEQ ID NO: 5181

SEQ ID NO: 5183 - DNA, 1127 bp, Homo sapiens
ctaacagttgtccctttaggaggacaaaatggggtcaagaggacacagaagagttgtatagcaccagattggttccaaatagttaatggatgtgtgcacattttctgttcagggattaagaccagaatatcagtggatttgttttccccaccaagtggcctcttagactagtcattaacttatgattagctctaaagatttcaaatagtggcagacagtgtcttctgaatgtaagttttgagaaatacgagtctgtcagagcggccataagccataaagagtcaatctcttaattatatttttcatcatgtaaacaagtttcccatttccctttcttagattgcaccagtgaaggagatgttttgcaaagattcagagaactaatttttcactggataagacctgagtaacccagaccccccaccgtggttcttttcacagccctcgactttgcacttaaaaagggatattgtaaatgaaaggctgcagtgccagttttaagaaagaatttctgtgaagtgtgaggactctggagtctagctcacataaagagagtgttatataaaaatccgacagctgaactaggttgctcttttttggcagggagtggggatgagatttgacaccaatatgggcaaaattagataaccttttggttaatataaatgattttgatttggaggcctaatttgtagattgtgaaagcagcttttagtttaacttattcacagaccccttataattaccatgtttttttttttcttcctaaatctcttggttcagcttgtgaatcttacgtgcccgtaaagttgggatgttgaattggctcttctttgttctggcagtgagtcaagtgtccagcattttttcataagtgttttttaaaattgttctccagcattttatggctcctccctcccatgtcctcagacccagcaaaagcgtagaggcagaattagaggcctctccaggccagctcctctgcccacatgtcatacaaggtgtgaatttgagcacagtccagaaatggagacatcccacccccagttgaataatggcccattcatgccaaccttgccaacacggagagggcagagatgcactagaagaccttcatcctccccttc

SEQ ID NO: 5184 - DNA, 1162 bp, Homo sapiens
ggggaccagggttggctgacggggcattgcctgttgtggcctcggctattcaggtattcctgcaggagagagatgctgattgctgctcatcctctctgagggcagtgtattagtctgttttcatgctgctgataaagtacccaagactgggcaatttatgcagaaaaagaggtttaatggcctcacagttccacgtggataaggaggactcacaatcatggtggaaagcgaaaggcacattttacaaggcgtcaggcaatagagaaaatgagaaccaagcaaaaggggtttcatcagatctcatgaggcttatttactaccacaaaaacagtatgggggaaactgcccccatgattcaatgatctcccgctgggtccctcccaccacatgtgggaattatgggagctacaattcaagatgagatttgggtggggacacagccaaaccatatcaggcagctatgggtaaggtcatcttttttgggtcagttgttgtgtctcaggagagcccttcccatccatagtatgctgggtggtctccattggaagaagggacaaggaggtgatgtgctgaggcttcccgtggccttcagcagttagttctctggccgagcagaaccagctgtgtgggccatgcccaccacggggctgctgtacaggggaatccattgtcctgggggctccaggagtgaagcgtttacctgcagttatctcccttggctcagtagcagtggctggtacaacagaaatgtgcactgttcagaaagaacagtgagacccaagagtgctttcattcacgtggaagcctggttggattcctccttcagaagcccatctctgctgccctggagatgcctgatggacgctgaccaaggctccataggccctggcagagagggtgttgtgcctccttgaggaaagacgcgggagactttagaggagaaagtccccccactgcactctcacttatttttcctgtgctcactcccgtatctgaagatggatttcatgttttctgaatgaagaatgcctggcgtcttgcctgcgggcatgaccacgcacattgctccagaaacaaaccggcttttttcaaagcagccactccggctttttgagatggattctcgctctgtcacccaggctggagggcagtggtgtgatct

SEQ ID NO: 5185 - DNA, 1169 bp, Homo sapiens
tctttcttacaggtgcgttctttgaagaaaacttgtgaagcctgtaaattgagtggaaggagtaggaattatttgggttattaatatattcttcactttctaaaaatgaagaaaaaatatccatcttctcaagtttaagagttctttactagttgaggggctgggcctagttgttgagtttggagttactgtatttttttctgatgcgaagtagtctgggcccagtggagattctagggtgaaggaggacttggggttgtataattaggcacccctgtggacagtcaggatgctgtacagacggtggggaaaggaatgaggttgtgatgttaatggatttctcaagtgtttatttgccttctgttatgtctaggcattgtagattcctgtagtcacatctttgaagagagagaaataggtttaaaaaaaatgcagaaagtaagtggtaaatgtgttaagagaaggaaatgtgtgagtccttgagtgcactttgggtgcctagtgacatgatttcctgggtgagtggaaaaaggctagattgtggaagtagcagttttccaggtggagaagggagggaagtggaattccaggctgtaggaacctgtgttcaagatggggaggagtgatgagcgctgtgttcagggaactccacgtcatcattacatctgactagaccagagtgggaacccagtggagtggagaggccgaagaagaaaagacaaaacattttatgagttttaatgtacactggggggtggggggcattggattaaatccacacacactgcttttctaaaaggcctctgtttgacaaaaggaaatgctgttcagctctaaaagtagctcttcactactgggttaattgaatttgcctactttcctgtaagtgacaaatccctttttctagaaaaaggtgaacagattcacctagctctgtgcggaatgttgtttcacctgtctgaatggtctaactcttttaggtggggccttatgctgtatgctagcaatcgcaaatgtttgcccaactcaaagaattcagaacctggattgtgaaattcaagttaaagtaaaataactatcattgttaaattgtgctgtttcaatatggcttacctgggctgctggcttctcgagaaatattcggcatggctgtccgtgtgaaggattgc

SEQ ID NO: 5186 - DNA, 1161 bp, Homo sapiens
ggttgcaccaatctgcattcccacctaaagtgtacaaagggttccttttatccgcaccctggccaacacttgtcttccttgtctttttgatattagctggatcctaacaggtatgagatgatagctcattgtggtcttgatttgaattttcctattgatcagtgatgtggaacatcttttcatatgcctattggacatttttatgtcttctttggaaaaatataaattcaaactctttgcccatttcttaatcacgttatttgggtttttgctattgagttgtgtgagtttcttataccagttgagcatcccaacggaaatctgaaattctccaaaattcaaaactttttgagcaccatcatgacaccacaaatgggaaattacacacataagaattgaacacaccttggattcatgcacaaaattattagaaatattgtataaaattgctttcaggctatgtgtgttgagtatatgaaacataaatgaatttcatgtttagacttggaccgtatccccaagatatctaattatcaatatacataatacataaaatctgcgtgtgtgtgtgtgtgtgtgtgtatctatatattcacataaaaactatcaagaatcttactgtcttgccttctcttcctggcgtggaggcaccagcatggtgactgaggtcactgcacattggagagggttggggaaccgcaacaggcatgaagctggcagccacggatgtgaagtggtgagggaggaatacggaagtggtaagaagaattagccagtgtcatttggattttggttacattgagtaaataagtaaatggattgaataagtaagtaaatatattgaaggtaatcgcagccaagtttccagagaaggtgtttagaaagaagttaggctaggaagggcccaaagatgtgttggattggaattaagagtacaagtatgaacttagagttttatttttattcttggactcagatctagcaataattatagatgtatatgtccatctgtatgtgtgtatgtattcgttgttggtgtgctgcatcccaatagcagtgaggtcacttccttccagatcttggtttcaaaataccaaagaaagggggggaaagtaaaagttgtgcccagaacatgttgttataccagaaaactaccaaaat

SEQ ID NO: 5187 - DNA, 1177 bp, Homo sapiens
taaacccagaggtgctttggattttgcatccagctttttctcaacacccccgctggaactcagcggctccatctcttcgccttcggaagcacctgcgtctctgtctctgatgccgagtgacttgtcccccttcacatctcagtctttttctcccttggttgagacatttacattgtttgactctagtgatctgcagtcatctcagctgtctcttcccagttccacaaatcttgagttttcgcagctccagccaagttccgagctgcctttaaacaccatcatgttgctacctagccgttctgaggtgtcaccatggtcaagcttcccttctgattctctcgagtttgttgaagcgtctacggtttcactgacggattcagaagctcattttacctcagctttcattgaaactacctcctatcttgagtcttcactcatttcccatgaatccgcagtcactgcactggtgccccccggctctgagtcttttgacattttgactgccgggattcaagcaacatcaccattgaccactgtccacacaacgcccattttaactgagtcttctttgttctcaactctgacacctcctgacgaccaaatcagtgctctagacggtcacgtgtctgtcctggcctctttctccaaagccattcccactggtacggtgttgatcactgacgcgtacctgccatcaggatcctcgtttgtttctgaagcaacccccttccctctgcccacagagctgaccgtcgtgggcccatcactcacacccacagaggtgccactgaacacctccacggaagtgagcacaaccagcaccggtgctgccactggtggtcccctcgactccaccctgatgggtgacgccgcaagtcagagccccccagagagtagtgctgctcctcccctgccatccctgcgtcccgtgactgccttcactctcgaagcaacagtcgacacaccaacactggctactgccaagccgccatatgtttgtgatatcacagtccccgatgcctatctgatcacaactggtaaggcccagcttcctgccgcctctctggggtgggcaatctttctaaggagcttgtgtgcagtgcctgtgaggcttggagcttcatggttaagagcagaggcgctgggctcagttaactcccaggtagtactcctatgc

SEQ ID NO: 5188 - DNA, 1196 bp, Homo sapiens
taaattcaactgtcctgcagtaacataacatttgagaaacagagacaatgtaataagttttcataaagctaaattaatgtagagaaatttttatcatgaaatgctatcttttcaattgagggaaaaagcaaaaatgtcctttttaaagtgagaaatggctgtgttttctcctaatggataataagagtcatgccacttgtgttgagctttttactttcattgtcaacgatatttctgaaagcccttatgctctgcatattttgtttctttttttctagtccagatttctcctggtgataattaaaaaaatttttacatttaattattactattatttacacttaccattttactatgtatatttttgtagtaagctatcttaaatctttaatggaaacagtgtagggtataaatgcatttcctttacattgagagacttgctggacctttacttgtttatgttctgtttttatatcttatcattatgcttttatatgtgatgttattggtcctctgtcatctttgttgcagtattttattcaattctataatagtctactttaatcttagttttgttggtattcattctgtaaaatattttatataaccatgcctttctctgattttcactcatgattaagctgttagaaagttatcgcattatagttggaaaagagttttctttggtaatttatcggggtttttgatgtcaagtcgcatgtctgtagactctacaaattcaatgtattctaaattgaattatgaattttcctttagtcttgttcctgcttttatttccttatttttgaatgtcaccactatctacctaatgacatagacaaaaagctgtaaattgtcctatacttttttttctccttgttccctttgtcaaattggttacccagtgttggagagtttcttcccctcaaaaacctttcaaatatttatccttctctgcccctttctttccaccctgtacatactgccttgtttcaaaccctcatcatcttcctgcatatatcctacagatgcataaactcagtggttttcaagtcatctgttatgggagtttttggtaaaaggtgccctgttcccactgcagtgatggtagccctgttttaatctttaatagaataagcgtttgtggatttcactggtctccttaccactcttcacttctcctgccttccatctgg

SEQ ID NO: 5189 - DNA, 1194 bp, Homo sapiens
agttaacgtttcattaggcaatgtgcctttgtttgactggtgtgtaagtccttcttccaggtttgtacgctcttaaacgcgttattctaccctctctaactcctcccagcagcaaaagggagacacttcagctggaacaaaatagtggaagaaatggcgtctggggttcagtggggattcgcagtgtgtatgcaatgtttgcaagattattttttatgtttttcaattactgtaaataaaaatatatcaatgcttagtgtcaagaagggaacattgtataccagtataaactctcttagtgggtctgcaagttgcttaacctctcggggcctcagttttctcatctgcaatatgaaggagttggactcgataatctttaaagtccattcctgctctaaaatcctatgcttttctgaagtactctatttaacagaatgcattgctttctcactttgactatttgaattatgtatgcagtacacttactgcaactgcatgttgtctaaaatagtttttctataggatgtatataaaaactaatccctcttgagctgatttataatgtgtgtatatagccacacataaaaagctagtaatagtagggctctcagaaaatactttccagttgtctaaccttgaatgttattaactcttctatattacaggagatacaactcgtcaacgaatcaaattcagtgatgacagagtatgcaagagtcaccttctcaactgttgtcctcatgatgtcctttctggaactgtatgtatttactaaatgtattgttagattactgatatgctgcagtaatgaactacttgataaagtcttaattctgtgtcaaaagaattgacttgtgaggggagatttgcatcctttattgtttgtttattcaggatgattacttaaatcttcagtaatgggtttcctcacaaaagtggttgatacgttttgttttataattttttccattcttcagagcagttttttaaaagcatgttttatttggaatacagaagtagttatatagcatttgtacttttagttcagaaataaaataatttatttttaaagttccttttactgttaaacagagtagacttttatctagtacggtatacatttttgttaagatttgtacacatttgtggaatcagtggggaaatatattagtaaatacttatatccacacagct

SEQ ID NO: 5190 - DNA, 1099 bp, Homo sapiens
tttattgatataaagttgttcatagtgttctcttttaatatctgtagaatgtttgcaattcgtgtcttttcttaattaatctagctggtcagttttattttgtttttcaaagaaccagtcttctgattttattgtttttttcttgttttctatttcattgatttctgttcatgtttattatttccttatactccagtggagagaggcgctaaggatagaggatggggataaagggaacctataattttcataacaaaatagccatgcttttgtggtttttttttttttttttttttgagctggagtctcgccccagtgagccaccgtgcccagccacttttgtgtattttttagaaaacacttttggtataagcatagtatattttatttaattgtatgacttttagtgagatttatatggtcattgtttttctcacttttgtttaggaagtttatcggaattctatgccagcttccagttttcagcagcagaaacttcgagtctgtgaagtctgctctgcctatttaggacttcatgataatgacagacgactggctgatcattttgggggtaaactgcacctgggatttattgaaataagagagaagcttgaagaattaaaggtacattggtaaaatattcctcactttatcctcttgttcttttgatctgtatcagttgcctttttgtacaatattcttgactatgattcagtaatatagtatctaatgattaatactaaacagtgtaggattatagatggaaattcaagttggtttaatggatgctgcctgagaaacagacttaatattatcctgttattttgggagttaccattttatattagatatgacaccgagttagggatctttcaaactagttactaaaagagtcccataaaacttcattgttattgttcttttcaataaggtcaataagaatgtaataatataatatttataagaagtttgagaaaatgaacccaatattaatttgaaatattttgcaattctttattaaatagcaagcttgcagaatctctagttttattttatgctcctgcttccacttcagaaaggacttatgaaaaaatttata

SEQ ID NO: 5191 - DNA, 1213 bp, Homo sapiens
ttctgctcagcctaccacgctaccctccccctgctaagccacacccaggtgagaagggggtgtccaatctaagggggtacagatctttctagaccacagaatcctagcactggaaagaagcttaatgattgagtccagctcttcattatagaaatcaccaaggtgtagaggagtagcatgaccataacttcgtgcagcctctaactcctgtgctcaggcaatcctcctgcctcagccttttgggtagctacaggcatgtgccaccatgcccagctttaaaaaaaatttttttttggccaggcacagtggctcacacctgtaatcccagcactctgggaggccaaggcaggcggatcacaaggtcaggagttctagaccagtctgaccaacacagtgaaaccctgtctctaccaaaaatacaaaaattagccggacatggtggcgggcgcctgtaatcccagctatttaggaggctgaggcaggagaattgcttgaacctgggaggcagaggttgcagtgagccgagatcactccactgcactccagcctgggcaacagagcaaggctccgtctcaaaataaataaataaataaaaataaaaataatttttttttaagggacagggtctcacgatgttggccaggctggttcaaacttctggcctcaagtgatcctccttccttagcctcccaaagtgctggaattacaggccatgagccactgcgcacagccaagcacttatgtttttaatcgttggtctctgggtcatcttttgataggctgggcttggctggacagctcagctttataatgcagattgccagggcttggtttgaggctgcaggttgggtctgtgtagaatattccatccccatgggagagggagaggagtggatgtttgctgaatagtaatccagtcagtgggtttgagagcatctacaaaaagggaccaatagataggatccagtccttggcataattttgttttccttttttatttatttatgtgttgtgtctcactctgttgcccaggctggagtgcagtggcataatctcggctcactgcaaccttcacctcccgggttgaagggattctcttgcctcagcctcccaagtagctgggattacaggcatgtgccagcacacctggctaatttttgtatttttagtagagatggggtttctccatgttggtcaggctggtctcaaaatc

SEQ ID NO: 5192 - DNA, 1764 bp, Homo sapiens
ggtggcatctcatgggctcggggaatgtcgagtcactgactgtccagcccttagccagcttctctcccacatcctcagagctctcctgtgcttctgaaatctgttaactaaatctttggcttgcctctggtatttaagcaagaaaattccctcccagaggtgaccccatccgcttccccacaatccatccttttgccatcggcgcacctggggcgtggcttaggttcttcaatgcagggacatttgccccctcccagaagctgctgggcacagtgaggtggcgtaagagtgactggcaggtggtaccttccccaggaaatttcaccacaccacccagttcctcagcctgccccctccccctgtgatgcatgcccccagcacccaattctagccagctggaagtgggtggagggacagcaggaggccagagaaaccctgaacaaagctgggcggctgctcaggcatcacaggctgcaccccctctgaaagcatccccactgggctccggccacatcttcagtgcactgtgctgtgtgcgctgggtgctcacacgctgtccccagacccacaaagtgctaggccccagttgaagaaaggggtgaaatagccagcttcaccgaagggaagggaagggaagtattgggcgatgccagccccacagacgctcagcaaacattagtgcacattctcctagtcctcacccaatggcctcctctacccccatgcatggagctgccacatcagaagccccaagagaagctccctgcaggagaggccagctccctggatgcccaattgcatacctggccgaatctgccattgagtcaccttagcaaataggctgctgtcactaggaccaagctctcaagcagagggatgccaacctagtccttacttagcccacgaatcatctagagcatcctctagtcttttgtgggctccctccttcccatttgaagagacattgttcagaggaagaggggaagatttgaaatgtcaggtcacggaggagtgtttaactggagcctggtgaaccgcagggcaatttgcttctgctcactgggttctgactggcccgtctggacgtgggcccccatgtctctgtgcttagggcctcttcatgatgttttggatgtttccaagggaagtgggtgagcagatcaaggggtgggagagtcgaggcttgatgccagttaatactgtgaagtggagcgtgcggtcagtggaattcagaggaaaaagaagggttggagcaaagcggcattcatctcctggactgttagcctttctagtcttcctggtggctgaggtgttcacgggctgggggagccagctgacctttgtcctcttcaacctagaagactcagcccgcccagacaccaacgtgtgagacggatggacatcaggaagggaaggggagattagcccaactgctgacagaacgatttcccttggttggaccttgggaatggcaaacactcatattggaacaagcttggggtggaagatttaggccgtgtgagcatgtgtgagtgagtggaacaaactttcttggaaactggagggaggagatgaggaggcttcgggaagtattactgatggctcatggttgagagagcgacgtggggacccagctcgccccagcttttgtcccaggttctctttgtctgatgctgagggcagggtggggtgtgggaccaccactcttgttggcctgtcaagtagaccctaggacagaaaatggaaagaaggaaatggctcggt

SEQ ID NO: 5193 - DNA, 1976 bp, Homo sapiens
aagtcaataacaaaaaacccagctcaagaacccattctacgccaaactggaaaggagaagagagcaacaggaagattccagaaacggggggccccagtttttgaagaactttatgaacttttcaaagattattttcatatggcagcaagtgatacggaagactgctgtcagggacacctgatatggaaatcaaatagatttttaattaattgaacataagatttagggatttttccagaactcgaaagggtcaacagccctccagaatgtcgggctgcagcctgaggaggctgatgtttggagctggtgtgggattggcgaagcccagtccgggctccctagtcaggaaagacgggggacggccaggctgctggaaggcccccgggggcgcggggcgagttttctttttctgagcactctggataaatccctaagcaacgttgtttctcaaatgtcattaataatgtgtgttgcaaactttaggtttttttcttttctgaaaatgtattttctctttgaatccacccctagtcgcgtagcgtagggctagcggtcgtcacagacaccctagtagaatgtagcactcagcacccttgtctcctaccttgtgttcaactccaatgataccaatagaatattcctcaatgtaattgcacaaaaaaaagcgatataacataggcatgtaaccaatgtggcggtgcaggtgtgcgggtgagcgagcacgtgtgggtgtgcacgcgccgccctccccgcgtggccctcggcgccgccaccctagctggcgcagtcttgacactgcatccttccctcctagtgccttaccgagcgacagacgcggcgtgagggtttacttccactggtactccaagaaactgaggctagtcagacacaatctcagctcttctgttgtgctgttgtaacagtttacgctggccttttttttttctttttctttttctttttaaaatgttaatgcccgttgtctttcctgggctgtttgctagcggaaggatgccagggaagccagcaggagctaggagagagtccgtggatctcgaaagaaatatgggagacagatgcccggcgggtgcgtctggagatggggacggcgggagttgagttgtggcagtagttgagttgtaatttgtgggcggaggcccagagagactccccacccttcacccctgccccactctgtccccagttccgccatttgtgaggccagaggtttccggactgttggcctcgccaggcagccgtctcccgccccaggcggcatcccccagtccctcccgcctccacgagagcctggagctctcagcctcgcccggggctccactctctcctccggctccctgggctgttttgctctaacgatcttgccagatccctccctctgtagacaaccaccaacctctgtttgctgttgaattctctcctcacattacccaggtctgctcaagacatgattttggttttggtttctgagggttctagtgggcagaaggttggagggacacttatgagggtggccgggggtctgacgctgcactttggaaaaactcacacagttgaatttccaaagaaatctgccctttgccctctttgcacctttgatacattctggaagttttctcaggctttggacacttctggggatggaggtgtggagaagtggggagttccctctcttcatagtaaataactctgaaatatgtgaatgtgaatggcaggagaatctggccaaggatggggccgaaaagggtggttctaattgtttgcttctgatgttgagtctttagctgaccccacaggcaggtttccaaggtgcaaagagatctttcccgagtcagcggccccatcctcatcctccctccctttacttcctcactgtgcagtctccctcaaggatctactgtgaaaggtgtgtttgtagtgatatccaacctaactcagtaacgaagtcgttacttagc

SEQ ID NO: 5194 - DNA, 1534 bp, Homo sapiens
cctatgtcctgatattggaattctgtttctgagtctcagctgtgttgctggcacctaatggtggcaagtggcaccctggaaccacttggttccacaaactcagtgaccagaatgtgcttctgggtggaagagattcactttttcaaccttgttttcaagtgggaggaatatattctgtatggcccaagccacagatgagaactgaaggggatctgttgagtttacttgtaccaaggtgactccgatacttacttttcgttttcctttccttgtaggtatggcctcacatgtgcaagttttctcccctcacacccttcaatcaagtgccttctgtagtgtgaagaaactgaaaatagagccgagttccaactgggacatgactgggtacggctcccacagcaaagtgtatagccagagcaagaacatccccctgtcgcagccagccaccacaaccgtcagcacctccttgccggtcccaaacccaagcctaccttacgagcagaccatcgtcttcccaggaagcaccgggcacatcgtggtcacctcagcaagcagcacttctgtcaccgggcaagtcctcggcggaccacacaacctaatgcgtcgaagcactgtgagcctccttgatacctaccaaaaatgtggactcaagcgtaagagcgaggagatcgagaacacaagcagcgtgcagatcatcgaggagcatccacccatgattcagaataatgcaagcggggccactgtcgccactgccaccacgtctactgccacctccaaaaacagcggctccaacagcgagggcgactatcagctggtgcagcatgaggtgctgtgctccatgaccaacacctacgaggtcttagagttcttgggccgagggacgtttgggcaagtggtcaagtgctggaaacggggcaccaatgagatcgtagccatcaagatcctgaagaaccacccatcctatgcccgacaaggtcagattgaagtgagcatcctggcccggttgagcacggagagtgccgatgactataacttcgtccgggcctacgaatgcttccagcacaagaaccacacgtgcttggtcttcgagatgttggagcagaacctctatgactttctgaagcaaaacaagtttagccccttgcccctcaaatacattcgcccagttctccagcaggtagccacagccctgatgaaactcaaaagcctaggtcttatccacgctgacctcaaaccagaaaacatcatgctggtggatccatctagacaaccatacagagtcaaggtcatcgactttggttcagccagccacgtctccaaggctgtgtgctccacctacttgcagtccagatattacaggtaagaccgtccacaaggagacaggagctgctgaatgcccagtggcactcacagagaatgtgccaccttagtcactgtggggagataaaattatatgtctacagttcctgccttcaagtgatcttaatgtacttacgaaattaggacatgtgcacattgcgatgtcaattagaag

SEQ ID NO: 5195 - DNA, 1188 bp, Homo sapiens
tcttctgtgaactttgtgatttgttttgccattggtcgcttgtagtaggttcttttttttttcattcttccatattcatgctttctccatctgcactctgtcacgtttcttcatctttgtcatcgtgatgtacgtcttttgacattagttgtctagctaatttaatattgagtcctttgttgaagtgaagcctccttttcattttaaattgtcgctttttttctcgttcttcaggtgagaggtcactatcctcctctccactgctttcttgttcctgaacccgatacttgggctctgagccttcagcagcagctaatttcttagctatctggtgccatggcctcagtggtttctgtatcattacacgcgtctccatcaacacccatcacaccatggtaaggggagtgtttggttcatcagtgttcatgaagccacagtctttgtctgctggatgatatgttgccaggaagttcatttcatcccacttccgggattttttctcagctcttcttctgccgacgcaaccatagagagtcgtagaagtcctgttcttcaggatccccttgatgggccggtgcgaggctgttgaggcggcctttgcccggcgctccggctgtcggctcagggtcgctgcttggcatgggctctgcggagagaaggatcaggcactagccaagcccgccaggcagccgcggagcccgctcaaggctaaagaggccgcacatgctgtatcggaaacggctactggagtgattgtcaacacacaacgaccccgacaccaaagcccacgctgagcgggtggcggctcctcgcgcgcccttcgcggccagcactttacccgtggtccatgctttaaatcagtgaccaagatatgacactatttcacccatagccggattcatggggccaggggtcaggaggtggagaagggaggggtctctttcaccattacctgtaattatgcacctgtgacatttttctttcccatgcctacaactttaggttctgctggcctagaagtcttagttcccaaaagaggaatgcatctatcagggaacatagcaatgtttccatgaaactggaagttcaggccgggggcggtagctcgcgcctgtaatcccagcactttgggaggccaaaacagatggctcacctgaggtcaggagttcgagaccagcctggcccaca

SEQ ID NO: 5196 - DNA, 1180 bp, Homo sapiens
acaatgtcatggtaaaacttgaagaaatgagaagttgcttcttatagatgagcaaagaaagtgattttttgagatggggtttactcctgctgaagatgctgtgaacactgataaaatgacagcaaaagatttagaattttacataaaattagttgatgaagcactggcagatttgagaggactgactccaagtttgaaagtagttctactgtggttcagatgctatcagaccatattgcctggttcagagaaatcttttgtgaaaaaaagtcagtcggcacagcagacttcattgttgtcttgttttaagaaattgccggccgggcacggtagcttacacctgtaatctcagcactttgggagaccaaggcaggcagatcacctgaggtcaggagatcaagaccagcctggacaacatggtgaaaccccatctctactaaaaatacaaaacttagcaagtcgtggtggcacgcacctgtaatcccagctacttgggaggctgaggcaggagaattgcttgaacccaggaggcagaggttgcagtgagccaaaatcacgccactgtactcccaccctgggcgacagagcaagactccatcttaaaaaaaaaaaaaagaaagaaattgccacagtcaccctaacctttagcaaccactgacttgatccggcagcagccatcaacactgaggcaagacccaccaacacaaaaatgatgactccttgaaggcccaggtaattgttagtggtttttaacactattttaaaattaagatatgtgcttttttttttttttttttttagaataatgctattggacattactagactacattatagctacacttttttgttgttaatttaaaaattgtgggccgggctcagtggctcacgtctgtaatcccagcactttgggaggctgaggcaggcagatcacaaggtcaagagatcgaaaccatcctggccaacatggtgaaaccccatctctactaagaatacaaaaattagctgggcgtggtggtgcacgcctgtagtctcagctactcgggaggctgaggcaggagactcttttgaacccgggaggcagaggttgcagtgagcagagatcccgccattgtactccagcctggcaacagagcaaaaccctatctcaaaaataaaataaaataaattatggccaggc

SEQ ID NO: 5197 - DNA, 1180 bp, Homo sapiens
cacttgtgctgtattggtgacgcaaatactcttcagtctgcagttgtaactgccacagtcacagtgcttgttgtatatatgtacaaagtaccatcagtgtgttatttattatagtaatagcctaaatattataaaattgcactaaggtagattatctctgaattacatttattttttatttttatttttgtgacggagttttgctcttattgcccagggtggagtacaatggcgtgctcaccaaaaccttcgcctcccgggttcaagcgattctcctgcctcagcctcccaagtagctgggattacaggcatgtgccaccatgcccggctaattttgtatttttattagagacgggggttttccatgttggtcaggcttgtcttgaactcccgacctcaggtgatctgcccgcctcggcctcccaaagtgctgggattacaggcatgaaccactgtgcccagcctctgaattacatttaagggtagtatagagaatgtacaaaatagttgttgtaaaaaggagaaattgatttctgttttcagtattggaagactgggttattcagatgaaaacaattaaaattcttggaaacagtattaaaaaaaaaaaaaaaaaaagaaaacgtagagcagttgcagagctgaaaagatagtggggagctgccaggccaaattctaggaataaacaagaatccaaataaataagtggatgaagtagcttttgccctaaaggcagttgccaatctgtacaagttgggctttggttttggtggaccattggggtgaagaggacagaaatcaagtcctagagttcatctaaagtgacagtcaaaaagaataacctcagttttagatgggaccccagtgactctatcgttaggttaagggtgaaacaactgaactgtctacacactcccatatccatgtgattgcagggaaggttgaatggagcaggaggaggaaaaggaaattaagaaaaataaacctttcaagttgtgaccacagttttagccttcacagtgatttgccttgagggtttgctctgtctgggtggtccagggaccctccatgataaatgaccctccagccatttatcatggttactggtttcagactagtattacttccatggcctggcagatggaaaggcaaatcacgtgtggagaaaggcctttcattc

SEQ ID NO: 5198 - DNA, 1197 bp, Homo sapiens
tgtaaagattcctgaaaatgtggaagcgacattggaactgggtaacaggtgaaatggcagaagtaggcaagagtgagagggcagaagaaggcccagttcagggagggtgttagcaggatgctgacactgaactctgccctgttggtaattacatgggacccagtgagaaaaggggctcatgtgcctggccaagggtggagttgtctggaaaaatggaaggaggcttccttccacttggagaactttctctgctctaaatgggaagcttatcttctgccattccaatggttgttggtactatttcatcttttccctggagatgcatttcagatagcagaattttgaaaagaaattctgtgtggctatattaaatctaatatgagactttcctttatctaatatcattctaataattcagaggcaagctttagtggagatgattaattcaacatggatatttcttaccttaaggaaacaaaatttaaacttacaagaccaacatcgtagagatgaattctttttaaagaaataaaactcccaaaatgaaatatttttggggccaaaatagttaactattggtaataataaaaataactaatttttttttctgagcagctgctgtattcctggcattttagattgaatgtattcactacctccaatcctctcaaatactctgcaagatgcctattattaactagctagttttatagatgtggaaactcagtctcagagagtaacatggccagtgagcttgcagatcacctttacagcactcatgcactgatttattgaatcttcataccagccttatgcataggtactattatcattatcccactttatagatgagaaaattgaagtgcagagagcttaagtaacttgttcaaagtcacacagctagtgagtggcagaggaaggattcgaactgggcagtctggctccagcatcagtgctcatttccactacaatatgtcctctccgtgtaattgggacaggaccagaaggaaatatattgctaaggaaagaaagcatgacagagtagggagaaccacttagttccaggagctcaaaggaaagaacacaggatggagtgtctgatgttctcatgggagctaagtgggggctctgtgctcaccttcctttaatccccctggacttcttgacatttatcacaatcagcctctccatagcaag

SEQ ID NO: 5199 - DNA, 1216 bp, Homo sapiens
ttagaggccagagaccagcctgggcaacatagtgagaccttgtctctcctccccgcaacaaaaaaagaagaaagaagaagaaatggaacaaggcaggggctagtatggtcccttctgtcctgatagctcatctctgcctgtctgcatttgtctgcttcattctactcattctgcagactgtctttcacttcttttggttcttaggagcagatggtctccttgtagctcctgagtttctgcacccatagagcagcagaccagcagataatccaaatcctaaactcttgggagaaagcatctgtttggttcagtttttgtcatgtgttcaccccaattcaaacagctgtgctggggtgaagtgtgaatggtcacttagaacaaatatggttgcaggaactgattctgaggacagagaaggaggtgtggcttactaacacttaaaagacatttactaccttctgtcttcaatctcatggcttagtgtgtccttataggaactctccactgggccaaactcagtggcctccctgcgaacatttacatcctaattctccaaccactgcccaggtgtgaaatgtacattcctccttcacacacatacacatgtgcacacacacatacacgtgcatgcacacacgcacacacacgtgcatgcacatgtaaacacatgcacacacacgcgcgtgctttaaataatacatcaccttccatagtcagctcaagtcagatttctgtagaataacttttctatcacatcaccccacccacaagatagtcttccttccttgaactctataacacctgcccctttcggcctctcctttgtcacagatgaaatgcctgcagatatgacttatcttctgggtagactgcaagctcttggaaggcaggaggcatagctggtttctgctcagagatgatggctgggaatagtgaccacgtccaccttcaagctgtgtcccttcccaagtgattacactttattccgaaataaagtggttactcactcaagagattcctgccacctacccatcgctggctggctcttccttgatgtcagaattgtgtcaagaagagcagtttccctaattgctttctctaccatttgggaggtaaaattgtcagcaggacaaggcaggaatctatttgatgttctacatgtaatagagtgaggcctccaggagatagcaggattctcgatagtgctgctgttgct

SEQ ID NO: 5200 - DNA, 1261 bp, Homo sapiens
ggatgatggggggtcaagaaagaatctgagcactactcacaatggtatgactagtctactgtgtcttctctgtggattcaagtataaatatattcaccattataatacataggtccctgcccacaaggaaactggcagcatgcggctctttgtagcatcgggctgggaggctctgtgattaggttgcttgagagagaaaattccagttaacgcaaacaaaggaagcaagagtgaggaatataaggaaataccagtaaagaaaacttaggattctaagtgacagcaggtatcttagtaactggttggtgatcacctaatataagataaccacaggtaagatgggtaagacctattttagaaacccataaatttcaggggcaggcaggtagacatactgtcctggtacacatttggaggaaggattatttttctgagcaaagaaaacgatctgttcccctactcatgtgggcttgtattcatgcatatatttacttgttaatccattccttcaataaatgggaattcaaatacttacctggcagggaagataccatgatcacgaaggtggtttttcccagcgtggggctcatcgattgcactccggatgtgctgacccctgtgatattcccaaatgtggaaaactcgactgcataatttgttgtagtgggggactgcattcgcgctttcccctgaaaaacggaaacaaaaaaataggaatttgatggggtggggttggagatgagcagtgttctgaaggcatttttgagtaattattacatatactgtacactgttgaaaatacaaaagaagaaaatgaaaaattgtccttgcttaaaataagcttagaagtccagcttctcttggatatacagtcatccatcttggaaagattagctttgaagcatccctaacctgatttcttagtattaataataacttgtagagactcttggcctttagtcaggtaaatcttcctaataagcctcttaatatttttctgttctagttttgaattccattgtcccagctaataaagaaagtacaaagtactatacttacatatgttattcacaagaatataagtacctcttaaggtgtggtgtatacattctgggaagccagctatggagacacaggtgactatcatcagccagtaccagtgatgggcacctatcatagagatggggcagacagcatcttgaaattgtctagaccaggggtccccagcccctgggccatggaccagtaccagtctgtggcc

SEQ ID NO: 5201 - DNA, 1210 bp, Homo sapiens
ccattttctactttattttacttgctccaatttttctgcttccttcacacatgtgttctcaataagttgacttctgaacctgtgctctcaggtcccagtatacgtgagagcaagaggtcatcatattcatcttcagacttcaggttaggaagaatgtctaagctgccagtctagctcaatctcagaccacagggcagtggccagggcctctggtcctttagccagtcctgccaaagctgccctaagctgccattggaattcacagacctgttatgcttctcttctaggaggcaaggtgtgagaaggtaaagtttactgagcagaaatctgaacaaaggtataaattatgaacaagatgtggatcagcatgttagatgaagactaactactaattacagcctgtaggtacatttggagctttatttccactggcaatgcagaaacacccagcaaaaatgtgagaggagttggtggggcttcctaagaggacaagaagtggaacctggcaggagatccatgggagctcctgggactagagttctgggaagttgaaagaaattctcagaaagagatatgtaatttccagactgggagaggagccctccctgcaattttttttgtggggaggagaagggcatggctcacgtgttgtcctgagctttgttggcccccaactgcaggcagagaaccaggagcagggtggcagggctggccctgaacaggagctggagcaagcgcatgctggagaaaacagaaggcaatgtgtcccagagaagtggtgtcccaggtgcccagcacatttcttatatacagattgatcaaggaagtgcaagagctgccagggagatccatgaggtgaatcacccattcaccctccccactcgtgatctttccttgttgacccaaagtttgtttttctaagaaaaaatcaacactcagctagaatgtcagcgtttgagagaggagtcagattgttcttccttattttttcagcatcagagtttctcaaaatggctgggacctcaaaagatacaccagtttttcccgagtttacagattcagttttcttttccctcctaatttgcctgtctgaagtgctatgtgtagtcttagcttcagtcactgctcccctggtctctgaaagcagagaacacagctgtggtggcaggtttcagaccagagacatagaacatctttgcttgatcaaatt

SEQ ID NO: 5202 - DNA, 1201 bp, Homo sapiens
aatggttttaccttctatccagtctttataactgaagcttctttctcttttctacctactttatttatttattttttggttgggcgggggaggggagtggggaggctttctgataaaaaccagaaagcctgctagacaaattctaaaagagctgtaactgtcttttctacctactttagcttgtagtttcagtacagtttaaaaattagtagtgctggtagatagagataaatgttctgtctcttctggatgagttttagaaaattattctttacatccaggttttgagatttatttgtatgaagtttatgtgttctctaatgttcgttttatttttgttaatattcttgttctctatatatttcattgtcacttttttgttaagaagtggtttttgtattttaaattatgtatttttttcttcagagaaccagctacaatgttagtttaactcataaacagaaaaacagttgtattagggttccttaacaaacgtaatccagcaccagattagtattggtgttaggctgtctggagcctaattgctcacacgcttccaacagaatctgagccttgaatttttcttctttaaaaacacaactttgtccttttttttttttttccttccttttctcagtctttaaatatggctttttacaaatatttaaaagatgatttgttttgtggaaatgtcacttgtttttctccaaattaattttcatcttgtataattctgaatagtccatttccagcatttcccttttgtatatgaggaagtaagtttttgcaagaaattctgtgaagttagcactgctgtcaatgttcacactcttttcatgtagcagtgtacccgcatttgaatctttctgttacattattttggaattttaggtttcaaacagtgtatctttctaaaatccgtttttttgacattgtaattttctgtggcaagacactataagctctcaccaggttcttggattgggtatgattcacaggaattgaatgttagtaatctggggctgtcctctttatcattaaaaatgagtttttacaactggtgacaagctgattgctgacctttctttagaaatcaagaaattgtatgtcagaattaaaaataggaaatctgatttaattgtagagggtctatcaactgcttagacagagatagtaagattcaatttaagtaaatgtttat

SEQ ID NO: 5203 - DNA, 1267 bp, Homo sapiens
gctcctgatgatgaaacaaagccgacaggtggtacctgcaaatccccggagagggacaggccggccggcgccctctccctccccagagcccagcatctgagccctcggcgtccgcaaagtccagacgctgccactcagccctgaaactgacacgaaacggacaagacaagctgccgcgcttcagccacaggcacgcgagtgacgggatttcctggatcattgacccgcggcccagccctggtccggcaggtcgcgggctctcagctccggcgaagctgtccacccagactaaagcgcaattgcccggagcccgcgtggctgcgaaccacgcgccgggtttactttcatatttagctaggcgctacccacaatgcatttgtaaaagtgaaatgcagaaaaaccttggttgattaacataattcttacaaactctcttaagagagagcatttggttttgttttcattgtgtttaatcaaaaagttttacacattttatttttacgatcatggcataggctctgaaaagtctccttacctagaaaagaccctaagtaggcactataaataacaagagactcacaggataacacagttggtccgagtgttgtgggttattgttaagttgatttaacattgtctccccccacaaccgcgcttgactagcttgctgttttgcactaataacagtagtagacaacgtttacataaatcaataaaaacgcatataaaagtaacctttagttgacggtttgaacgaaagagtagcttttagttgatttgaaaaactttcaaggaagcctattggttataagcttcttttagtaagattaacttcccagcagcgttgaagtattaaccttcaaaatgcctgagaagaaaatttacacgaaaggaataattttgttttaattacctttgaatgtattaaatattgtattcggtttttaataaaccttataatcaaggttacttttctatatatgtgaaaatatatatatatatatacacgcatacatacacatatacacacacatacatatatgtatgtatactttcccccccaccaccccgagacagagtcttgctttgtcgccaggctggagtgcaatggcgcggtttcggctcactgaaacctccacctcctggtggctcacgcctgtaatcccagtactttgggagggcgaggtgggagtgggaggggatcgcttgagttcaggagtttgagaccagcttgggcagcatggcgaaacccctgtctcaaaaatga

SEQ ID NO: 5204 - DNA, 1279 bp, Homo sapiens
ctggtgtttcagatgcttccccttcacgttccttaggtggtggtttctgttctatcagttggggtttaaggaggaggcagggatcttgggcagtgggagaagcacctctgtagggagctgactgccaagatgggaaagtgtcagcctccaggtagtggcgcttgctgggatttaccgacgctggaagcacagactttatctgtagggctcacagtttcctccaggtcccacagagctgtccggagggtcacacagcaaacagataaaggaggccagcgcagattgggcggctctctggtaccttgcggtggctgagccactcaagacaaaccgggggaaagacgccctgatgacgaaatgctaattttgcatatctctttcccaggatgcttagcaacacgtctgattcttgttattcagtacgtttttccagctattgataaatagatgtgccagggaattcttagagtatatatatatcattaatattgtaaatatagtcatcagtaaactgaaaccagaatatcactgtaaggggaaaatgaacaaatttgggggctttaaatagttcaaacagtaggaggacttattggctggtccgaaggtagtgagttatctcaattgattgttcacagtcagttacagatcgaactccttgttctactctttccccccttctcactactgcacttgactagtcttttacgagagtttccactctcctggcatccctcgtttcttgttttcatctcaattttaaaatgttgaaagtcagcatcattaaataaagcatggaatacagggggaaaacgaagtactattcttttcttccagaaacaaacagtaaatttgggaaaacccatcacagacaagaaggaaaaagaaaacaaaaatcaaataaatagtaatagatactacggaccaattattggtaaagatggtatagtatgtcctaagagatcaaagacaggaaatgggatgagggtgaataggggtttttctttttcttgtactttttcttttcttttctttctttttttttttttttttttttttttttgagacaggctggagtctctgtcacccaggctggagtgcagtggtgtgatctcggctcactgcaacctccgcctcgtgggtccaagcgattatcttgccttagcctcctgagtagctgggactataggcgcgcgccaccacgcctggctaatttttctatttttgtaaagaccgaagtttcgccatgttggccaggctggtcttgaactcctaacctcaa

SEQ ID NO: 5205 - DNA, 1134 bp, Homo sapiens
gtgctgggattaccatacctggcttttatttttaaagcagttttgatctaaggttggtcgaatttatggatgtggaacctgtgaatacaaaggctgactgtagttgtgttttttgattgcagtggtggttacatgagtgagcatatgcgatgaaataacagaattatatgtacacattgcaccaatgtcagtttacttgttttgatattgtactataatatacaatatgaccttttgggtaaagtgggtgaagggtacatggaacctttttaaaaataatttttgggccaggcgtagtggctcgtgccttaatccaggcgtgccaccacacccagctaatttttgtatttttagtagagatgaggttttaccacgttggccaggttggtctctcgaaccaggcatggtggcacaccccgtaatcccagctacttgggaggctggggcaggagaatcacttgaacctgggagtcagactttgcagtgagccgagattgagccactgcactccagcctgggtgtcagagagagactccatctcaaaaaaaaaaaaaaaaaatctaggctggtttcaaactcctgaacttaagcagtcctcccgcctcagcctcccaagtagctgggactataggcacacttacatggaagccttctgtgctgtttttacaacatcttgtgaatgtataattatttcaaagtaaaacatttttcaaaaactgacacatccagcaatactagacccagtcttccacagcagtaactggttgctgctaagtaaagcatccctttttagatggtctttgtgctcaaaggcctgctattcattcattcattttagtttatttttattatttttgagacagaggctcactctgtagcccaggctggagtgcagtggcaggatctcaactcactgcaacctctgccttccgggttcaaacgattctcctgcctcagcttcctgagtaactgggactacaggaatgtgccatcacgcccagctaattttttaatttttagtagagatgaggttttgccatgttggccaggctggtctctcaaactcctgacctcaggtgatccacccactttggcctcccaaagtgctgggattacaggcgtgagcgactgggc

SEQ ID NO: 5206 - DNA, 1179 bp, Homo sapiens
ctttgggggccagcagggctgtacctgggagttgggttggggcggagcggaggggaggccgtgccaggcagggccggttcgtgcggaaccgccatggccgagccggcttcggtaagaagggccggtggaggatgcaggctctgtcgaaactcgggtccctgtcgcagctggattggggtccgcgtccagggagtggggcggccggggcctgggcctgggggttggcagtggcccacggactgagctccgggctgggctggagaaggtgcagtcttgctgcgtgtgctgttctggaattgacctggggaaaagctggtctggccgggcttggccgcgcgcgtctgtggccccggccactcggaaggctgaggcgggagcagcgcttgagcccgggagctctgcgctgtatatgcgctaggtccgtcgcgcggtgcctctgagttctgcatctgtgtggtgacctctcgggagcggggaccaccaggttccccagggagggggaaccggcccagctcggaaaccgagcagggcaaaaccccagtgctgatcgttagtgggatcgcgcctgtgaatagccactgccctccagcctgggcaacagccagaccccgtctgtttaatacataaataaaagttggtttgggagaaagaatccgggtgggaaagatctgtttctcggcctgttgtaggctcagatcaacaacgctgtccctgccttcagtgtcggggctctgaacctcggggtctctctggggcccgtgctctcctgctgaaggtagtttcagagaagcacatcagtgttaagcagatgagaaaaaggagaaggaaagctggaactgagagaaattggagaccgctccctctaggaaaggacagaaaacttaaaatgaattgggtggttagcgtaaatcgaatttaccgtaaatgctgtagtattgtaatgtagtattgaaaatttgagcaccggttttagagtttgaaaggcgtatcctgaggcttaatccaagaaaccctgttacattcagttaagtataacttgcttaagtgtgcaagtttttcttgtgcccccaatgaaattttataatcttaggaatgtaatgctccttatttgcatttgattcttcccttttgcttcccactccttttccccaccctcctttggcaggtacagattctttt

SEQ ID NO: 5207 - DNA, 1169 bp, Homo sapiens
atctgagcttcgagtgatctgttagagctgggtaggaatgcatgagagttgctagtgagacagttattgatgggtataactctggagtcttttctttcagatgaagagcttgtcatcaaagctgaaggccttgctagatcctcgttgtgccctgaggttccagtccctttctcttctccaccagcagcagcaaaggatgctttttcagatgtggctttcaaaagccagcagtctacatccatgacaccttttggacgtccagccactgacctgcctgaagcctctgagggacaagtgacttttactcagttgggtagctatcccctcccacctccagttggcgagcaggtgttctcatgccaccactgtggcaagaatctcagccaagacatgttgctgacccaccaatgtagccatgctactgagcaccccttaccctgtgcccagtgccctaagcactttactccacaggcggacctcagcagcacctcccaggaccatgccagcgagacaccccccacctgcccacactgtgccaggacttttactcacccatcaagacttacctaccatcttcgggtccataacagcactgagcgtcctttcccctgtcctgattgccccaagcgctttgctgaccaggctcgactcaccagccaccggagagctcatgcaagcgaaaggcccttccgctgtgcccagtgcggcaggagcttcagcttgaaaatcagcctcctgctccaccagcggggtcatgcacaagagcgccctttctcctgccctcagtgtggcattgacttcaacggccactcggccctgatccgccaccagatgatccacacaggcgagcgtccttacccctgcactgactgcagtaagagcttcatgcgcaaggagcacctgctgaaccaccggcggctgcacacaggcgagcggcccttcagttgtcctcactgtggcaagagcttcatccgcaagcaccacctaatgaaacaccagcgcatccacaccggggagcggccctacccctgctcctactgtggcaggagcttccgctacaaacagacactcaaggaccacctccgttcaggccacaatggaggctgtgggggtgatagtgacccatcaggtcagccacccaacccaccaggtcccctcataactgggct

SEQ ID NO: 5208 - DNA, 1158 bp, Homo sapiens
tcgggacattgacagtttagctctacagatgcatttttaagaatcttctaggcgtcaaggacagtgctgaacactagaggacagaaagatggctgagaacagatactattgggctggaaaagagggttacaacccgtgcgcgtccccagcttcctagcctgggtgggaggttctgggtgggtgggtttcgttgtatttacaccatgtgtggaggcttccctcacttccacagcatcattcaatgagagtaaagaggggctggaaatacgctggttgctggtaagaccctgtaacactctctagctgcaccgtatgatgttcagcagcatccgtggcctctacccaccagtagacaagatgagtagacacaaactccactgtccatcctgagcctgttggcagggatctgtgtggcgtttatccctgtcccctttgtctgagaagccaggactcccagctcatcccttgccacatttggcctgacccatccccttgtgagacctcacctccccttctcctcacctcctgcacatccctccactgagccttgtgggactcagggctcagcagacccgccaggtcctgagtgttccctgctcggactgagctccaggggactgcagccctctgagtgcttgtcatcctcttccctgcctctgtcttgagcccaggcccactgggacagggtcctcacccctcagattgtgcctctgccagcctcaatccctctctagagaccttgcctttgggtcccaggccttgtctttttgctacttctgcagaccttccctctcttctcaacactcttcctgccctcagtcttggccatggcagcctccttgttgattgtcctgtgcccccccaacccatcccacagccatccgtgactgtgacgacagtgactttaccatacccaccatctccatctccagcacaccactccctggccgcctcctgccgtcccttcaattccgtctggtgtcctgattccagcagttttccagtccttcaagacctgcaagccatcgaccctgctgccttttcactgccctgactcatcctcatttccctccatgcccaccattgtggtccccccttacacacaccctcagcactcttgcccctgttttgttcattgtatccacttagtgaaatcca

SEQ ID NO: 5209 - DNA, 1170 bp, Homo sapiens
ctgttcctgtgttagtggctaaggctaatgcccttacaggtccatccatgttgctccaaaggaaatgatctcattcttttttatggctgcgtagtattccacagtgaatatgtgccacatttttaaaagactaagtattattttttgagtatttttttttaacaaaagcaatttgcttttcccttgacaaattatcatgaacagtattctacgtcaaatacaagtctccagacacaggctctggtttcctttcagtgctggagaaggtggtgtcacctagttagagttccatccccagcctagcacacctcacatgatgctcaacaattgctactgtctaagagaattatctggatgacttgaagggtctctccatttataaagctcaacaaggctaccagggtgtccttaaccaggtacacacaaaagtgatggagaaagaagtatcagtgacaggagggaggccagaattcagagaaacaaccggcgtagacatccaagccggaagagctcggtcttgctcttgctgtgctgacacatgaaaagggtgttaattacactgtctacctatgactgggggtatagctcaggggtagagcatttgactgcagatcaagaggtctctggttcaaatccaggtgccccctacactgttctactttttaatcaccaaagtgggtcctgggtcataagctccacccaatccaccctgcaaaaaaaatgacacagcctatctaatctctgacccacagcatctctgaagtgcagactcaatagccctcaggtgatttcatgggttttaaagtttgtaaggcacatctgtctcctgcagccctctggataccactccaggacttttgcagagttctccagaatctccccaggcacatccatgtgattcccaagagagggctgggccatgtctctaagtcctgctgtattctccacagcacccagcttccactgtggcacaggagaacctgaaccagccacagtttcatgcccgcctccaacaggtatgagaaatctaatgagcttagatttctaagtgtgctgcaccctggactttggctctgggccctcaggttctggatttcccatctggggctgctgcagactcacaccctggcctacccagaccaaggactggggaaaagcaggattctggga

SEQ ID NO: 5210 - DNA, 1267 bp, Homo sapiens
agtgccccttgctagctgctactcctccatccgggatcatagaaggaacacacatggagcagatctaagcccagctcagacagaaaccaagcacagatggacccacagcttgaagcggatacacgaggtcgagcccagcctgcatcagctgattggcatccatgctgctgacctatgagcatgagaatacatgcttattgtttcaagcagccaattttgggatgatttattatgacacattgttgtgaaaatagccttgatacttagacctgcctctcccccaacccctactcccatcaggtactgagtaagggaacgggaggagacctcagttgaaggagttcaggttgtggctacaaggtagaaagatgccattagacaagtgacaggaggttatttggggagtgaaggagtgaactcatggcctgaagagcagtctctagtcatttgtggtagggctgccaatttccataagctggccaggaattaatacaatttacagtgcactatagaatccttgggtgtggtgacacaggtgaaatatgctaaggaggaatgtccaccaggcaagggggtatagctcacaggtagagcatttgactgcagatcaagaggtccccggttcaaatctgggtgccccctgatgccacttagctgtgggttctctttttctgatgttaggcttgcttgtcatcctcaccactgtccttcctatagcttgtgtcagttttctcagatgacttcatttttctggcacaagtcatggtcaagtcactaataatctgcatgtgtttcagaagttctaatgagctgctcttctttgaagtttatattatggcaggacagcctgaatcagaggtcacccagtctgactttgcatcagaattactgatagatcttataaaaaatacagattactccctagaagttccaatttagtaggactgaggaggaatcagagaacttctacttttgggggtcatttggggcataatcccctgttaatacctgttctaacatccaataattctaagtggctggaaaattgttttggaacttacaacaacttgtcattctaaacaacatcccagtgggaagcatcagtgatgttcaagctagtgcctgccttcagtccatcactgagggcatgtggggtgctgagctgcaggcataggcagtggccaggtgtgtagaggtgggagagtgtgggaaggtgggggatgtctgaatgaagctgtgggcatggtaggagggtgaccaattgcaa

SEQ ID NO: 5211 - DNA, 1207 bp, Homo sapiens
aaataaaaacaaaacaaaaaaattcttagtaattgtgaccatcctggattgaatctgagaatattaatttttttaaactatgtataacagtgcatgtattagatttgaggtcgtggaatttgagttatggttagagtttttttctaaaactttttttcctactaaaatacggtagtgttgtatcattttattttactctattttattttgtttatgtgaagattttacttaactatacaactttttaaaataagaatattttcctaataaaaagaaagcaatttttaaaaaagtataaacccacaggacaaaaagcagatgggcgagcgataactgatttcacacagaagaaagaaaaggcggcgactgcaagagcctgcggaggaatcatcctaccggggggaaacagcccctaggggaaatgagggcagaaggcgtgggtgtgagggatgcagccagcagatcctcgcgggctcagtgggaatgaacaaggatctctgtacactgtaggacacccgagcattgcaacaccatgaaataatgccagctggaaaactttgtggcccatggggatatagctcaggggtagagcatttgactgcagatcaagaggtccccggttcaaatccgggtgcccccccgctggttttctttctgcttcagaatactctatgaactcgactattctgaggccactcaagtcaccatcagaccgcgtattaggtgagtttttcaggtggctaatttcacccaagtggcttgtggactggtaggggaagaggaaggaaaaggagcgaaggaggctccaaggtaatctggctcaggaagtggctgtgggaggctttcatcatgacccagggtggccatttgtgctttgggagctctcgtttactgtttatctttccaagggagaagcataggcaggaagtcgggggagcaggctgaatgactgcaccagactgcactgacggcaccagaaccacctgggcgctgctcctgcacagtgtacctggacctcagcgcgaggctccgatgtgtaggtctgaggagagcactggatattttgttttaaaaacaacgcgtacctccagtcttcctcctgcctcctcccacccagcacacactagatgattctgacagggacatttcggggaaaactatgctggatggttctaaaggacatttcacgcaaactggcctgattatc

SEQ ID NO: 5212 - DNA, 1363 bp, Homo sapiens
ggcgccttctgggaagtgtagtccgcgtctgcgccggccggccgggccgccgaagccgggggctccgggcggaaacggcaccacccaccaagggatgcgaggcgctcggggcgggctcaacgaggccgggggcgggcccgggcgcgcccacccccgcccctccccctcggcccaggcccccggccccgccttctcctgcgcggacctgggccgccgccgacgagggtcgcgtgcgcccgcgccagggcccgcgccggaaaccgaggagtggcggggaggctgagcccggggatggcgcgccaggtaaggcaggcggacgcgcggacccctcggcgcagtgcggccccgaaggcggtagggcgagaaagagctgggacccccccgcaacttcgggatcggctgggtgaggctgggcaggcctgatgctcaggggttcgtgccgggaagttcaggtcctcggacaacctctctccagctctccgccgccggtacccacggcccagtctccacctggggaaacccccttggcgtggcttgtttcgttacaagttatcctggtagagtgggcatgaaggcctcggaggcagtgagtaaatctcatacttctgttcttggtggaatcctggatcccgggggctggggacgtggaaatggggagaaacaaagatagaacaaaccccaagttttgtcttgggaagcctgcaggtaaggcgtttagatctgagaactggagggagagccccaggccgtgacagcctgggcaccgtttgggctaggttgtgtgtgggctgtgacgatgctgggaaactctggtgctgatatcagtgaggtatcaggtatctggtgctgataccagcaactgctccacgttcttctggatgggcacctggagccagttctgcaaccgtggtggctcctgagctttggccagtccgaggcagccatggatggggggcagcgtgtgactaggcagagcaaacactgtgccaggcccttggcgtcattagtgcccccaagcatttggggagaagggagaggctaggcaaattggatgttgttgggcagggacagtcaagtgtccttttcaggtctggctgcacagttaagtagcctagggacaccctggttcagacatgcccatggccccatcctaaggcctcctcataccacagtttcctgttctgtaaagtgaggagtttgggccattgacctttcagatctgatgaggggaatatcctcacactacgtagcttcatggagaaggtggccaggagtgaccttggggagtggtaggtcactgtaaggtggagaggagcagggagggttcccagaagcccagggcaatgtgagcacagcctccagg

SEQ ID NO: 5213 - DNA, 1793 bp, Homo sapiens
gtgggcgaggggtgtgggtggggaagaggggaaagacaaggctttcccacacccagggcaggcctcggtcatattattttggatgcggccaacccagcagatggcagggcctgtgttcccagggtgacgaagggcccagggagccatccacactccggcaggcacatggggttggtatggcacttctgggtttggttttgatttcatttggttagagttcttgttgggattcaggcatctatttatttcatgaaaagaaaaggtggggaggggactgaacatcaactcccttcctgcctggcctgtgttggccgccagggatgaaatgggaaccatgctcccagcacccccctcccccatcctcacagcgcttcaccccaaggcaagaccctaacctgggccctaacctggacggagggagggaaagggtaagctgaggactatctgggcaggggtgagggggctttccagggagggttgggggcagtggagtctccactgcaaggccgggacccttccatgtgatgtgcttttcaggtgcccagctctcggaatgactgtggctccactgtccctgacaaccccttcgtccggaccctcccccacacaactatgtctggtcaccagctccctcctgctggcacccagagacccggacccgcagggcctgcctggttcctggaagtcttcccagtcttcccagccagcccgggccctggggagccctgggcacagcagcggccgaggggatgtcctgctccaatacccgcactgctctggagtttgccctctttcccaaggagatgctgctggggagctggtatgggtggggtctttccctttacagacggggcagatgccaggactcagcccatcctgaggaggacacgtgtcctcatggagagggtgctccggcccaggcgggggagtcagtgcccagtcagcagctctgccaccatcctgctgggaactgggggggcctctattgggttataggcaaggccttttctctggcatggaattgttaattttctgacacgtctagatgtgaaatttctgaaaatgttgaagcagagaaacattcacacacaaaaagcaacatagtcatgtgggtccagatggcctcagtcctagatgttggcaccctttgctgtgtctcctcagagtatcctgttccgcctcctgccacctggacctccctcagtggatgtcttccctcccccgaccccagcctgtcagtccgagcacagtgcaggtttggctctgacttgggcttttggctgcagtgggggtggatttcagagcctctcatggcagcatctaagtgaccagagctgggatgagagaggggaaggggcaatgtgagtggcgctatgggacgggccagccctgctcctgagccagccccgccctctgccccctggccctgggctctgtgctagggatggtgaagaatgggggcgtgccagcctggcaggagtgggaagcaacacgcaggggtcccggacctctccagccttgccctcacgcttacccgagctcccagtgtggttagcacagagctcacccaccttgcctggctcccagctggggcctgtcctcactggtgctccaggggaagaaacgacagcctcacttctgtatggactgctgatgtggcctgccatcctgttcagcgggcattgtctttggagcagcaggagaataggatgcctctcactcacatgccagttcctggctggccagctgctcagggctcaggctggggcctcccattgacatcctccccctac

SEQ ID NO: 5214 - DNA, 1173 bp, Homo sapiens
ctgccctgtgccctggaaaagcagcaatagcatccgccccttagagccctctggctagaggagccaccagtggaaaggaagaccctccatcctctggtattaacgccttaatgcccctgtcttttactgtaagttacttaagatcatttttggaagcaggcgtggtagagtcctgtaaatgaatgctctgggctagatacagcttggagaacctgctggccttgttagacagcacttgggcctttgccagcagcaagaggtgaagcgaagccactcttacctctcccttcccctcccacctgccccctgcgtaggcacccagacttggagagacccgtctgctgttaatacttccatcctcttccttcccaaagagcagatcccaaggcatttactccttggtctgtctcgctttatctgtcgcccctcccagcgctgagagcctcccctggctgtcagcagcactgtgtccaggctcttgtctgaacaccgcagcccctccttcgctccttccagagctcagcatgtcacggcaaggactgccgcattggtgatggagggccagctgaggggaagttgctggtgagtttccttttctccatttctagcatatggacacctggcctctgcttgagcacttaggtgacaggaacttccgcacctcctgaggccctggatgattctaattgttagaaattctaattgttagaaatccttccttataatgaatgaattctgctttcctataatttctacctattgggccttgttctgttctctggaactaaacagaacaaccatttacccctccttttcaaactagagaataaagatttggttttagaactggtggctggggagtgttactttttctgggggagctgcgacatgtcaggaggagcagcatgctctcctccctagaaggacggggggctgtgggtggggctctggccacaggccacatgcccagcttgctgagctctggccccctgcctcagttcttccctgagcatacccaggcagttgggctaattctctgggtggtgggccgaagctccagagaactgtggtgggtggaatgctctcagcttggtcccaagatttatgttcttggtcacttgccctcctagatgggcccagcaacacctaatctttctcaccacctgggccttt

SEQ ID NO: 5215 - DNA, 1099 bp, Homo sapiens
gctctccaccattccacagcctgcattccctaccccgatgccctctgctgaaagtcctgggccatccacaggtggcatggtcaaggcagcagccactgcactttacctctgccaatgaccgtcatctctccaaggcctgccctggctgcagctggtattccagtgacagcctggttgcatttcagagacccttcccttcagggctgtgagaaggcggcagcgttcccatgtgggaaaaaggaggaggagggctgtgtccttcttactgtctctgagcagccccgcccgacaccgacggagtggggcttgcgcagctcacttctgcagtggtccctgtcccgaggggcaggttgtggaggggcagtggtccaagcacctcttgtacaggttagggttcaagggaggcagccgggtaggccacacgctctagtgagggcagttgcggtgcagaccacctggttgtgccgtgcatgcttcccgagtcctggaggagctgccctactgtttcttctccattctgtgatctctgtctttttctctttctttcccttctctgttccacatccacaccttactctgattgggagtcatagctctgttctctctgccccagctgtcccggaatccctttccctgccatgggcatgctagaaacatgctgcagtgccctgggccacctccggctcccgcctcctggcctcctgcactctaaacatacatacctgaatgtgagagtttgtccggggtgaccctctacctccttccagaccacctgcaggtcaggactccagtctgttcactgccaggccctgcagctgattcccacctaccagcctgtgcctctgacttagctccctggttggccagaagcactcctgccggggccccaggacgagggtttgctgccctagtggggcagccctggcaaggtgacagtagatcctgctggcctccaggccaggtgaatgttccccccatatcatctgtaggggctagtggcccctctgctgcccatgagccccggccaggcccccattagcacagggattcccggcacccgcctggtgcccgtcccgcccctgacccggagctgccctca

SEQ ID NO: 5216 - DNA, 1376 bp, Homo sapiens
aagaaggctgagagtgaagcctctgaatagatctaggccctgccagggagctgacaataggagtgacacagcagttcctggcttggaaggctccaaacctgatgatggtacccttgggttagaacatcccaaataacttagaagtagtgagacagtgagttggatatgggtttggggggcggagttttcttcctagacgcccctcaggacagtctgctgggcagaggcagggacagtgactagcccaggattaagtccaggttttgctttctaggttgcacaggaaatttgggtctgtgagaagcagacaatcaccaagtggcctggagacatcctggcttacaaggagcacctcaagtccaagctggtggatgaggagccccagctcaccaagaggacccacaacgtgtgagccctctacctgggttcgggtcaggagctccatctgggaactaacagctgctaacctgaccagccgctcaggacaggaccctggggctacactcctgcattgctgcaatactgctcccccagcctctcccctgcccctcaacctgccttagctgcactctcttacctacagctggacagtacctgtctgtttcctgtcctccttccagttacatctgtccatgtctggactcggctggccgttccctccagccccttgctggttatcttactctgagtgtgatgcagtcagaggcacctgcgggttagcccaggggcccaagccctggatttggcctgcggaggagcttaggatcctcgttttctgggttttggtgatgttggaggagtaccccccagcccaccgccccgattcctttttgcttctggtttggagctccggaccaggaccttcgtcctggtcagtttttaaataattatttagcagtgtaacttttagacctgcgtgacatctacaaagcgcccaataaagaaagaggaagccacggtccctaccttccttctcgggtctctggggccttctcctccctgcagtgccaacatgcactgcccacagcaggagctggatccagcgtcagtgtgtcgatgggaactgaagactagtccataggagctggaagaactttgtccctttacttctgatttgaaattgtaccttttctcaggcctgtgattcacagactttaacatgaatcagaatcacctggagggctcatgcaatcagattgccagatctcgcctcagcgtttctggttcaataggttttgggggagaccaagaacgttaacatttctagcaagtttccaggtgatgctgttgttgctggtctagagactattttgagaaccactgtccaggagcgtggttttctgattgtgatctgaggttctgccccaactgcacag

SEQ ID NO: 5217 - DNA, 1169 bp, Homo sapiens
cagtggtgtgatcatggctcactgcagcctccaactcctgggctcaggcgatcctgctttagcctcctgagtaactgggactacaagcgtaagccacaatgccccctagcttttgtttgttttgtttttattttagtagagatgaggtctcactatatttcctaggctggtctcaaattcctgggctcaagcaatcctcccacttcagcctcccaaagtgttgggaggcatgagccatcgagcctggccaggaaatactctctatattgatatttacaacaatgtttctgataaatatcaggcagcaggaaggtttatttaaaattggaaattaagtacagagtcacattctccaggtaggggtaatatccttataggaaataaagagctccttaagcacacaggccccacaggtgagtttgggtatgaggagggaccagtcctggtctttccccacaggtcctgaacccatggaaaaacaggcacaggcatcagttaacttaagtgcaaggaaattcaagctgaagagaggcttgaacctgaggcccaagtgtagaaggcaggtcctactccctaacctgggtttgcttacctgggcatgggaacagaaggagatgatctgtgtcctaaaacagactcgtctagaagaggaatgctggccacagggtaagcagccttgccttcagcaccttcaccccacccgcctgggaaagggattgtgcggctggtgcaggccctcaccacctcatcagacaaagcctcctcccacagggaggaagggtggggagagggccagggtcattccagtatctcctctcctgggaatacagtacatgtttccttgtgaacacatgaagacaagggagtagggcccctctgcagtggggtggatgggccacattgctaaacagtgatattgaggctcaggtccagacctgaagtgaccaagtccaccccctttcttacctctccattggaacaactgccacatccttttatttgattttatttcctagataagtgtcaattccatctgcttctgatttcccacgtcactgccctggtccacacactgtgatcttctgcccccatctgagtgccgcatactcagccttgtccctgcatcagaccccggcccagcacagtaacgagaatgggcttcctaaaca

SEQ ID NO: 5218 - DNA, 1218 bp, Homo sapiens
gcggccgggcggagggcgtgggaggcgcggggcgggggccgtcggccgccgaggagtccgggtctcgtctggggaagtgaggcggcgccggggagccgcgctagaggctgccgcgagggagtcacacctgcctccccgccttcgccgcgggcgcgcgtgaccggggctggcggtctcccccaccccgcccccgatgtaaggaaaagaaagtccgtgggattttaacaaaggaagcagcgcctcggcttcattccatctgtggtgaagtttacccttgtaaagaaaactagggatttagaggacgtttgggcactgaacgcaagttttctgcataggaaacctaggcgatcccccaaaagaggtccctctggaggccctcgagatgctgctggcggcctgggtaggaagacagagaaaaaggaatgtctgatctctcggtgccctatttttgttcgggaaggaataaggtcaggtacttgcaaccaggctgttgaagtaattccaaagtctttttgttttctttttcttcccccaaaaggttgacatacatttgaaacagttcctagcagtcgccttattgctgaataaggtggcttagggtcgggttggggggcggacggggtgttacagaacgagcggttttctggcctgtgtgaaaccagagcgattgaacttagacacgcttcagggtgaggctgtattgtctcccgacatccggaagcctggagaaattagttcatcttttcgggctgttttgaagtaactgtctatagaaggcgtgcaccgggccacagttgaggggatggggaggtgaaagcgagggttccgaggctcccgtgattgcggaacggggtgactatctgtcatgggaagcttgtacctgcctgccgctcactggatgcactccccaactgcgctttccaccgcctgtgccagggtctgtgctctttgaccaagatcagccactgcatgcttactcatccttttaccacctctccgtcgagagccggggggaaattaagggctgaaagaagcttggctagagatgcggggtgcctagagtcgtaggggaactcttgtgcgatgcggtgctgaatccgaggggatgcataggtggcagctttaacagctgcagccaggaagtaaccatgaatcaaatggaggggttcaaagtcactaattgttcaaatatcaacatggaacctgggatccagcctt

SEQ ID NO: 5219 - DNA, 1173 bp, Homo sapiens
cttatacccttgagagaggggagaataaacagaggagtgaatgtgaacttcagaattcctagcttcatagtctaaatagaaatcctctaagatcataaaatgtccctaagaactcatgccttacattaatttttttggtattttttctattgattctaagcatggaaatgtagatggagattttgttgatgtattttcaaattatgtatcaataatagggaagcttacttgatttctttaaaatctggtcactatatctataaatatagtggacattaaatgtacagcataaggtaattatgtggactttaaaaaggcgttaaaatatgtgccattttctattattctgctcagtaggcttctaaaagcgtgtatgaacatgcccaacccagtattgggcctccgtaggtgctcaataaatgttagttgattgcctcttttctgcttctaggtacataagcaccatattaatttatatagtatatttgattatgttaggttaatgcataaatcacatggattggttgtttcttttacagatcactaaagtggttcttagcaaaggttggaggtgtcttgagtgcactgtgtgtgaggcctgtgggaaggcaactgacccaggaagactcctgctgtgtgatgactgtgacataagttatcacacctactgcctagaccctccattgcagacagttcccaaaggaggctggaagtgcaaatggtactctagggtttgtttgccttgttagtctttcaagttcagagctttctcataccactttggtttttaaaaattagccacacctatttaattgaataatacacatattctatgatagataccagtaatcagaaaaattttcacatacacattaaatcatttcccccattatgttcgtatgtagcttcctgaattacagtaactgagtaactaagaaaataaaattgagacttttcggggggatttggatttcaggtgtgtttggtgcagacactgtggagcaacatctgcaggtctaagatgtgaatggcagaacaattacacacagtgcgctccttgtgcaagcttatcttcctgtccagtctgctatcgaaactatagagaagaagatcttattctgcaatgtagacaatgtgataggtattgtgctattttttcatctttttaaagct

SEQ ID NO: 5220 - DNA, 1205 bp, Homo sapiens
ggcaaatttttgtatttttagtagagacggggcttctccatgttggccaggctggtctttaactcctgacctcaactgatccacttgcctcggcctctcaaagtgctgggattacaggtgtgagccactgcacctggccggtatgactttaatacttgaaagttaatgggctggacgtggtggctcacacctgtaatcccagcacttcgggaggctgaggcgggctgatcacctgagggcgggaggccgagaccagtctggccaacatggtgaaaccccgtctctactaaaaatacaaaaattcgtggtggcgtatgcctgttatcccggctacttgggaggctgaggcagggagaattgcttgaaccccggaggcggaggttgcagtgagccgagatggtgccattgcactccagcctgggtgacagagtgaaaaaaaaaaaaaaaaagttaatgaatagtttctacattattatgatcatgtaatatttttcacagcagaggcaagtagtatgtaattacatttctttgtattgtttcttggtttttgaatctgtaactgcatttttcttgtcatattttcacgattcattttatcaatctttttctgtggtttgtcattattacttattttatgcatatcaagtccctcccaccctcccctgctttcccttagtcctatttccttcagtttgggctagaagtatttagacctgttgccttgtttttgtgctgaacttttccttactctttttgcacagtgctactactgttattagagctttatcatttcttgagttactaacttgttttaatgcagtacacccacataaatagctaagaaagaatatgtgagaaataaagttttgaatccttgcttatctgtaaaagtcctcattagcccttacagttgactggtattattttattcaagtgcaattaagctgaaaattgttttccctcagagttttgaagggattgctccagtgtcttctatgtccattgttgttggtgaggaaaagtcggatactgtgtgattcttcttcctttgtgggtgatgtgtttcatattttcatccatccctttagagccttcttttatcctcattaaactgaaatttctcaaagatgtccagatgtgttttcttctccattacaataagcaaaatactttatgtgcttcacttcttgaaagttttcatgtta

SEQ ID NO: 5221 - DNA, 1132 bp, Homo sapiens
ttctctttccttttttttttcctttctacacatagggtgttcctgaaaagccccatagtgattgagtcttcaaaaccaccgattctgagagcaaggaagattttggaagaaaatctgactgtggattatgacaaagattatcttttttcttaagtaatctatttagatcgggctgactgtacaaatgactcctggaaaaaactcttcacctagtctagaatagggaggtggagaatgatgacttaccctgaagtcttcccttgactgcccgcactggcgcctgtctgtgccctggagcattctgcccaggctacgtgggttcaggcaggtggcagcttcccaagtattcgatttcattcatgtgattaaaacaagttgccatatttcaaagccttgaactaagactcaattaccaacccgcagttttgtgtcagtgcccaaaggaggtaggttgatggtgcttaacaaacatgaagtatggtgtaataggaataatatttatccaaaagatttttaaaaatagggctgtgtttaaaaaaaaaaacaaaacaagaaaagcagcagtgattatagagaggtcacactctaagtggggtcgcggcgtggccacgcttcacggtcacgctcgtccgtcctgcagtggcgtgtttacatggtcacacgtgtgtgtatcaccagtgggtcaactgcttgtcattcctcccgtggcagtttgtgtagacaatcttactgagcaaaaggcaatgaaaagtcttggttcccacactgcgatatattggaattttcacctcagtttatgaagtttatttcgaaatccatagtcatctaagaatgaatacctgtctgccatgtatttcaatcttagtgagccaaaattgtttgtttgttactacagaatagagatgactgttttttgccacagccctatggaatttgcaatctgtgattgccttgtaaaaaggagagtgcatatggcactgcattaaacgtgtggtgtttctagtcaatgatattggtgagcacaatgtattcatttaatggcatagaccataccagacctaatttgcaagtattgggtcttaaacttcaagtgcaatgtatatgaaaaccaatctgagccttgtatctctta

SEQ ID NO: 5222 - DNA, 1104 bp, Homo sapiens
aaataagaacaaaaatccagagtgaaagtgtctcaggttgcgccgagtggcctggaaatttccgagcccgcgcggaggccgaggcggcgagggcggcggacggccggggagcgcgggcggcccagcccggcccggccgggccctggcctcgcgtctctcacccatgcgactcgggccgcggagctctgcggggctcggcgggggcgcggccgcacgccggtggggcgccccggcccgcagcggggcggcggccgcgaggagggggcctccatgtgcgtgcgggcggtggcgggcgcgctgaccgcgggcgcccggcaccctcgagggccggctagggcgtgcgggcggggacggccgggcggcggcggcggccggagccggcccgggcgggcgtgagcgccggggaacgcgctgcctgcatgcgcgcagctctcgccccgggcggcccaggcggcggcgccggagcccgaggcggccggacgcggagaggagcggggagcccgggaggcggcccgcgtccccgccggaccactgcgactgtctagaccccggctgcgcggcgaagtcgaggacttggctctgttgaatctctcatcgtctgggcgagcggggcggctcgtggtgtttctaacccagttcgtggattcaaaggtggctccgcgccgagcgcggccggcgacttgtaggacctcagccctggccgcggccgccgcgcacgccctcggaagactcggcggggtgggggcgcgggggtctccgtgtgcgccgcgggagggccgaaggctgatttggaagggcgtccccggagaaccagtgtgggatttactgtgaacagcatggaggagaatgaccccaagcctggcgaagcagcggcggcggtggagggacagcggcagccggaatccagccccggcggcggctcgggcggcggcggcggtagcagcccgggcgaagcggacaccgggcgccggcgggctctgatgctgcccgcggtcctgcaggcgcccggcaaccaccagcacccgcaccgcatcaccaacttcttcatcgacaacatcctgcggcccgagttcggccggcgaaaggacgcggggacctgctgtg

SEQ ID NO: 5223 - DNA, 1233 bp, Homo sapiens
ctgaggtgcataagcccgtggtttgtgtactggaactaaagcggaactcactgattcatattggatccccaggtataccttctgctggtagcatatggctggaaaaggccgtttgcctcacacattgtaacctgccttggctagaaaatgcttttaatgtctcaactctctcttttctgtgtcatgttttggtaggaaatctttaagattggcggacggaacaggtattttagtgagacacttctgagtacttgctttttcctttgacttctaaccaactaaaagagaaggaggtcttcatgttgatattttgcttggttttattttactgattttaaaaggtatatagaaaaatgtaggcctttaaaaagaaacagcatgtagttttttattttaatatgttccatagagtggataggcagacaggtactattgtaatgtattctgtatttaataatttaatatactctagaaagtagacctcatgcattcttttagcatgattttcttttaaactgcttttcattttaagggcacccgtggcggaagctggttttgcaaggactgtgtaagctgtatgcgttctagctgtatgcgttctgtagtcttttcttaggtgggtaacattttcaataacgcgcgcacagcacacaggggtgccctgagccgaaggagcaaaaaaagccaccgctcgtttctataatccagctttgcttttcacaggcgtgggatccaggatggtgtcctctgtgaggacttgaactctggggctttaattccactgtttaattttcaggtaccacagcagcaaagcacagagtgtgacctttttcatgtctgagctgattctgtttgctccacgtgcctgcttcttgctactgttcatttagtaatgggatcacctcaccatgccatgctctgggctctccctctctgtccatttctgttttgctttcctggctaaacccatctaccattcttaacactggtagctcctgtcccattccaagactcactctctcagaccttcccatctccctggctttccatgctcctctccctccacctcctggcttcaactgggtgagggccgtattcctgccactctgctccgcctcagccttgagaactccacgtgggctgggtgggaaggtgctgacgattttcacactgtgtttaccactccatcacctctcaacctttgcttcgacaggtcttcactcacgatttatt

SEQ ID NO: 5224 - DNA, 1104 bp, Homo sapiens
attttaaagggcattaggcactatggttccagagtttcttggggaaaacttgcagattcttattaattggttctgcaatacttaaataaattattttacaattataagttttcagattataacatttgtattaatttttactgattttccaagatacttcttagatttactatttacgtagctttatgtacattctctgtaaaaatagacctctaaatatgaggctttacatgaaatttgtacacacatacacactaatgttagctccttaaattgctgcactaaggtgctggttagtagagatggacggagcctctcgcgttttgctctcagatgtgttaaaggcgcacgtgtacctgctctcagcggcagtgcggcctccccatctgctgggtgcccatggccctccctgcagcctcagtgatgacctcgtctgccagggacacaggttttcatcatttacaggctcttatgtgctagttttgttggtagcacgttatttaatgcataaaggcagaattcttacaagtttttttttttaatgtgaacatagatgcagcaccgactttttaaacttgaaaaaactggtataatgttaacttttaaaaataacatttggacacactagtaattgatttttgtttacagattgttttgtttacaaattgttagtctttgtttctatgagatacttttagtgtgactttttaaatgtcttagaaattaaaagttgtacaaaaagtgatttcatatttggtttataagcatttatatgtggggtttatttgttcttttgttttttccatcttaaatattatcatggctaaaacttaagggtatttatagtttaattccatttcagttttatagagggcagtaattattctgatgaatgttgaattaagaaatggatattttctttctctgttgtgcagttattggtagatcaatttcttataacccacaatgtagcatcaataattgatagcatgtattttatttaattacttgaattatttagacttgatttctctaattttttccataaaaggactgaacagcacctacttgtggtctggacagcttaacccagagttcctggaa

SEQ ID NO: 5225 - DNA, 1197 bp, Homo sapiens
cctcagcctcctgagtagctggggttacgggtgctcgccaccatgtccgactaatttttgtatttttagtagagacgggggtttcaccgtgttggtcaggctggtctcgaacttatgacctaaagtgatcgcctgcctcggcctcccaaagtgttgggattagaggcgcgagccaccgcgcctcgccgactccagacttgtttccactcctgagggccttaagctcccttggagtttgtgctttcacatttctttctgccttccgtgataaagggatgaatagtttttatgcacgcttcagcgagctgcgggtttttgtggattacgcaggctgtgaaatttgggaagtaagttgccttaagttggtagatgtggagatttgacaggaagtgggagaacaaaggggttgggaagcttttggaaagtgtccaggcttcatctgtgctgtggaaggtgagaaagttgggaattccagagggcagagctcttaaagaatttgagatgagttcagcactctcttcaaaacagtgttttaaaatttattttcttctggatatgaaagtgttaggtttgggaagtaattctggctgtaggacagtttttccggaacactaggtggggagtgttgaatgttgtgaagactaaaatatgcatatggtattacagtgtgatacctgttactgagtggcgtacattagctttcatttttaagcaagcccgtaattcccttctattaactctgttttggacagtggtacccgtcaccctcatcagtcttcaacctagataacctaaatccaggtctgaggtgggggtggaatggtctgtttgcaccttttttttttttttttttttttttttttttgagacggagtcttgctctgtcgcccaggccgtaattaatgcggtggcgcgatctcggctcactgcaagctccacctcccggggtcacaccattctcctgcctcagcctcccgagtagctgggacttcaagcttccgccaccacagccggctaatttttttgtatttttttagtagagacggggtttcaccgtgttagccaggatggtcttgatctcctgacctcgtgatccgcctcctcggcctcccaaagtgctgggattacaggcatgagccaccgcgcccggccttttgtgtgtgtgtgtgtgtgtgtgtgtgtgtgtgtgtgtgtgtg

SEQ ID NO: 5226 - DNA, 1119 bp, Homo sapiens
atctcgtgctgctcctgtagggcggttaggacgcgctcctctggcgaggaaggtggcagcctccactgtgcacgggtcacaggcgagtgtggtgtggtgtggttgtgggtggggtgtggactggatctgcaggcttgtccctctctcgtggagagctgtcggggtccaggcagtgctcagtggtgagagccacagcacatttgaaagtccacatgtgtttgccccactgtggtccaggacatgtgtgagccacactcagtggacttgcacctgtgacatgttggtcagcgtggcggccgtcagctgggtgtggaatgcatctgattggagcctggcacccggcctaccatgattgtgattctctggggcgagtcctgagtgtgggcagggcctcaggcccccaagagggctgtgagcaggcaccttcctgtgaggcacgatgccaccatgtgaagttgtgtgggtctttggagagttctggcaggttgagggcctgtgcgtgtgggacccaggcctgccctgcctgctgccggccatgttccctctgcccagtcatgttgacaattgtggccaaattcaacatcgggcctgtttcctgcacccacgttggcacacactgagttcaagacagtttctgcagaaatgaatccagaggtgtttatttctggcacgttggatcagacgttcagagggtgggcgtctttctccatgcacttcagctggatcagtcagtgtcagccattgactttagcaacagggaaatgaaagactttcctcaataagaaatgggactttctcacgctggatggcacagagctggcaaacatgaggccagtccacaccaaggctttgcctgcagaaaggctgcactgtggccagcgggggaagcggaggagacacctgtggacaccctccccacaggtgggcacacctttgcgcaggcccagtgtgcgttctgaaggagagcccagggtggggttccgggactgaggtgcagccgtgtccagggtgggcttctagctctgccgctgggcggaactggggtaggtcccagggtggggttccaggactgaggtgcagccgtgcccagggtgggcttctagctctgccgctgggcag

SEQ ID NO: 5227 - DNA, 1129 bp, Homo sapiens
tgtgttacctggtgggagaaaggcctgcctgccaaggaagacacaggaaagacagcctttgtcatgttactaaggaggagtctggagactaagacagtatgctcactttttatttttttaaagacagggtctctctctattgcccagatggagtgcagtggcatgatcatagctcactgcagcctcaaactcctgggctcgagcaatcctcctgcctcagcctctcaagtagctgagacttcaggagtgcaccacctagctaggactttatttttaaacgtcttcctaacattctaaacctgcgctattcaacgtagtagccacttgccacagaaagctgtttaaatttaaagttaaaaataatgaaaaattcagttcctcagttgcattagtcacattttagtagctctacagtgaaatgtggctaatgtctactgcactagacagttcagatgtataaaatcttcatcatcgaggaagttcttaaacttgctggatttttaattattttccttatgttttaaaaaaatgttctgtagagctatagggggcatttgcaaattttaaaatctgtttttatttgtcgttattttttaatctttgatgaatcaactagaattaccattatttatgatataaaatatacttgatttgaaatatgactttactgttcattgaaaaaggtatcacattttttgtgtcattcctagggtgcagacgtatgtcggctttggcgtatccatcaagctttatattgctttgattatgatttggaggaaagtggagaaattaaagatatgttacttgagtgcttcataaatattaattatatcaagaaagaagaggtaaataggtatttgttttttgatctgtttgtgagctgcttcttaatagatgtttctcctgtgttcacatggttcctgtctgcaccatgctcggtgttgcttagctaccaggagctatttactgcacatgatttttactgcatggcagtactagagaagacattttacaagtccttgcttatttcatcattaaattggatggtaacaggtggctgtgtgttacctaggggaaccgtaattacattttaaattaagaatgattaaaaataaggttgagaaagcac

SEQ ID NO: 5228 - DNA, 1073 bp, Homo sapiens
gtagcatgccagtaatttttaccaacatcccatacatctgagttctgcagtccagtgtgtaatccgctccatgtgtattttgcttaatggaatgctttatttaagcacttaggcagagtagacacaattaaaggtacaaagcccagaggaagtggtagagcagcaccgtgcctgccctgaggcagtggagtcagtagcgctgtccccagggccttgagtgcctggaggtgcttggcctccagtagctgcctccattctcttttaaaaaaagggggtgattctgaggcactgaagtgcctcccagatgtggaggagtgaagccaccatcgaggccacactcagcactccaggatcccagcgatgtcagacactcttgagttgtcaaaacgttaattttcagttttaaataatcagtttatctaagaaaagggaattttaacttttctaccttgagccaagccaatgaagggaaaattaattaacttagtaaatttgaagtgcagctctgttagctcgtacatgtgggttcttatcctgatcctgtgccttaaagtaggaaggtgtttccaagttcagattaaaatagaagcagctggccgggtgcggtggctcacgcctgtaatcccagcactttgggaggccgaggcgggcggatgacctgaggtcaggagttcaagaccagcctggccaacatggagaaaccccatctttactaaaaatacaaaaattagccgggcgtggtggtggagcgcacgcctgtagtcccagctactcgggaggctgaggcaggagaattgcttgaacccaggaggcggaggttgcagtgagccaagatcgcaccactgcactccagcctgggcaacagagtgagactccgtctcaaaaaataaataaaatagaagcagccttgtaactgtatttaccatgataatatattctgcacggtaagaattccttttacagacattctttatcaagaggtcggcccttctttttcaggcacataagccaaatgcaggcctgtgtgtagctgtgtgttttttctgtggttgccgcatttattccacctccag

SEQ ID NO: 5229 - DNA, 1139 bp, Homo sapiens
gcccccagcccagcctactttaactgcttttttaacaacccacaggtattggttgctctggcatctgaagaacttgccaaaggctggacccagtggtgagtgtccctgctgcagacagagaaccccagtgtgtagctaaaaacgctttccccgcccagtgggtagtgtcccccacagacagtggtggaacccgacacgtatctgataggcttttcctacttggtcctgtatccgtcaccaccttcctgtcactgtctttctcaggtatgacctcacggaagatgggacgaggcctcaggcgatgacatagccgcagcaggcaggaggcgtcctcttcagcgtagctctccacctctacccggaacacaccctctcacagacgtaccaatgttatttttataatttcatggatttagttatacataccttaatagttttataaaattgttgacatttcaggcaaatttggccaatattatcattgaattttctgtgttggatttcctctaggatttcgccagttcctacaacgtgcagtagggcggcggtagctcttgtgtctgtggactctgctcagctgtgtccgtaggagtcggatgtgtctgtgctttattatggccttgtttatatatcactgaggtatactatgccatgtaaatagactattttttataatctttacatgctggtttaaattcagaaggaaatagatcaaggaaatatatatattttcttctaaaacttattaaattcgtgtgacaaataatcattttcatcttggcagcaaaaagttctcagtgacctattttgtggtgtttctttttgaaaagaaaagctgaaatattattaaatgctagtatgtttctgcccattatgaaagatgaaataaagtattcaaaatattaacattttcataaatataaggatgtattattgagaagtaagttgaagggcttataaggaaaaatgttttataactgagtaatatattaagagaattgtcatggttcataaatcacattatgctaatctgaaatttcttacataaaaatgaagtgtcttatgtttattttaattgctgttgtaacttactcatgaaacagtatacagacaccttgtacttttcctcaactgtaaga

SEQ ID NO: 5230 - DNA, 1180 bp, Homo sapiens
ctgttacaaataggctgcaccgtttatattccacatacagtatttaatggttgtgatttctctctgaccttgccaacacttgctgttttgtattttttggattatagcttttctagtgtgagtgaaggagtatgtggttgtggttgcagtttcgatggccatagtgataatgatattgatcatcttttcatgtgcttgttttccatttacatgtctttttggcaaagcgagcgttcaactctttctccatttgtaatttggttgtctttgttgagttatacaagttccttatatattgtggttaacagactgttgttagatatataacgtgtaaatattttcttcctttctgtgggttgccttttgattttttttttttagactgagtcttgctctgttgcccaggctggatttcagtggtgtgacatcggcttaccgcaatgtctgcctcctgggttcaagtgattctcctcctagcctcccgagtagctgggattacaggcatgggtcaccacacccagcaacttttttgtatttttattagagactggatgtctccatgttgatcagactgtcttggactgctattcacaggtgatatgcccgcctgtgcctcccaaaatgcttggattacagggggagccaccacgactggccagttttttttttgttttttttttgaggcagggtcttgcactgttgccgaggctggagtgcagtggtgccatctctgcttactgcacccttcacattctgtgctgaagcagtcctccttcctcattctccctagtagctgtgactacaggtgtgtgtcaccatgcacgactaatttttgtatgtttagtagagacggggttttgctatgtccttctggctggtgttgaactcctggactcaattgatccacgtgccttggcctcccaaagtgctgggattacagacgtgagccaccatgcctactctttttttttttttttttaaagacatggtcttgtgctgttcctcaggctggagtgcagtggtgccatcttggcttactgcaacctcgatattcggggctcaagcggtcctcccacctcagcctcactagtagctgggactagaggtgtgtggcagcatgcctggctgatttttgtatttttagtagagacggggttttgctatgtctctctggatggtc

SEQ ID NO: 5231 - DNA, 1207 bp, Homo sapiens
atcatagacagtgtttgctcttgcagttgttgtctggtgtgaggtggtggtccgactctgttgctcacctgacgctgcagtttcctcagccctctgtcctgggccattccctgtggcagcggctctgtcctgggcctgcgtctgtggctcagcctcccagctgctctggggtacagcatgctcccatcctacggcgtgttcccatccagcagggcacacccgtgggtaaggcgtgctcccgtccggcggggcagacccgtaggtatggcgtgctcccgtccagcagggtagacccgtgggtacggcgtgctcccgtccagcagggcagacccgtaggtatggcgtgctcccgtccggcggggcagacccgtgggtacggcgtgctcccgtccagcagggtagacccgtgggtacggcgtgctcccgtccagcagggtagacccgtgggtacggtgtgctcccgtctggcggggcagacccgtccacctggttcttctccagcccttgctctgttcttcttggcccttggccatgtgtgtttaaaatcaggtcaagttgcagcaaaaaaaatcttgaaaatgtgtttgcatttgtgtcactggtggatgatttggggacaattcacattgtccgtgatgctgcacgcagcgtggttggcacctgcacttcctctcggctgcttttcctctgtcatttttgggccagattgcccttgtcttgagagctgggctgtgcattgaaggtaggtttgctgtgttttatctggcattgttaagtatttttcaggagagtttttcctcttatctgccatctggaagcctctgataaaggaatattttcccaagactctgaatagctgattaagagtctgtgaaagacagcaaaccacatttgcatggaggaggccatccgatggggcaggacctcccaccgctgagcaccttttccgagcagccacaaggcagtgggacattttactgcacataaaacagctgtgataagttgtagcttggaagctggatagtgaggactgactggagctgtcaggcgtgtgcatgtgtgcgggtctgtgcgcctgtgcgggcctgtgcgcgtgtgcgggcctgtgcgcctgtgcgggcctgtgcgcctgtgcgggcctgtgcgcgtgtgcgggcctgtgcgcctgtgcgggtctgtgcgcctgtgcgggtctgtggcctgtgag

SEQ ID NO: 5232 - DNA, 1198 bp, Homo sapiens
acttaatatgagaaaattcaagataaaacaaagattgaagggatactgaaagaaaggttgaatttatcatagctttagggagcagaagccaaagagcaagaggagcaggaaaacagcatgagcgggcaagggtcagccctgctggcccaggtgcgcccacagagctggtggcctcctttcagaatgaagtcccaatgagagcagagccctggggaggaaattcttttgctttgaaatgaatttgttttgtttggtaagtaaggtagcaaatacctttttgtgatgtgaagaatgaattttggcagtttcgcattgacttgtgcatttgtcttctctccatgcaggcgggctggtccgagtctctgttttggaagctcaaccagtggctgatgattcacatgtttcactgccgcatggttctaacctaccacatgtggtgggtgtgtttctggcactgggacggcctggtcagcagcctgtatctgcctcatttgacactgttccttgtcggactggctctgcttacgctaatcattaatccatattggacccataagaagactcagcagcttctcaatccggtggactggaacttcgcacagccagaagccaagagcaggccagaaggcaacgggcagctgctgcggaagaagaggccatagctgctccagccggggctccggggcggcagcagagctggcacaccgattctgggaagccccgcgaatgatggcttttgaattaatgaggcagtgaatgttttgtgtttacttctaagggaaatactaactttctttcgcattagtattaattttgaagtagctacaaagtatttttaagaaattataattttatgactgtctggcaggctctgtcagtttagccgcgccggaccgtgtcaagcatctaggagaggagtccatggtgtccaggcatcggggcgtcacacctgttgaggagtggggtggctttgaatgctggaaatggcttcatagtgaagtgcctcccacagggcgggtgggtcagcgttgactctttccagctgcacactcatatgccgtgtgtcttattcagaagtcacattcttttcagttggagagaattgggctaagatagaaaataacatgatttgttccttattaaagcttcccagcgtatgaaattctaagctgggtggggtggctcacacccgacgtaa

SEQ ID NO: 5233 - DNA, 1271 bp, Homo sapiens
caggacctcccaaggggttaagagcaactcctttagcttacttttcctttcaaaataacggtatttaatttcagatagtaatagttaaagctgaaaatatttacaggctaggcacagtggctcacacctgtaagcccagcactttgggaggctgaggtgggaagatcgctggaacccaggagttcaagaccagcctgggcatgatagtgagaacccatatctaaaaaaagaaaaaaaaaatagctgggcacagtggcatgcacctatatagtctgagctacgtgggaggctgaggccagaggattgctcgagcctgggaggtccaggctgtggtgagctgttattgaggtgctgcactctagcctgggtgatggagcaaaaccctgtttcaaaaaaaaaaaaaattcacaaacattttttgtcttcacctatgcatgggctaagctgcattgagcgtgaaaagagatgcaggacccagaaggcggcagttcatttgccaggctacatttcagcttgatgcttacataactacttgtctgcagcagtactctgaatttatgtgggctttcccgtattcactgaaggccctggctcacagggagatggtaatttgtatgaactgtgttaagttattgcatctaatattcattattgctaaaaatcattattgctacaaatcattgttttgtcattaggagtagtttcttacgttacaatgacattcagtaatgtaactgtgcgaactttatggtaatacactttaagccacatattttccccatttctccaagtggtttatgtaggaacgtttataagcagcaaattgtattcagttatattcttgacatggttcatgttatttaaaatcatgctccctgtggcacttgaacctccgaatacacatggggcacggagcaagcccagaggcccaggaagaggggatgatgcttcgcactgaatgtcacccacatgcctcatcgttcccgtgcacttggcagggacattcagggaggcgggtgtctcgctggttgctcagagctgggcagcagcgtaggtttagaatcaaaagacagcacagaccaccggggctgaggactctgtttttcttgtgggctgagttgttataagtattggccgggtgcagtggctcacgcctgtaatcccagctctttgggaggccgaggtgggtggatcacgtgaggtcaggagttccggaccagcctaaccaacatgacaaaaccccgtctctactaaaaatacaaaaagaaaca

SEQ ID NO: 5234 - DNA, 1235 bp, Homo sapiens
gcctccctcgggaccccagccctgcgtgcccagcctgaggacacagtcctctcctcagctctcaggccctgcagcgcccctgtgtaggctggagtcctctggcccctgtccctgatggaatctcaactgaaataagaggcgatgccatgggagaagggatctcccatccactgaagtcgcatccctgaattcctgcccgccgggttcactgggctctgggcgcggcgtagtgccgcaggatggggtttggtgccacggggcatgtgtgtggagtcagcagtctccaccatgggggctgtcgtcttttcccttattctcagattgtgggacaactcgtagggccaagatgtcagtctggttatttcctgtgggtttttatgagtttcatcactttactttagataactgtgcaggatcgtgagtttctttaatttcaagagctgtgaggctgctggttcctggggcacgcagtgtctctaagcttcatcccagccctcaccctctgtcaccccctccaatccctgatgggcaaggcgggggcagtcctcctgggactgatcccagagagcctgaactccaggcagcccctgaggccatgttggggggtcgctgtgttagcagctcctgctggctgtggggtgacgagggcccaggcccaggcacccgtgggacccctcagagcaggccgctgggatgcactttcggagctgcggggctgcagctgagcctggaagctccagaaggaccaagttgcttggagaagcagaaggtgcctttccaggacagcagagctaagaggaggcacagactcagaaccagggtcaggctgcaggcaggcagtggggccccatgccatagcttggagacatcgaggaaggttccagcaggttctgatgggcctggggggatggatcctgtgcctcccctcgccagcctgcccatgtctcctttaggacacaagctcagtggcccctcggcaggcgcaccatgcctgtgtctttggaatggccattttctgggctcacaaaggagccaggatgattggaaaatggcaggcagttgggttgctggtgtttggttgctggagacgcctgtgatttggagcaaagcctgctactgtgttgcagccactgaatggcgctccagctggacgccacgtggacccaacaggccccactcagactcactccacggggctagcagacttgacctctcgatttcacagggtcagctgg

SEQ ID NO: 5235 - DNA, 1156 bp, Homo sapiens
caatcgatgaacctacattgacacaacattgtcacacgaagtccagtagttcacactaggtagggttcactcttagtgttctatgagtttggacaaatgtgtaattagatgtatccaccgttatagtatcatacggaagagttttactgccctaaaattcctctgagctctgcctgttcatcacctccaccccctaacagcagacattttttctttttagcatagaaactaaataattttttagtttaagaaatttttttaacttaatctaaatttaaaactttgggtcttcaaaagatctgttaagatgaagagacaatctatagtctaggagaaaatatttgaaaaatatatatctgattaaaaaaaaaaaacctcttatagctgagacaacccagttaaacatgagtaacatattttgaatagagattttccaaaatatgatacatgaatagcaggtaagtataagatgtcaacatcattaatcattagagaaatgtaaattaaaccactaggagatactagtgcatgttccctagagtggctaagatgaaaaagactgaccataccaaatgttgacgaggagctgtgacaactggagctttcctacgctgctcttgggagtggaaaatgatacagcatttggggaaacagtttgctagtttcatataaagttaaacacatgtttactagctaactcagcaatttcattctgagttaattcacccaagggaaatgaaaatacattttaaaaagatacacaaatgttcataacagctttttccacaattgccacatactggaaacaacttgtctggtgcacagataaacacattgtggtatgcgacatagcaaggaaaagagatgaactactgataaagcgacatggatgactctcaaaagcattatgctgagtgaaagaagccagtcgagtacatattgtatgactccatttatatgaagttctagaaaaggcaaaactgatacactgtcagaaagcaggtctggggccggtggtatggggaagggatttactgcagaggggtacaagagaacctttttgtggtgacgggaatattctacctcatgactgtagtggaggttacgagactatatctgtcaaaatgcatcaagttctacgtttaaaattggtgaa

SEQ ID NO: 5236 - DNA, 1216 bp, Homo sapiens
tgttgacgtaagtttccatttgctgttttgaaatttgttacattggtttccttgagcttcctgtcaaactagcttcaaaatatttttactggggctagtctggagtcagtttttagtctttcttcacttacatatttgaacagttgactgtttttgaggggagaagggctctaatagcaggacattgcctttatcctgattaaatgttcttgtcaatcatgtgatgctcttcagcagttgccagggagtcatcattctgaaaaccagatttactttttctgttttttattcgtatttccacttcttttaagttagcaggaagaaatgctgaattcaccaatgcctttggtcccttgtccaggacttcagagtcactagaaatggtctgtatttcttatggtaaagttgtgcatctctacaagattccataaaagggattagtagtgtgtttgacctgttgtcttaagcatactctcagtcatctcttggcatatacatgtgaatgaggtagcctcataataaccttgtgctgccttttcaggagtcactgttaacctctactggtctctttctctggatactggagcatggtgcaaggattcttcaactctcatgaattcactctcgtgaattcccattattattgcatgcacctttacaagccctagagtaactactaagaaaggcctcatgttgccttatgagtctctaagcctcctcagagtctacgcacctcaagaatatttttattggatccttttcccctccctaacctcattcctacctctctttttactactcttctctcttcttcctcccctcctctttttttctctctgtcctccaaataaatgtgcaaagtcatgctctgaaactgaagttccttgtacctaggagaatcctcatcttactcagcgcaaatttgctcctactgtagtaacagcttttgctgctgactgattacaaccgttttactgttgtaagcttccagctcatgatggttttagatgtgcactgtccagcacaaagccactcgtcacagctggctgctgaacacgctgccacacgttgaaatggtaatattgtggatatagtagggtaaataaaacgtgctattaaaactcatgtcttttttaaacattgctactggaagtttacaattacataggaagcttatatttctactggacagcacttttcaaacattctaaactaa

SEQ ID NO: 5237 - DNA, 1163 bp, Homo sapiens
aagaaaggaagtagttaaaatggtcagtgttatgttatgtatattacaacaattgaaaaattaaatttaaatctaagaatgctagtggacatattgtagtgctgtatatttcatatatcttccattcactcctaaaaaatggctgtgttgtactctccttggagttggaggatctggactgagacctgattttgctactgaatagcagtaggcaagccacatgcatgctctaaacctcagtttcttcatctgttaaatggtgtcaaatacctatttcataggttggttgtgataaccaaatgagttgatggataatgtaaatgctttaaaactgtaaaataacacactaatgtagtcatagtattatttcctgagagcttagcactgggcagcaaccacatgtccagagctttctgggaagattttccattatctgccctgtcgttctcataagcacccacatgcttttcagtacaagaatctagacttgggtctacagccacaccaccttgaacatgcctatcttgtctagtcttagaagctaagcagagtcggacatggttagtacttggatgggagaccgccctggaatacctggtggtattaaaaaattaattaattcaataaagtaatagtaataaaaagagaatttggatttgggaagtctggcccatctagcaggttcttgccatggaggcacccacaatagtggggagaaagaggataaagcacaagggcctgttgagttatgcagtaagtggtgtcctattcccctacccataactggggacccagcccactcccagctgtcctgtccccttcactgtttgagtgaccaggaaagaaagagcctccactactctttgggtggggccccgtgcccgcccatcccaccataggtgagtagaatcaccaggcaaccgccaagaagggattagattgaagaaatccagtctccagggttatagtcctagagccatgcttcattctctgccaaaccaggttcagtccaggagcccacacagcccaccagctgtgtaggaatgccagcagaggcctgatgatggcaatgacggtgacaatggcattacttattgagtgtttactgtgtaccaggcactgtggaaagcaccacatatgcatgctgtcgcctaatctcacga

SEQ ID NO: 5238 - DNA, 1205 bp, Homo sapiens
cccaaagtgctgggattacaagagtgaaccaccacacctggccagtattgtgtcttttgatgcctgttttaaagagttactttcgctgtgctttatcttgtttctacttctaactctttaggaaggagatgagaatgtagaaaaggaattcccataagagtggagtaggaggcagtggggcgtgatggctcacacctgtaatcccaccactttgggaggctgaggcctgtgtatcacttgaggtgaggagttcgagaccagcttggccaacatggcaaaaccccgtctctactagaaatacaaatattagctgagtgtagtggcaggtgcctgtaatcccagctacttgggaggctgaggcaggagaattgcttgaacccaggaggtggaggttgcagtgagctgagatcgagctacactgcacttcagcctgggaaacagagcaagactccatctcaaaaaaaaaaaaaaaaaaaaaagaaaagaaaagaaaagaaaagaaaaaaaaagagtggagcaggcagtgattgattgatacccaggccactgctgtgctggtggctcatgttgcagagttgggaaaatattatttaccccatgcaaaggattggctctgagggcagcaccaagggcagtgctccttgtgggggtgacccatctccccacttctctcctcctctccccttcactcctcctgctcacgactctttcaggtgctcagcacagtggtcagaggcagggctctcccatcatctgcttgggtcttgacagaggaggtggttcatgaagggtcgtgactgaattacatgcctaccctggtgagcaaatgagcagacaccaggcagagagataggcaagtcaagggcagcagaagagcatggcccaggcgtggagacctgggttctcgcagacaccgtcctggaaatgtactgtggacttggccaagcctcttctgctctgtgactcagtgtccccctctgaagaatgagggcttgggccaggcgcccaccagatcatgtgctttggagaattccacagttccttctgccgacaatgaaagtaacatgctgtaggcaaggagccgggcttttccccgaagtaggggacctgacttgtccacagactccttccttttctcttccttcatgtgagccctccatggggccctatgcggtttccccacccccagctagagtgctccatgc

SEQ ID NO: 5239 - DNA, 1157 bp, Homo sapiens
caaaggagggcctgatgtgaagctgacgccgtatttttgtagatctgtcaacctgtgattctagctggttacaaacagagcaatgatcatgttttgataccttacttctgatgactgaaagcgataagctttttataaatgtgcgtttaggtttcaattcctcgtacccacaccctctcccttgtatgcttgtatttaaagccaactatattcatatatttgctttgcagtacaacttgaaactcactgtctcctcactataacattagatgtcaaatgaattactttttgccatttttcttacaagatttttgatctcaaaaatgtgtaaatttatttttaactcttcttttttacttgtatctttttagtctaaattgaaaagcaacttttgtctttagagcatttatttctggcatctccattggaagatttttttttttttcacacatcatacaaagcattacaggtgaaaagaaatgtaagtaataaaaaaagtcttccaagaaaaaaaatgtgcgtgtgtgtgtgtgtgtgtgcgtgcgtgtgtgtgtatgaatgaagggacagagccagtatgaagaaagtaaaagttgaagattaggccattgccaggtatgacatagaactttaagtaacaaagttgaccagacgcggtggctcgtacgtgtcatcccagcactttgggagatcgaggtgggtggatcacttgaggccaggagttcaaaaccagcctggccaacatagtgaaaccccgtctctactaaaaatacaaaaattagcctggcgtggtggtgggcgcctgtaatcccagctactcgggaggctgagcaggagaattggttgagcctgggaggcggaggttgcagtgagcgatccgagattgcaccaccacactccagcctgggtgacagagcaagattccgtctgggggaaaaaaaaagaaaaagaaaaagaaagaaagtaagttatttaggtttggttaagaggaaactagtacagactgtagaatagtgttgtttagacagtagctctgtaagtaccacctgtgactgtgatgcattcactttgatcttgaggataacttgtctcaaagacaactgattacttgattttatgagatcaggcttttcaaagtatgggcctggcatacctgg

SEQ ID NO: 5240 - DNA, 1374 bp, Homo sapiens
attggaggtgacatcactgttagtggtaatggcttaaattgaaacacttcggcttcttacaaagttctttttctggctcccaagtgtcagcctgacagaccgtcttaaaacctggaggttcagtgccttactgggttaaccagtaggccttttgtaagaatgtttaaaaatttttagaaagtcagaagttggactgttttaaataatcaaaacaactagtgaagtttctcctttgtaatttatggagaaggaaatatgttttgtaatttttacctgccaaattattaaaattttcactttgcaatttagctgcttttaaatgaaatttgaaacaaaactacctggtacttgattataattaaaaaagagagttttttgtttgtttttttgttttgttttgtttttccttccacaattgatcacgattactctactctaggttgtgaccttggtgaatctgatatcaccatttggaaaattaaggccctaaagctggagtgagtttgggaggctggagtgtagctcttcagggccaagggggagaaggcggcttttcctgggtttactctgtggtgagcagatcagtccttgtttcatttaaacagcccacgggcagcaaccacttctcctcaactttcccagctttctctacctttaactcttggattatagtttctttgctaattcttttgaaaacatttggcttccttttacaattaggtgggtccctgtgtaagcaaataaaaagctttctatcttggtcatatcactttatttctctgggtcagtttttttacatataaaatatgatgaagttggattgctttctagatgtagaactctgtgaagtgggacgagatgagaaaaggtcctctggtgggccttcctcttttctttttctttctcattttgctcagttccttgtattcactacaacctgggtaagtaagtaaaatttatctttagaaaggcaagctaacccttctttcatttccgtctttttcagtgaagccaaccagaattttgagttgcaggtacctgatgatatacttcagtaaatattttataattttacaaatatattaaatattaaaataccaataataagaaagtttctgtgatagcttccaaagtgattgactgactaatcagtaagatttactaaggacttaaaatgctcccaacatagtaaagaactataggagccactgaaagtgtttacagtatatgagaaagatgaaaacatctgaaagaaagaactgccaggcactaaatcatgctctgctgagtgagtgtgccccagcatggggatgatgtgtgcattgtggtcattgttagcacctactgagtttagttgtagttcagttgtagttt

SEQ ID NO: 5241 - DNA, 1200 bp, Homo sapiens
gcttcacacatttaagggatcttacatgtctgagcaatattctataattataaaaataagtgatttatattgtgaaattggaaagtttatgacattgcaaattatcatcttgttttcctgaatatatcataaaatggtatttggatctatttgataattttgtgggatatttctgaagaatcaatgagcatgtacatacaagtagtgacttctcaaatattgtattcaattgcatccttttcagtacctcaagattcctgtatattttagagtataataaaatacagatgtgagttgtggcaacaaaagaaaaaagaatgtataatacataaattacatcttatccacaaatgtaattttaatccattgtatatacctttcttgcttctgttttccattcctggattcaataggtattttcctacgttggaatagatcctctaagtatttggatgaagcatatgaagaaatggttaacatcattgaatataataaagaattacaagcaaaagtcaatatccttcgaaggcagttggcagaactggaaacagaggacgggatgcaggagagtccctgaaaggtctcctcgcacccttcgcaaggaccttcttgggcctgtgtccgccgttctctccttgtgcccttcagttcacttttacacggtagccttgaagtgaaggctttagatgtgggacccccctaatgtaatggatttctcaatactgtatgaataatgaaacttactatcataaaccatgtttcatgtggcctgttagggcctgtcactttgggagccggaaggaggtgctagtcattttatttttacgtgaaatagatgacctatttaatgccatttgtgtttcatgccattttatccaaagctttttctctgtgtccactctccaaacagcattctagagcagtcaaggagacagctaatctctctagggactatttggtggtttaaaaaaagggtcagacttttaaacactctgaccatagaaatgtttttcaaaatggcaacaatggataaaccaaggattttgtgtttaacaatccatttccagtgtcttcgccacataaaatagccattttctttaaaatagttttggactaacgaagctgaaatctattctcattcttgtttgtcaagaaaggaaaatctgttattcaaggtaaattatttctacaagggcaaca

SEQ ID NO: 5242 - DNA, 1211 bp, Homo sapiens
aaggaaatgtaaccaaatgatcccactgtgctttaaaagaacgcatatgatcttatgagaaacaaacacgtttttctcacatgtgctgaataaaatgtacattttgtttaatagggagaaatctggatgatatgccctatttttaacaactctacattaaaagaatcattgagcctagtaatcctctgacaacatgctttaaagaatgctggattcataacaaaaagggtagttatgtaaaataattgtggatgggagacaaatgaacagagcatgtttattggtccaactcaattcagaaaaaaaaaatctagacttaactgcaagacatggtgtgtgtgtgtcttttaaatacactttaaattatgcataattggacctgtgtttgccattggtcaattgaggtgagatctcaaaacattagtgactgtggctggacctgtttgtttctgaaataacatgacctcatgatgaaattgatattgatgaaattccttaaaaaaggctgaagaccttccctaagactcttaactgggccagtgcccctctgcccacctccaacattcaagacagacacactctctctctctgtctctgtctctctctctctctgtgtctctctctctctctctctgtctctctctctctttccccctctctctccccactacacacacacacacacacacacacacacacacacacttgcccaaagaatcaaagcaaggaaagtactaggaagcaaagtcagagtcaggacaccttttagaaaaaagatttcccagtccatacacataggctgattaaaacctcagcattttaattcatgcaatatactccaacataatttgagtctggatatattttttaaagtaatttctattcatttaccacgttgaaataaaatctcagtaatgtatgcaatttgtacaaccacgtatgtttaagggaaactatattcctttactttttaaccagtagatactctttcgtgtttcacaaatttaagttattccaaaattgcaccatatcaaacacaaaacatgtttactagaaaggcactttgattattaagagatgtttgagtaaccacccccccaccaccaccaaaaaaaaaagaaggaaagaagacaagaatatatgttcaattaaaattattaaaacatgtaggaatatatagattttcactaataatattgtggggacaatca

SEQ ID NO: 5243 - DNA, 1176 bp, Homo sapiens
cccaaataaatgacagaatctacatgcttttgagttaggttaaactaaaggaggcaattgaggaaatgtaagttatatgtggaagcttaaagaagaagaattattctaagaaagtctgtgcagaatcctctcagttctgactctccatcaaagaatgattcatttgtcttgtagagggagggcatctttcacatgggagtttatctcctgttttcagggagaaaagggggagactcaaatgcccttcttacatctactgtttctcaagtgtctttaggtcaaggtgattcttgtaacaatgtaatataggttggggccacttattctgccatcctgcaaatttactccccacttaaaagactggtctctgcaaagtagctagaaatttgcctccccaaagatttccagcagggcccaggtcattgacttaaattttttaaacccccaattaatatcaattgatttaaataagatcgtagcagttgaaatctccctcgtgaacagacttgtaacaaaaatatgaatgtattcaatttatttatttttgtttaatttgagcttatttactgactcattaaacaaattagggtgctcaaagctgtcatactcacttgtaaaagaataagaaggtcatagataactctgcttcacattagcctgctgtttttttttctccttctgaatagtttctctattgtgctacttaaagagaaatgagacatgtatacaaaccactgctcttttagaaagcacctttatcagctcaggtaccaaatttagctctggcttcagttctgggtacccagaggactggagcctggcatctccttccctctcccttggtcccctccagcttttagaatgatgtgtcaaaaatgttgattttcaaagtgttgaatatcatgacagcatttttatcatgtgtctgaacctcatatagtgttgataaattgaggataaaatttacctctatcttcagttaaatttttcatgcagtacttttcatcatgccagaaggtctaatttaattaagactttttttcaagaaattatattacttgcctaacatcttcctttcaagaatctcaaagtgacttatagacatctggtgacagatagattacttggaaacttttgtttggttctgttccaaggtaattttccacagagaaacta

SEQ ID NO: 5244 - DNA, 1215 bp, Homo sapiens
tatcaaagaagcttgggacaccaggtgtgctaaacagtgtgacctgctgtgtagagaaatggcaggcaggcctctggctgctataacagctcttcacagtgctccatcatctcctgtgctattgtgtgggtttacgagattgacttaggcaagctaaatagagtttgggttgctctgttaggcaactttagattcaactagccaaaaggcaatcagggtattttaggtaatgggaggtttattggagagagatatggagaagcaaggaagacaattaaaaaaaaacctaattgccacatagctaggtgtctcagatgttggaaaaagttcagaaagtaggtcattcaacaacagaaatccattgcttcagaggtaactcaaatggctaatctcttgctccaatccttccactattattactgagtaatgtctttatactgttctcttcagctgattagagccttctatgtccctttggctcccacctatatatactaccggttctcactctctcaacatgattttgtgaattttctaggaggaagtgattggctaagtttttcatcccccagtataggggcgtctgatttaagtagaactttgaagccagtctaccctttggactccttggaggtgttcaaagagctcactgaatgtaaattaattgtctgtttcttaggcacatccaaaagaagccaaatacaatgacaagtacctataaaagttaacaccaccaaatatgtgaccagagtagtatttaattcagttcatgtatttgggaaaaaggtgtgcaggatagatctttgatcctaagagatcgttctcaaaactctgtggcttcttattcctacaccatgcacagctgagtcagaatctccaagtgtgggttttaagaatcaggtgaatagttacccaggtaaatctgatataaccattttatgagcctgtcttagggaactaagtgataaaggatttcacaattgcctctcagttttaaatttgagttgttaaatgctttatagacatgccgtggtgcttactgtgaaatcttctgtttggagaaaatacatacatccatgaaccggggaataacaatataaagtgtcacaagctaagtggctggcagatctgttgtatggaaataatttacaggtgagaaagatcactgtgggtctgagaaaggaagactccagaagaaggcttgaattaggctaa

SEQ ID NO: 5245 - DNA, 1182 bp, Homo sapiens
ttgttttatttttgttagcagataagctacttcttttcaccttatttctaacagttaagacaagttccattcaagtcctgatggtttattccagtagtgattctgagtgtgaggatggtagagtgaagaaatggccacaccccttttgtctgcccctctctgactgtctgtccctcttggccattaagaaacattgctttaattatctccatcaaaatacatggcccatttgttattttataattttatatttctaaacacaaagtgtttaatctacacaaaagaatgattgtatgttctgaatttgacctctttccaaaaatgagaaccatgtgttgaaaaatctgaaagttcagatgttgaacattatagtctgtcatttttaaatttatttcttaatctcatgtctgccccccaatatattgatatttttgttttccctttatttaaaaatattccatcctcgtgtgttttactcctactaacagtagcctgtcactcagacactgctgttatggcagcaggtcgcagcataaactggtgcagaaccacagcagtgactagtttttttggcaacaagctctccacatcacgacaaaccctttctggtgcagtcctcctaactgattcaaacagccttctacagaaaacatgatgggtgggatagggtcacaaagcaggatccaagattggaatggtcataaatgatcaatgtaaggaaaggaaagtaaacaatgtgaggagaaaagacagtaaggattctcccattgcaagtaaaagatgagttgtaattgaagtaacatataccaaaagctgagtgtttgggtaataaatcatttgatctaatcagtagctggcttatatgaaactagatccctgtggggctttccctggccttccaacacggccttgttagtgtcccttcctctcacccttgtattaagtaagaatttgttaggcctcaactcggccttctgctcttctctctgttctctttcttaattatgttaatttgctgaggagaacccattaactaaatgcagctcctcttgtccaaatgtgtattctctaagatacattgtacttatttcaaagactttccctattcaactgaagtaacagcagtggcaataattgcagtttatacacatgacattccagaagaggccaccctgaccacca

SEQ ID NO: 5246 - DNA, 1123 bp, Homo sapiens
ctcaaagacaaaatcacatccttttcctaaccactgcctttctctcccttctccctgctccacactaaacacagaagtgatcactcatctccagattctcatagcactttattggtagtttttgtgtggcccctgtaatgattatttgggcaggggtctcatttcccatctgaaccgtaagtttcttgaaaacctattcatcttactaacttctaaagtatctgtcactgatagtaggtgctcattaaacattcatcgaatgtgaatgcattattaacctaagatacagctgttgcttggctcttttcatttaaaccacaaaaatgttcattacctaaaagacagcaggattaatggaaggccatgttgcataagatcatgattcacatttagaaaacaacttcttttacaacctttctagtaattaacacatattataaaaataataacagtctattctttttctatgtaacatttatctagatgaatttaaacgtgccgtctatgtagctactggactcaaattttcaccacatttagtgaacactgtcttcaagatttttgatgttgacaaagatgatcaattaagttataaagaatttattggaattatgaaagacagactccatagaggattccgggtaaacctacacattttaaacctattgatatcctttttaaagtctgagggaaatcaatccatctaagttgagaaataatttatcttaatttcttaaggatataaacatgaatgctttatttgaaaagaaaaaacataggccttacttcccttaaaaaacaatttgaggtgataaaagagaatgctttttaaaaaatgtgaaatcagtttgaccttataataatttattttcatagtcagtctaatgtcttcatcctagtttgtggaagaaaaatgttgccaaatattttcaaaaaatttagtctgcatattagcttttcggacttgttactatacaaataaatatcactatttgtcactttattttattttaatttaattttatttattcttttagagacagggtctcactctgccacccaagctagagtgcagtggcatgatcacagctcactgcagccttgaactcctgggctcaagtga

SEQ ID NO: 5247 - DNA, 1176 bp, Homo sapiens
tgctgcctggcagccggtcaccacagaacactggaaccaccactgctcccccagcctggtaacagcgggtccagtgttccagcctgggcagtgtccagctggcagggctgaggtggttgcgcccacatctcaggctgcatggtccagcgagctcaggtgtttgatcttttttcgttaccatggtgagaagtgtgctagcggggaaaaaagacaaatgtatcccatagatgagtatatatgggggcgaggggttctccatgaaatggtcctcattgatttttttgtttcatttgtttttatgttttatcttgatggagaatttgtgattttccttctcagaaaaatagagctatacttacatttcataatttatactgctgatttatgccactgcgttttgacagttgtatcatatcacccagccttctcttctccaggaagtggtgtattcatgggtcccctgagattccagcactgcttatgatgagtgtagaaattctgtcttgtctgtcttgcagaatgacagattagaatatggcatagattcttaatgctgtctgttgggaaaacaatattctaaagatgattagaaagacagttttaatattatgtggaattctgttattacatattaccatttagaaatactacagagaatttataatgaaagcataaaataattgaatgaggtttttaatagtccattagaaaattgttgaaaattttttcctaattcctttaagggaattttattataattgtcttgattgttgtttcaatcaaatggcagtagtgaaaagggcgaaattatcaaggcagggggtaggaggaggaggcgctgggtaggatgctctgatttcttaagaagaataggatagctgtaaagaaaccagacatgattgcttgagaattttcctttcaaaatgataatatcacactttatatcatttatgtagcatttttcctaatttgactttttatctggccatgacttttaaattcagttataaatattaattgcctgaagtgttataaaatccatttttatttgagagatactcacaagcaaaattatatgctgcatttctcgtcttagcacttcactctgaagtgcatacttaatggtagttcattttaggtatgttattgattggattacatttttaaaatgcaaat

SEQ ID NO: 5248 - DNA, 1176 bp, Homo sapiens
cagtaaagtggttaggctgatgttgtcacactgtccggggccacatttgtggtaactgagtgacttaggacaagtcactttgtatctcttctgtcccaatttcatcctcggtaaaaatggcgatgctaattgtctgccccaagggtgggtgtgaggattacatgaggtaatgcattgtaaagcatctagcaccaagtgttaactgctattaaataataggtattaggatgtatgcagcttgacagctgtgtagtaattaaccacactggctgttttgtgagggcatcatctatgctacagaaaggaataatcattagactaaatattcctagaaatcccaaacgacaggctcttcaaactcaagtggaaatgagacctcatcagagtattctcctgatccagtagagtgtggtgtgtggagtcaaagcctaggtttttgtccatccactcctagttggatgttacctaacttctttgagtatggttttttcgctggtgatatgaaatcagtatgtattttgctgcgttattgtggagcttgaataaaatagtaatgcatataaagcagtggtgtagtgcctggcccatcacagcaactcaagaaaagagagctgccactatcgccgtcatcaaagcacccacttcttccctccaaaataatgggggtggggcgatgggagttggtgtcactctcccattgggtaatttttcttcaccttctcaatgaaagttgagacaaggtacccaaactactaagaactgcaaagaaaaaggacagttcataaactcaggagcactgaaacccaggtagagtctgtgctttccaccttccgcatctaacagcctccagctgtcccagcatccactgactttcccgttgttccctcagtctcactgtggcagtgtccaaagcagcctgtgtgtttccactgtctgagccacactcccttcatggaagcactggttctttgcttctgcagaaactcttaaaagtgtccctttggtccagtgattttttgatactctacgttgatgtctttactgtctcgtgttttcttgttaccttcaggtataaagtccataattgtagggattcttttctgtttcctatggaaaaataatataatatgctttctgttttcttgggtactcgataaatatttttgggtattttaa

SEQ ID NO: 5249 - DNA, 1164 bp, Homo sapiens
ttctttgggaccaaagatctgggaagggaagaagattctctacagaatgtaaatttgcccctacaagagacagctttgcagggccatttcaaaatgtgttaaagaaaaatattttggggtaaaatacttcaatttccttcagggcttgctgtctgtcatgtgatgctaaactagagtcaggttggaatttagtgtctttttgctataaagagtctgttttgtctgacttaaggtttctgttttaatgttaattctggtcagttgtgcctgaattctaaagggaggagagtataatgaggcatgtctgacctctttgccatcatggcctgaacttgttttttaggtttctttggaattgccttggcctagaggaggggcccattcagtcagttggggggcttagaattttagttttggtttacagtcttaactgttattttcacagggctctgcttcaaaaacaacgaccacctcaggtaggaatatatccaagcctgactcctgcggtttgaggcaaatagctgctccaaaagccaaagtggggccccctgtttcctgtttgaggcggaacagtgacaatagaaatcccagtgctgatcgagccgtatctcctcagaggatcaggcgtgtgtccagttctggtaagaataaaatagttcaatagtttatgagttaattgaatgtaaaattggacagtcatgattataggtctaatgccttctgtcactaaagcagttagccttttgtggatcagcatcctgagcacaggaggtagaaaaagaagatgacaacatatatcccttatctttgagcaaggcaaaggctagttgaggagagaggtataggtgtataaaccatcttataagctattcagaaggatgtgtacataaatatacaattgggtggctgatgtaaatttgaatcatttcattaagttttttcaaatggttaagtgcttaacaatgctgaagtgttgtacggtaggtccctagtgtgccctcaatacatgtgaagagattaattttttttttaattttactgaaagatgtatgatagatttaggagggatatgagggtgactaaaaagttaaatttttctaatgtgaacttttatttatgttggcttgtatcttacaatttgtaattttaaagtcatgttaggcc

SEQ ID NO: 5250 - DNA, 1181 bp, Homo sapiens
acttggttggtcatagggaaagggggataccagtattaactgagtgtctgttatatgccaggcaccatgctaagccttttatagtgttatgccatttaattgggaaactcgtttggtctctgagcctggattaagtgatctgtgaagtcccttgtacttcaagcattctggatgggatttccagttgtcatccttgtattctctccccaatatagcaccgtgttctcaattcatatgtacatgtttgtaaaattccttaaaatatttatgctcaaaccaacatttccattttatctatcttaaatatatcttcctcttctttacgcctaatttcttaaactcccagagtttttttctgtaagatctagtcatctgtagcacttctcacaaattgagctctcttatgccccaaacagtaacgaaagaggtctcttagttggacaataagcagtgaaagatatttcttatgggacaagaaattaacattattagtcaaatgttgatgccggtaggctgagaaatgattctcacttaaaagcccctgggttttaaacctctcttagaaaaacattagttagatgaaaaaaaaaatcaaaatattttcctctggaaaacaatgttcctctgaaaacaagcagattattaaaatatcccttgtactacttcaggaaattgtaatcttataactgtagtggccttttagcttttaaatatatgaacttgagttggacacatgctgatctcattggtactttgcatgataagaaattatgatatttacaatgtgcagtctcagaaagaactgagagttttgctagacatttgccctaaagtttgagtcaatttatggtttaaaggggtgtatttaaggctagaaaagggaaatgaagggttttcttaggattttttccaattctatttaaaattgtttgcaaagttttgaaagcatatgtcatgagtttggcaaaaattatttcaaagcttgttttttttttaacctcattcacctctgctaactcctgaacttcagtgctttacttctgtcttccaaaaagacgttgtctaaaattagtcatgaaatttaacttaactgtaagaacttgaaacataaagtttgctctgaaaaagatctgggaaacctgatgtatatttcacatatcaatacatctgttgatgtattg

SEQ ID NO: 5251 - DNA, 1223 bp, Homo sapiens
attacaggtgtgagccaccgtgcccgaccatggctttatataatagcttttgctatgtttctgggcacgtgacctgcttgtgtcatcttcgatggtaaggctgaggtcttccagtgtgtgaagcacttccttggagcaggtgctcaatcaggtttgtggttttggtgaatgtcatgctgatccctccctgtcacccttccagcatcatcatggacacagccattatgcctctgagtcgcttccctccaagaaggaccaggaggagggggtgatggagaagctgcagaacggggacctggaccacatgattcctcagcactgcagcagtgagctggacggcaaggcgcccatggtggacgagaaggtcattgtgggctcgctctctgtgcaggtcagtgggccaccagctgcttggtggagcctctaagaggttgactcaggcttaccttgagggcacatggtccagcctttgacgctgtgggccctgggggtgtgctttctcctaggacctgcaggcttcccagagtgcttgctactggctgaaaggtgtccgctactctgatatcggcactctggcctggatgatcactctgagcgacggcctccataatttcatcgatggcctggccatcggtgcttccttcactgtgtcagttttccaaggcatcagcacctcggtggccatcctctgtgaggagttcccacatgagctaggtaagcgtgcgtcccccgttccactggtgctcccttgggtggtggtgtaggcccccttcctgtggccggttccttgctcccatctccctgtcttcacagtgcttattgtaactgatttaacacactcctaaagcttcatggaccctaatcaccttttttttggagacggagtctcgcactgttgcccaggccggagtgcagtgatgtgatctcggctcactgcaacctccacctcctgggttcaagcgattctcctgcctcagtctcccaagtagctgggattacagacgcctgccaccacactcggctaaattttttttttttttttggatttttagtagagacagggtttcactacgttggccaggctggtcttgaactccttacctcgtgatccgcccgcctcagcctcccaaagtgctgggattacaggcttgagccaccgaacgtggcctaaccaccatttcttaacgattaaatagataatttaaaatgatggggtttttaca

SEQ ID NO: 5252 - DNA, 1176 bp, Homo sapiens
cccttgcctccgagctctggcttcaaggggagctcttctccaggttcactaggtgaattgatttattattatcatattgataatgtgagattctttagccactttggggagcctgtctctccagaagcctttcttagtggtgcccacagttggagcccaggggccatgtttgcaaactgattcatgtgcatggctgacaggagtactggttcactaccaatgcctgagcttttctcttacatagaaaaactgtccgctctcagtaatcacaagcagcatccgttttgttttctcttcttgggagacatctgtcaaaccaggaatattcttgaaaagaacgtgagcaggaaaaactgctggtgatactttttttaagttttgtttttatcttgcctgttggcttcaatacatttgagaatacgctgaagagggaaaatttcagtgatggagattctagattaaatatcaggactgatttcctggtgggattatggtccagttttaccaaagaaccaattccttgaatgttggaatctaactttttatattgtcattattattgttgtttttaaacggttctttgtcttttctgttttatttttctcaagctgctttcaggagctagcagaaaataactcaaagttgaagactctggaagattttgctttaacctaactcgcattgatgtattaaatttataattttagcattcccaatagatcctatcattccttaaacataataccctttgtcttggagtagaatactaagttagagttagtggatttctagtttaggagaggagctcaaaactataatctttaacaaattgaaaaatgaaatagggtgttttccctttttgtgcacacctatattaccttaagaaatttccttccatagacagctgcctcaaagggaaatcctctttaaaccgtagttggcgcagaggtcagtcctagtcggagcttaggaggggcggagacgctcacatcgtctgacttgagtcgccactgattgtggcaacagctttgcctcatgagtcaaaaattggcaatttcttttgatttttagttgttgaatttgctgtttcaagcatttgtacatattagaagtctaaggagtagcaagtcagtgggaggactttttcacccctggcattagcagcttcgacctcat

SEQ ID NO: 5253 - DNA, 1409 bp, Homo sapiens
agacgtagccctatgctaagtcatgagcatatggacttacgagggttcgacttagagttttgagctttaagataggattattggggcttacccccaccttaattagagaaacatttatattgcttactactgtaggctgtacatctcttttccgatttttgtataatgatgtaaacatggaaaaactttaggaaatgcacttattaggctgtttacatgggttgcctggatacaaatcagcagtcaaaaatgactaaaaatataactagtgacggagggagaaatcctccctctgtgggaggcacttactgcattccagttctccctcctgcgccctgagactggaccagggtttgatggctggcagcttctcaaggggcagcttgtcttacttgttaattttagaggtatatagccatatttatttataaataaatatttatttatttatttataagtagatgtttacatatgcccaggattttgaagagcctggtatctttgggaagccatgtgtctggtttgtcgtgctgggacagtcatgggactgcatcttccgacttgtccacagcagatgaggacagtgagaattaagttagatccgagactgcgaagagcttctctttcaagcgccattacagttgaacgttagtgaatcttgagcctcatttgggctcagggcagagcaggtgtttatctgccccggcatctgccatggcatcaagagggaagagtggacggtgcttgggaatggtgtgaaatggttgccgactcaggcatggatgggcccctctcgcttctggtggtctgtgaactgagtccctgggatgccttttagggcagagattcctgagctgcgttttagggtacagattccctgtttgaggagcttggcccctctgtaagcatctgactcatctcagagatatcaattcttaaacactgtgacaacaggatctaaaatggctgacacatttgtccttgtgtcacgttccattattttatttaaaaacctcagtaatcgttttagcttctttccagcaaactcttctccacagtagcccagtcgtggtaggataaattacggatatagtcattctaggggtttcagtcttttccatctcaaggcattgtgtgttttgttccgggactggtttggctgggacaaagttagaactgcctgaagttcgcacattcagattgttgtgtccatggagttttaggaggggatggcctttccggtcttcgcacttccatcctctcccacttccatctggcgtcccacaccttgtcccctgcacttctggatgacacagggtgctgctgcctcctagtctttgcctttgctgggccttctgtgcaggagacttggtctcaaagctcagagagagccagtccggtcccagctc

SEQ ID NO: 5254 - DNA, 1207 bp, Homo sapiens
ggcctgggggatctgggctgactgtgggggacacacggccattttgagcagcacacagaccagcaggccgtgctgcagccctgtccttcctgcagcctcggtgacaccatcactccacagctggccccatggggatggggtgaccacctgacccacctcagcatggggtcctggatgtgctgagcctcagctgcctggggtgacctcattggaaggggttggggatggcaggtccagctgtgtactggggaccctgaagctgagcccggggtgtggacttgagtgggctctttgtcttcccaaggtccttttccggcggcgttcatgtccttcacgagttcctggggcggaggacaatgcccgcaacgagaccctgagtaacagatacttgcagcccacccaggtctctgagcaggaaatccaaggtcaggagctggcagagctaacaggtgtgactgtagagttgccagaggagccacagcgtctgctggtgagttgaggagggactgtgccctgcctggcgtgcagcctgcacaggactttgtagacagtgggacatggcagtgcctcctctttcctggcccaaggggacatggagcctttgggagacaggggactgcaggggacggagcagctgcactgaggtggtgaccgtgccagtctgcaggacatctgcttcttactccctgtcctgtccttgctgtgtccccagagcctggatctccacaggcatagagtgggtgtcacagggttcactgaggactgaataaggctgcacagtctccatcgtgtgctcctaacagaagtcagggagcccttgcttgaaacagcggaagttttaaatgttcttcaaaattcttactacattgaacatatttcacagtaaatctttgtccagatttctgatcaagtatgtaaggaggcttctgggaagaagtaggatttctgagtcagtgtgtagaagtgcttttgtattacagaaacacacacatccagttattcacatcgattcactagttttgatatgacattgagtaggtgtgaaatctggacacacatttgtttttttttaagttctttccttcaggataaaataagatgatcctacctaattttttgtggacttttaaagaatgatttggtttgtagcatacaccagtggaacgtaggtgccatttcttttgtgatgctgtgtgaagtgaggaat

SEQ ID NO: 5255 - DNA, 1444 bp, Homo sapiens
ttcgttccagcccatgaaggggaaagatttgcagctttgccaaatctgaatcagttcccactcccccctgcggttttttagaggggtttatcctgtcgctaatgtcagttaaatagcttattcctgtcccacttgatttcactggtaagaatgagaatgaaatacttaaaggttttatttgaggggacttagctgccattttatggaaaaacatgtagtataaaaggtttttctccagggtcatttgacagaattctccaggtgttcagagaaagaggtcgccccaagtggcccagagtcgtgacagtccggaggggctggtgtggccggtgggcgctgcctcttcatctgatggagccaggaggtccgccggtgggggaaaggcttcttccgaggcttctgcactcgcctgggaagaggcccagtcactacaggaccctgagatgtccagaccccttatgcaaagaggcaaaattgttgccttggccccatcatggagtaacttaaaaatacatatctatcttccagaacaagccacacaacaacacacctcccctccttgagcctggcacacagcaccgggctctctgaatttggaaagtgtttcattttgtggcctactgctcggggcaggggggctgagccaggatgtgcaatagaagcaggggttgtcccctctgccagatctgtggggagctgcccaggccacccgtgcacctgtcctgcttcctgcagtccccactccctgcctcctttgagggactgggggacttggggtagggggacagacgggaaagggtctgaatgctctggcaatggcgagaagaagcgatcgccacactgccactctgctgcccagccaccaggatttctgcctggagccctttgccctgtccctgctgcctgaggtggcgtagagcagaggagaagaatttgctccaggccaggagcacaaatcgttgttcaatgaatttctctccaactcgaccttggtaaacggaaatgttgggggtgaagagaaacaatcactatttttttcttttttatctggtaaataattaaaagaaaaaccgaacacttgtcccgtctcctctttaggttttatcaagcgtcttgttccttggtgcgtccccacgcttccagcttctgcacactttggttctttctcttaaggccacaggagaatatggagagcctgaccgtgtgagctttaagctgcggcagctgctgctccatccaagtggccgctctcactgagctcccctggggaggactcattctttgaatggcctccctggttttagcagtgtgccattgctactgttttccattgcctgggctctgtaagtggcctaatttcttctgcccatgtgattgtatcatattttagtctggcactggtatttctcagcccctcctccagggatggtgtttgccacaccct

SEQ ID NO: 5256 - DNA, 1258 bp, Homo sapiens
cttagagggaacaatgttgaaaaattcagaaactttaacaaatttttaccatagtgaaaaactgctaaatttcaagtatttatatggatgtaactaattatttttataagtaaaatacacaaaagagaaatcagaaaaacctgtttttaaatgttaaaattcatggatagaaagcaaatatggataatcatcgagactttataagtaatagatgaacagtagttaaaaagcactttttaaagcagaggtggtatgctcctagtcatgatggaataacagactaaatttatacataattgaaataatagggaaaaagcacacaaaatataggaaagaacagttttccaacattgaaaaacaagtaaataacggcagtgatccccaagaatcagacatcaaagtaaaagagccctaacattgctctagcttactgcctggggagagtatgcagcataaaacagatcaaaccagtaggacctgggcgttttccctgagttgaagaggcagaggtcagggtttaagaaggctaagaattcatacttactggcaggggagataccatgatcatgaaggtgattttcccagcacgaggctcatccattgcactccggatgtgctgacccctgcaatttccccaaatgtgggaaattcaactgcataatttgtggtagtggggactgtgttagcactttcccctggtcttcatggttgaagaacaggtccaggccgggctcggcaggtcacgcctgtaatcccagcactttgggaggctgaagcaggtggatcacctgaggtcaggagttcaagaccagcctggccagtatagtgaaaccctgtctctactaaaaatacaaaaattagctgggcatggtggcacacgtctgtggtcccagctacttgggaggctgagccaggagaattgcttgaacctgggaggcggaggttgcagtgagctgagatcatgccactgcactccagcctgggtgacagagcaagactccatctcaaaaaaaaaaaaaggagaagaaagaagaaagaagaaggaggaaggaggaaggaggaaggaggaaggaggaaggaggaaggaggaggaggaggaggaggagaagaagaagaagaagaagaagaagaagaagaagaagaagaagaagaagaagaagaagaagaagaagaaggagaagaagaagaagaagaagtagtagtagtagtagtagtagtagtagtcgtcgtctaagaattctcaattcatgaggcaggt

SEQ ID NO: 5257 - DNA, 1441 bp, Homo sapiens
gcaaccttggaataaacagaatagagacccgactcctcactcattgtgtttctgagtttagtttcaatccaacagcggatctgtttttttactccatgtaatgggactgttgctgcagcttttgtacaagggtggagtgggtgtccatttgctgacgagcaccctgtgtacacgctagtttttatttgaacgaggtgctcttgtctttattatgtattgtctgcccataaatgatgtcttgaaatagaggggtgagcatcacctcatttatttcaacccatatttgtacagaaggatttttgtaatcaaatcatggggtttgtgtgtagaactcagtaagaagtaatcatgaccctgtccgttcatttgctctttgttctttcctgttattaacaatggctttggggcttttggggcgcatttagttctgcacgttgtgtatgtaagtagatgttcttctgtgggggctgcaagtccttaagttatagttggattcccttcccagcaaggaaccaacaggaaggaaaacgaagtcaaacccagtctttgcacgtggaagcttgtggcgtgactgttatttttttgtgatgttctgtacagccctgtaatctcttatttttggcaagccaactctgaatctgtggtcccgtagccccaggcaaccaaaagctgagacaaacagaggaagtgtcgttattcacatgtttctctggccacctcatcgggctggacgctgccggctgccacccgtcgctgagctggagctccccagagtgcagcctggccaggcagggactgttgaccctggcccctgtaggaagcacctctggcttgtcccccagcccccagggtccctgccactcattacttctctgcactctttctgtaatttgttcatcgcctggaatttatttctggcagactttgtggtcaaaactgggaagtgtctgtttccttaaaacagcctttcctcaaacccaggaagtgaagtagggagctatccttcctcacctcctccctgtcacatgcacatgggcatacacacacgtacacactcacccatgtgcacacacacaggcacacacatgagaaagggacggggaaagctagggtgtccaccccagcctgggctcctggtatccctaagggttttggaagaagagtttcagtttttcaaagcctgctggagatgtaactgtcgtgatgtttcgtgggatctgcaagagcctgtagcgtcaggtttctttccttttgattgggatgacatgaagtctgttaatgcgggatcgtttgtgttatctgctctgataggtggttttacttgcatttgatttttgatagaatgagagatgaattgatttgttcctgatacattctgttgggatacagtccatttgataggaaggttgtttacatcacagtgtcctgtatttgggggctg

SEQ ID NO: 5258 - DNA, 1202 bp, Homo sapiens
ctgtcctggcccctcacccgctcctctcttctcctctccctccaggtgctcagattgatgacaacattccccgccgcaccacccagcgtatcgtggcgccccccggtggccgtgccaacatcaccagcctgggctagagctcctgggctgtgccgtccactggggactggggatgggacacctgaggacattctgagacttctttcttccttcctttttttttttttgtttttttttttaagagcctgtgatagttactgtggagcagccagttcatggggtcccccttggggccccacaccccgtctctcaccaagagttactgattttgctcatccacttccctacacatctatgggtatcacacccaagactacccaccaagctcatacagggaaccacacccaacacttagacatgcgaacaagcagcccccagcgagggtctccttcgccttcaacctcctagtgtctgttagcatcttccttttcatggggggagggaagataaagtgaattgcccagagctgcctttttcttttctttttaaaaattttaagaagttttctttgtggggctggggaggggccggggtcagggagagtcttttttttttttttttttaaatactaaattggaacatttaattccatattaatacaaggggtttgaactggacatcctaatgatgcaattacgtcatcacccagctgattccgggtggttggcaaactcatcgtgtctgtcctgagaggctccacaatgcccacccgcatcgccattctgtagtcttcagggtcagctgttgataaaggggcaggcttgcgttattggcctagattttgctgcagattaaatcctttgaggattctcttctcttttaccatttttctgcgtgctctcactctctctttctctctctagctttttaattcatgaatattttcgtgtctgtctctctctctctctgtgtttcctccagcccttgtctcggagacggtgttttcctcccttgccccattatcttttcacctcccaggtctaccatttcatggtggtcgttgggtccgcctaaaggatttgagcgtttgccattgcaagcatagtgctgtgtcatcctggtccatgtaggactggtgctaaccacctgccatcatgaggatgtgtgctagagtgtgggaccctggccaagtgcaggaatgg

SEQ ID NO: 5259 - DNA, 1196 bp, Homo sapiens
tgaactcctgagctcaagtgatctacccaccttaacctcccaaagtgctggaattacaaaaggtgagtttttgttttgttttgttttttgtttttttgagatggagtctccctctgtcactcgggctagagtacggtggtgtgatctcagttcactgcaacctctacctcctgggttcaagcaattctactgcctcagtctcccaagtagctgggattacaggcacacgccaccatgcgtggctaatttttgtattttgttagtagaaacggggtttcaccatattggccaggctagtctcgaactccttacctcaagtgatccacccgcctcggccttccaaagtgctaggattaaaggcgtgaatcaccacgctcagccaaaaggtaagatttaagtgaaactagttccacattgtttgtgtgggtttgaataaggcaatactttctctttagaagtaagattgaggctcagggaagttgtaactcacagaccctactcttccaccttcatcacactgacatctccttatttttctcagtagtttagccttccacagtgtgtgccatgagctatttctctgtctctgtacatgtggtttgttttacccatattattaaaattactagaaacaaaattcaaaaccagcctgaaaaatcatatacccttataggcctctaagcattttcgtccttggcaactcaggcatctctttataacttctccagttgtgaatcttcaacaacatagatatccatataaacccaacaatggaaaaacaaatatacaggcagggtgtataggtactgaatgtattttgtgctgttctattccccttaaagttactctgaattctttaagtgttagtcacacatacacatctgcccttaatagagcaaaatgcttcactagatttgtgggtcctgtttttttttcattgacttccattataatgtcagaactgtttcctgttagaaaaatatttggcctctaagcctaataaaagtgcacttgtgcagctgatcttttaaaactgcaaagttaatggaaaaatcataactttctcagtaaaatagtaatgagactttacatattggcagtatagaaacaacaaatatatagaatcttcaggaaatgaatttgtatggcttgccaagtttttaactaactgatggtttttactgcataaaaacttt

SEQ ID NO: 5260 - DNA, 1185 bp, Homo sapiens
agaagttcgagatcaagcagccacatctggtgggtgccttcttgctgcatgatcccatggcggaaggcagaacaagagagtgtgcatgagagaacaagagagcttggcttgcagcctcacatccttcaataatcaacattaatccattcatgaaggtggagccatcatgagctaaacacctcttattaggccccacctcccaaaactgttgcactagagattaagttttcacacatgaactttgggggacgtgttcaaaccatagcagaagcctaccacaattaactgataaaagtgtatactaatttagtctagcataaagagacaggccaggcgcagtggctcatgcctgtaatcccagcactttgggaggccgaggtgggtggatcacctgaggtctggagtttgagactagcctggccaacatggggaaaccgtctttccaaaaaatacagaaattagttgggcatgatggggcatgcctgtaatcccagctactcaggaagctgagacaggagactagcttgaacccaagaggcagaggttgcagtgagccaagatggtgccactgcactccagcctgggcaacagagcaagattccatctcaaaaaaaaaaaaaaagacagtgggatactatttgttaaataatatgatattgctctttttgtagactccaaaacgtcagttatcagcaatttgagatttaatctattacttcagatgattacagattctcaaagtgcttagtcgcacatttgttttttggtttttaaaattcaatgaacatttagagagtatcacatgctattgaactatactgagttctagagatgtgaagataattaatgtggtcttgctatcaaggaggttatggttagaggagggtagacatttaaacaaatatagtgttagagttgctaaaatggaagcaaagagatggctgtcacgcatgcagagtcagggagagcctagcaaaggctgcataaggtgaaaagggtcagtgacttgaacaagtgttttttcatactgtaggaagtagcccattagtagttcatcagaccagtttagggtgtcatatcttgtgacagttactatgggactgaacgaaggtggacgaacgcagaaatgaagacaaagacaaaaggatctttttaaagaaggggtcgggagctcctgctagtgag

SEQ ID NO: 5261 - DNA, 1159 bp, Homo sapiens
agcactctgaatgtttaattatgaaactttgtagctataactggaaaattacctgactctttgtaagagtattaaatacaaagtgatttttctctagaaatgtgacctggtcttttataaagcccactcttagaccaggattatctaatgccacatcagaagcaaacaggcaaatttaaacttgggcaagtaatttctgtgcccaatttgtaaagggaattcctgaatttttttttttttttaatagaggcatgggtctcactgtgttgcccaggctggtctgaaacttttgggctcaagcgatcctcccaaaacgctgggattacagtcatgagccaccgtgcccagcctaattcctgacttctctatacagagtcttcacttgataggcactcgtctgtagtaactcagtttgaatatctttagaaaatgtttagaatttatttgtaacaagatggtaaggaataagattatcccatatgcatttctgtagagcagaatttgatagcttagtgttcaatctttttgaaaataaatgtttacctgtcatcagatttaattaaaattatacttagtaattgcactattacttagttaatttttgttgtatggaaatattggtagtactactttgggaacctgttactgacaattgatgtcattaacaaaatgcctagttggattagatgttttcattttctaattttttgcttgtttaaaatgcaccttacttgttctgagatacctggcaaaagtctttacaaaatgtatggtaatagaaccaaggttagtaaatatacataggctggtggatgagagaccatggaactgtgtaaatacacttaaatgttcacacatttttctagtgtaattcttggatactttaaaaagcaaaacattgttcaaattgttttgattctgaaaaatcattcaactgctaactggcaataagactctaggcaagtcgttttccagattgtaattatatgtagaaactattcatctgcattcattttatttgcctgtaagttaacatgtttccaaaatttaaaagcctgggtccccaaaagaatgtggaagtattaaaatgtatgtaattatgcaaacattttaatgctattttctgcacttatttcttttaaatattttatttaaaatt

SEQ ID NO: 5262 - DNA, 1102 bp, Homo sapiens
ccctctacctgactcctgacttgtattccttttagcagtagccttcttccctcggggagccaaagagtgtggtgtgtggcgctatattgtggctgctatttcatctggtttcttttaatgtgaggaactcacatactgacttcagtgggactcggtgagccggggccgtctgtgtggtgggaccccctttagcgggactcagtgagctggggccgtctgtgtggtggagccagggcctctccctttagtggagccaggttgtcgggccccgaatgtcactggtggatctaagaagggctgagtggtctgacaccaaaacatgccgcagggagggctgtggtgccggtgcttccaacaaggacagccctccttgaccctgaaaggaacactggcttgaaggactgcagacaggctctgaggggcacgccctcctcagcgagaggcagcaaggtggccacagtgtcactggtcaggtgcttctcaccacgggaaagccgccgacctgtgactcgcttgagatgggaaagcggcgccacagaccccgggtctccttggctgtctgtgggccgcccctggccaccttgtcctggctcgcagggtgcaggagcgcctcgttctctgggtggccggcttgctgctccggtttgggctgtcttaccataacaccgtcccagggctctgcaggccactgtgagcgctggctccctgggcagtgctcctccgtgtggactgtgcctcaggccagggctcaccagctggggtcctgtccggaaggatgggatctttctgggagctgcgccggacagagtggggagctcctagtttgtggggggaagctttgatatccatgccacgtccatccaccccaccccttttcgtcacgagcacaatggtcttacattggatttttgtaaaaaaataaaaataaatggagactttaactcaagcagcttggaggtcttttgtggttttcctcagcaagtatggaagagtgacctgagagaaggcacctgcttgattgcttgattccaggtcgccacctgtgtatgccagctgggcctgctcgcagaagacgatgggaggcagcctgaccaggccctgg

SEQ ID NO: 5263 - DNA, 1275 bp, Homo sapiens
tggagctggtttctagttctcacatttagtcaacatctagaaagcgctgcggaaggctctggttctctagggacttgaaggcgccaacagagtagtctccatggtgggcctgtcccagccctggctgcgaggacaggttgtctttctctccccagttggcgagggacacgaaggctgcggccgggctggcagagggcccggcccctggggggaggcactcctccagggctctccctgtccttagccgattttgagggaaccctgtggcacctgtccctggatgaagagctgtcacctctgccttgccctttaactcaacccgcttcccagcacagcggctttctttttaaaacctgtttcactgagaagtttgtttttgggtccgctggtgtcactatggcctgggtgagaggccagcactgctgctgccctgaggggaaacgcctgggccgtgtagtggggacgctctgggaatggtggcggacgggcagcgtgggtgggacctggcacttcgtggtggctgagccatccacccagcagcggcctcctgtagcaccatcttgggaaagtcctgggggacgtgtgtgtcgtgctttttaccatcggtttgacttacagtggagtagaacgagccagagttcctgacttgagcaggtggatttgggcccaggccctgttcactcttgcttctcggtgcggactaatgtcagcttgtggctgggaaagagggatgtgcagtgacgtggtcaccaaggcagtgagccccgctgaccccgggccagcacttggcaggcaggaggtgcggtctccagagtggtgggccagggcgggctggcctccgtcttctatcttcttttcttgcctccctgaccagcagactcacctcccaagaacgcctgcccgcccacccgccttaggactcccgatgcgctcctggaaggccccaggagtggcaccttagtgtgggtcggcccgcagatggcacccaaggccgggaagggcagtaactgcacacgcggcgctgtcagagatgggggtgggggatgcttctgggggccctgcctccccattgtgtgcccagaacatccctggccccaccccgccacttccctcgggcccttatgaaggactgaggctccagggtgagaaggctcacttctgccccgggcactgcgtccagcagcagaggggacagggggcaggtgtgtgactgggttcctgggtacccaggcctgaccagagggagcgggagggcagaggtgaggagggggaaga

SEQ ID NO: 5264 - DNA, 1299 bp, Homo sapiens
acattattacttaatagtgtccctaagaagcgaaacttgagtcttgacagtgaggagtcagtccgacacacccagcggctatgcattctgtagaatagtgggccggcacccttccagttcagcagggtcaagcgtgacaaggaagggccaaggagctattgcagattagagtagactagagaaacgtgacaactaaaggcagtgtgtggttccgggatggggaaattgaaaaatttgaataagggattttatattaaataatagtgtattcctgttaaatttcctagatattactttcaacttacttgaaagtggtttagcaaaagtaataatgtgtgtgtgtgagttgtgagaaagagaagcaaaagtggccaaatggtagcagttggtgcgtcgggatgaaaggggtacaaatcactcgactgaatttttgcaacttttcttgacatttgagcattttttaatacaaattttaaaagtaagccagccaggatcatcatgctctatacttttcaggctaaggtgattgtggccacactgtcacactccattgtcttttcagggcagctgtcatagtagaactttgctggtgactggcatgtgccctttcagcctgagccaaggtggtttccttgaaagagttttcatgtttctggagaagagagaaacctgtttcctctctgtcttctctccaggtgaaagcagaagcctcctgggactccgcggtgcatggctgccctcagctcagcaggggcacgcccgtggacgagcggttgttcctgatcgtgcgcgtgacggtccagctcagccaccctgctgacatgcaactggtgttacgcaagagaatctgtgtcaatgttcacggccgccaggttagtcttcagtggaagaaacgactctaaccacagttgcgacctgagggtagggccgtgcagtgcttgctgttaaccttctgtccaaacaggctcccggaagcactgagcttttcttttccaggtgactgctgctgtcctgtacccatgcttgcttcaagcctcagatgtgtcacttgctcctggacagtatttttacactgaatctttcttagggcagattcacaaattatggttattcttttgggtaccacacaaccctgtcaagggcaaggtctgtggtttggttgttgccttttcatctgggccctgtcaaatgaggagtttccctcttactctgctctttccagacttttttttttaagatagagtcttgctctgttgctcaggctggagtacagtgatgcgatcatagctcactgcagcc

SEQ ID NO: 5265 - DNA, 1177 bp, Homo sapiens
caggtcttctcgaagtgtggaagggcaagagagcatcagtgagctgatggtggattgcttacatcggattccattggtatgaatttcccaaactggaaatcaaagcgccagggtggggttggggctgactgctggtgagggggctggccgctggctcccgtgacgtgcgtcatgggcacgcaggcgccattttgaatctatcgtcggcacgtgggtgccattttgaatccttagttgggcctttctaaatggagaatggctttggagggagacacgttttctgtggggagggtttgggggggagggaggagggaacaagctacatgctattttgtttgtagtattgtggaacagtcttgttatggagtgccagcttagaggttgttgcaaacttgtctagaagtgagagcatggttttttttagccctttgagagtctacatctaatgaacattcttgctcacccataaataacgtcaagcctcaatgtcaccgtcacgttgggatactctttctcatctggcatcctagacaggacaaggttggttacctttccttccatgaaccatgaacctgtgacggcatcattcatcctgacttcaccaagctccgcctgtgggtgaggccagagctcccactggcaatttttagaagagccagaggctccctgcttcctctagaaataacagttcagggtgaagcatggagggtttcagttcccagacaatggaaccatttagagacaacacagttggacatttccactttttccttgattcctggaagtccagtgggttctgcagctgaaaaagccctgggtcccagcagcagagagacaggacagaggggatgcttgggcggggagggacggtaacctgcagaacagattccatttttatagaacgagtacacgtttgctaaaacagtcctgctttcccagactggattcccaccacagggacagtcggaactcaggactagctccagcgacatctttcctccgaattcaagccttctatcacaatgtcaaaacagctatttataaagccattttcattgtacttgataacagcacgagtcccaaaacttttagaaataaaataggacattggcttgattgaaaagagggactttttaaaaattgttctttcgtcagaagccttttggatgacttacaa

SEQ ID NO: 5266 - DNA, 1117 bp, Homo sapiens
gacggatatatagcccaagtaacatttttttttttcttgagacggagtcttgctctgttgctcaggctagagtgcaatcacgatctcagctcactgcaacctccacctcccaggttcaagtgattctcctgcctcagcctccttagtagctgggattataggcgcctgccactgcgcctggctaatttttgtatttttaataaagatggggtttcaccatcttggccaggcgggtcttgaactcctgaccgcgtgatccacccgccttggcctccgaaagtgctgagattacaggtgtgagccactgcgcccggcccccaagtaacatatattaaatgaaaaaaatgtttgtttctaatagtctgtttctatttttcttcacagtgggaatgtaagacggacttagatattgcatacaaatttggaaaaactgtggtgagctgtgaaggctatgagtcctctgaagaccagtatgtactaagaggttcttgtggcttggagtataatttagattatacagaacttggcctgcagaaactgaaggagtctggaaagcagcacggctttgcctctttctctgattattattataagtggtcctcggcggattcctgtaacatgagtggattgattaccattgtggtactccttgggatcgcgtttgtagtctataagctgttcctgagtgacgggcagtattctcctccaccgtactctgagtatcctccattttcccaccgttaccagagattcaccaactcagcaggacctcctcccccaggctttaagtctgagttcacaggtatgtttccctcgcagtggccataaatagagcgggtgtgaggttagtgcatcctgtgcttggttctgaaatagaaaatcgttgcattgggaaaccaaaggaggtttgtcttctcattttgttttttactttcaacttcttttacctcttctgtttggctctctcccaaggtatattgtggttgctatgttaatgcctgattggccgggcgcggtggctcacgcctgtaatcccagcactttgggaggccggggtgggcagatcacttgaggttgggagtttgagaccagcctggccaagatggtaaaacgccgt

SEQ ID NO: 5267 - DNA, 1292 bp, Homo sapiens
atgaatagaacttgctactttttttttttttttttttgagacagagttttgctctcattgcccaggctggagtgcggtggtgctatttcagctcaccacaacctctgcctcctgggttcaagtgattctcctgccttagcctcccgaatagctggaattacaggcacgcaccaccatgcctgactaattttgtatttttagtagacatggggtttctccatgttggtcaggctggtctcaaactcccaccttcaggtgatccgcccacctcggcctcctgaggtgctgagattacaggcgtgagccactgtgccagcttgctaattttcacagaagttgatggcaattcttcacatgtaaacagtgccagtgcacagaacctttatatattttttgaagccagtactgtgctctgcatataacaaagctgcttcaaggatgagacctttttctaaaagcatgtaatgtgagaagccggcctgccttattttcttttttcttttttaatgattaaaaatagtttgtggcaaggcacggtggctcaggcctgtaattctagcactttgggaggccgaggcaggaggattacttgagcctacaagtttgaggccagcatgcacagcatagcaagactgcatctctacagagagtaaaaaaaattacccgagtgtggtgatgtgcatctgtaatctcagctacttgggaggctgaggtgagaggatcacttgagcttgggtgaggtgaggctgcagtgagtcctgatcatgctgctgcactcaatcttggacaacagagcaagaccctgtctcaaaaaaaaaaaaaaaaaatatatatatatatatatattatttttatgaggtgaagtgcatcaaacttgggaaagatttgaggaggctgggaacctcctggaaaaccactccttgaagaaagatatgagagacatttagaagtgattcctgctttcagaaggaggtggattcaaatacatcaaaagtcccttcctctgctaagtgtttatagttcaatgaataatttcaatatttgtatgtgttcttgtcattttatttttttctgaaaaacttccaaaaatttgaaaataaaattacagccttttcttcttataaaatttgttactgtgagctttaattggtacacaggaaattggtttattttctaaggatatttcacattggagaatcagttgcctgtgcttacgggggtgaaaagagagttctcgtataaaaataaagatcgaaggtataaaagaaacatttagcagattaatgattgag

SEQ ID NO: 5268 - DNA, 1200 bp, Homo sapiens
gatgtgcccttgtgtaatgtggttggtgtttatttggcttggagttcgttgaatttttttgatctgtgtgggcttatacctttaatcaaatttgaaaaatgtcttcagatcctttttcctcccatcctgttattcttttctctttctgggactcttagtacacacaagtttgattgcttgatactgtgtcacaggccactgaggctctttcctttcagtcttttcttctttcttcctttttttctttctgtgcttcattttgaatagcttgaatagttttgtttcctgtcttcaagttcacttatatttttttcttctgtagtgtctggtctgtttataccatcctgtgaatttcttttttagatactacatattttgtttatctctagaagtcccatttggttcttaatttttttttccattttggctctcattattcatgtttctttcaaaattcttgaacatatttagcatatttttaatagctgttttaatgtacttgtctgttaattccattattctagggtttttttctttctattggatgatttttctcctgattatgggttatattttcctgtttattcctacagctgttaatttttttttttttaattaggcattgtgatcttactttgtggaatgttagattttattgttttcctttaaagaaaggaactttgtcagacatctaagttacctgaagatcaactttatgttttgaagcttgttttcaagcttgatcagggaaagtctacgtttgcctttagtctaaaggtaatttagccctataataagatgtgacccttctggagtctttgtagactgcctctggtgatcaacgatctcttctctgacttttcagaacgttaatgcctcttacctttgtgtaagtccgtcctaagaatcattcagcttatggttgtttgcccagccccatagagttttagtctatgcatgcttgtcttcgtattctgcaaagaccaaaggagtcccttagggagatttctggagctcttttcctgcctagcttcctcctctccagaactctgccccgtgagttccaggtccttcagcttccagggctctgaactctgtctccccaactcagtgctctccttgggattcttctccctgttctgttgtctgcaatgggtcccaggaagaatgtggggcaactgtaaggttcacccttcattt

SEQ ID NO: 5269 - DNA, 1198 bp, Homo sapiens
cttcacctcctgggctcaagtgatcctcctgcataagcctcccgagtagctgggattatgggcgtgcaccaccatgcccggctaatttttatagttttagtagagacagggtctcaccatgttgtccttgctggtctcgaactctttacctcaagtaatccacccgccttggcctcccaaagtgctgggattacaggtgtgagccaccacacctggccttggatttcatgatttgactgacatcttttacacaaattattgccatttttttattgggtaccaattattagtattgttttctttattcgttaaataagaagtaaaataacttttttttaaaaaaagaacttttttcctagtaaaaagcttattttcaatttttttattgcttaaattttgcaggttaattaaggctgtgcttccttttcctactttctgtttaaatgtttggcattttttgagggttttctttctatggatttttgtgggggatcccatcttgttggacacttggttcctggagattgccaaattattgaaaagtttcctcatacccaaacattggcagtagactgaataaataacatctctgacactatttttcaattatatagagaatgctatttgtaaaatactgatttatttaaagatattacagtcagtagttttttgcaatctttttaaaatcagtggatgtcaaaaacagctattgttctttgtacagcatttttcaacattgtgaagagttcttatactcaaaaagtttgggagacacagtttgatattgtttaacctgagttgaacttgtcattttgtattcttgtttagagcagggattttattttgtctctttatctaactttgtattcctatttctttctttctctttggttctttgtttctttgttcattcttctctctctcccttttttatctatcatataaatatgtaaatatatattatatatccattagggaagaggaagctgtctaaagatatctagtatataggagctttgttctgcagaaaagaggatatgaagtcaattatattggaaattaatgcttaatacttttttttaaagcatttatctcccaatgataatgaaaacgatacgtcctatgtaattgagagtgatgaagatttagaaatggagatgcttaaggtatgtttacaattataaaaacattacttcaa

SEQ ID NO: 5270 - DNA, 1214 bp, Homo sapiens
gtccaacaatcatctactgtccttctagaaaaatgacacaacaagttacaggtgaacttaggaaactgaatctatcctgtggaacataccatgcgggcatgagttttagcacaaggaaagacattcatcataggtttgtaagagatgaaattcaggtatgaggatcaatcatcattgctctccgttgctcatagtggaagtggatatttctcaaatgtttatttaccagatctttattgaatactttctttgtgttgaacataaagcagtccctctgataaatgtgggagaacaaacttgcagattagtataaatagcaatctgtacctagtgcttaggtgcacagaggagggaggaatagctctgtcaaggtagttgtgtaatgggggtggtccatccaggaaaattcaattagagtccaaacatgtaagtagaagtttttcaagtatgccaggccagtaggtgatgaggggaaaggaattggttatagaattccaggaagaaggactagcaggtgcaaagacactttgatatgagaacacatactgggttcaggaaatgtgactggtatggaatggttggagggaaagacaatgtggggtaggaatggcacaaagtatggacaaagaggcagggtggaaccgttagagacttgagagaacagttgaatgggtcggttggccaggttatagatggctttaaaacttgcaaagaagcagtctgggcttggtatcatatacctgttagttttcactgactactttagccttagaatttttagtttagatacaattttctgtaataggtaaaacggattaaagtagaataactctggctgaagttaatgtgagggaaaaggaggtacaagagtctcgtctctagaccttgaagacactccctgttggggtcttataatccttggagtgccgcagaatcatttgaaaaccatcttgatgtactactctgtgtttttaaataagataataggattatagaaacattagactggcagcaataagttggattgatttgaagaagagaaactgaagaagggaaagggtatcgatgcagctattgtgaaattctacagttgagattcctgacctgattggactggctcagtgggtgtcatagaggatttatttgggaggatttaagttcaaggcacatgagtaggtttaagtcaacaacttgacactgtcaacatgaaatcc

SEQ ID NO: 5271 - DNA, 1175 bp, Homo sapiens
atatacacgtatacacacatatatacacatatacacatgcacacacacatacacatatgtacacacatacatatatacacatacatacacatttatgcatacatatgcatatgcatatacatatgtacacacatatacatctacatatatgcatatatgcatatacacacacatatacatacacatatacacatgcacatatatacacacgtatatacacacatgtatacatgtacacatgtatatacatacatacacttacatacatacacatactgtaatttatatatacatatacagattgagcatcctaaatctgaaaaatttgaaatctgaaatgcccccgaatccaaaactttctgagcaccaacgtgatgttcaaaggaagtgcttattggaacattttggatttcagaatttcatatttgggattctcaatggtataattcaggtgttccaaattaaaaaaaaatccaaaatctaaaaaactcctggtcccaagcatttctgttaagagatactcaatctgtatgtatgtacatgtatgtgtacacacacacacacacacacacacatacacctcctttgtgtgtactgtactttttttttttgctcctctctcccttctctggaagcatatagaatcttctctgtttcaccagtttggaaatttagtaataactgctttggtgtgggtctgtctccttttactgaagtgggaacgtaaatgtctggttgccaggaagcctacaaaacagtctttaacttggtgacttttttgggactcacagatctacagagtcatgcacttaattttgtcagtacacttaagagttggtttttctgtctgggatggacttaatctccaaccaaattccaaggagacttctggtttgaccttctatacctcagatcctgttactctccagtgcccaaaactatcagtgactctcatggagaaccgaatctatgctgtttattaccttggcattcaaggctctgtgtaatctgactccaacctaccttccaagctcaacgcctctgattctaccaactaaaccttacattcaaaagtcaaactggaatagtccccatttgaggcataagtcagaaatattcctaacttagcaccattgttcatatagttctatgtcctagattgtccttttcgtatt

SEQ ID NO: 5272 - DNA, 1261 bp, Homo sapiens
aagaaagggaaaggggactctcagggagtaaaagagtcttacacttttaacagtgacgttaaaagactactgttgcctttctgaagactaaaaagaaaaaaaacttaaaaatttaaagaaataaacttctgagccatgtcaccaacttaaccacccccaggtacctgcaacggctcgcgcccgccggtgtctaacaggatccggacctagctcatattgctgccgcaaaacgcaaggctagcttccgccagtactgccgcaacaccttcttatttcacgacgtatggtcgtaaagcaataaagatccaggctcgggaaaatgacggagaggtggaactatagagaataaatttgcatatataataatccgctcgctaattgtgtttctgttttcctttgctaaggtagaaacaaaagaataatcacagaatctcagtgggactttgaaaatatccaggattttatacgtgaagaatggatgtatcgcattacggtagtcaccctatgtgtaaattagtggcacatacttggcactccttaatgtcaactataagatgatccttttgtagttcatgagcgtgatgattgggtgttcatacgcttgtgtgagatgtgccacccttgaaccttgttacgacgtgggcacattacccgtctgacctgaacttcaaggatcgatttaacacttgtatttgtgggcttgttacttatgataacaggtggcctagtttcatggctttgtgtttaccgttttcgggtgcccttttttctggctgtatgctacacgcacgggtgcttttccgttgtccaactgtgtaatgtgtttttgtgtttgttcttttgtgagtcggagtctcgcgttgtcgccaggctggagttgcagtgttgcgatctcggctcactgcaacccccacctccggttttcgagagattgtcctacctcagcctcccgagtagctgggactataggcgcgcgccaccacgcccagctaatttttgtataaatattggcaaggatggtctcgatctcttgacctcgtgatgcgcccgcctcggcctcccaaagggctgggattacaggcgtgagccaccgcgcctggccaatgcagagctttttaatggctttaattttttaggtttgggagatacctgcgcaggtttgttacctggatatgttgtgggatgctgggatttggagtgcagcttagcccgttttcattgccccctctagtagaccacagtgtctgttgttgccactttt

SEQ ID NO: 5273 - DNA, 1101 bp, Homo sapiens
tcccaaagtgctgggattacagttgtgagccaccacgggatattcttgttttgagagacaactggagcagcgtggtctgtctggttagagattaccattcctcatttgttctcaggtgtctggtgaaatggctggaagttcgctgtgtctgccccatgtgtaacaagcccattgctagtccctcagaggccacgcagaacattgggattctattggatgagctggtgtgagtgctgccgctacaccgagacctggagaagacctcttgcctcatggatgtctggtccctctgcacagctccaaccaacaggactgtagggtgatgacgatcactttcccagtgatgagaagggtggtctaggactgggcttctaccctcagtgcaagaccagtgccagatgtgcccccacttcctgcctcctgaagccttcttccctgctactccatgctggtggcctcacccatcaagaccactgtctcctggtactggactatctacctgccttgtccctgttctgggggaaggtgtccaccccgatcaagaacatggagaaagtcctctttcaaggctcccattaggaggatgagctgccttgacccagaagggatgagacgggctcttacctctctacaaccttccctccccttcccactccttccggagtaaggttagaagggaaggaaggaaagatcaaggaaccaagcgcctccacgggaggcgagggaggctctgtatgaaacagaagagcagggacataaaggaaaatgtcagtgtttacatgggacctatggaaacaaaggctggcgggcgccagctgactccagagtaagagagggcccttcccctgccaggacccacggtgctatccattcagtctcttcctcagttaatctcggagcttcctattccatgttgaggtttgtgggcccctctagaggagggctagttctatacttaaattgattcccaggggccttttttttttttttttttttttttttgatcaaaaggggtgtggggatgggggtgtctacggttaagcaacagatacctccttccctttgtaaatagtatttttatacttcatcctcgcctctcag

SEQ ID NO: 5274 - DNA, 1209 bp, Homo sapiens
gaagcaccattagcataaatgtctgtagcagaccaagaaagaggcttacttctcccaggcccttcctggtcagggagagcctccgggttgaagagcgtgggtgccttggctgccagctgtcacgggtggtgctcctgctggcctggccgccccctggaaatcaggtccccaggagtgctgccccctcagcccagatgctgcagtctctagaagaaagcaggagggatgcactaaggtctactttaggatgcgtctttcctgctcactcccctatacacactcacacacactcacacgcacacacagtttcacacacacactgacactatcacactcactcacactacacacactcggacacactcacacacacaagctcacactcacataccctaacacacgcacacacacagtttcacacacacggacactatcacactcacacactacacacactctgacacactcacacacacaagctcacactcacataccctaacacactcacacacacacatattcacatgcccacccacacactcacacacctacagtctcacacacacacacacaactgcacacacacgcagtcacacacttttggacacactcacactctgacacatacgctcacactctctgacacacacattcacacacccacacactgacacacacatacactcacagtcacacacacactctgacacacacattcatacaccaacccccacacacgctcatactcacactcttgtgtgcacatgcccgacctccggaatcacagtacggcagggccccgaggcacttgggttcacccgtcacagctttctcatgggcacctggactgaagaagggaggggacttgctgagggacccatttctagttagagatagggttggctgcaccccaaatcttaatcttgggcttagaatggtgtctgggattctgaaggtgctgttttacttctttcttcctcagccaatacatttcggcccacagatgtgactaaaccccgtacttagagatttattcattctgactcaagcttagctcacaattatacagcaaagtctcctgggagggtttatatgttaagctctgtcagtaatttctcccctagcaagaatgaggaagatgaagagctcgggtatctgagggctggtgtgtctgcatgcgtgtgtgttttgggggccgactgaaggaag

SEQ ID NO: 5275 - DNA, 1202 bp, Homo sapiens
tttgagacggagtcttgctgtcttgcccaggctggagtgcagtggcatgatctcggctcactgcaacctctgcctctcgggttcaagcgattctcctgcctcagcctcccgagtagctgggattacaggcgtgtgctatgatgcctagctaatttttgtatttttagtagagatggggtttctccatgttggccaggctggtcttgaactcctgacctcaagtgatctgccggcctcagcctccgaaagtgctggaattacaggcatgagccaccgtgcccagcccgcaatgtgtcttaaaaaaaaaaaaaaatagcccatccctccctagaagccatcaagaaaatcctttaagaaactgtgaatatgtatagattattttttcactacttcaatttacataaaattcaccacccaggaaaaaatgctcgagtcaggttaagacctagagggggtagatttgttgtgtggggttaatgtgtagttttcagtccttgccgaggcagaattgcctgaatgatcgcctctctctcctctctctgcataacactcaaaccctaatggcaacaacatgaaataatatctcactgggtaactatttacattttttttttttttacaagctgtaagaactctgaaaagtctgcctcatagagaacttggttttcctccctggcgcttaatatctttcagcggctggcaattactgctttggccgggagccctgatttagcacactgcactcagggcacttgaaggcgcttcctctgtctgccccatcccccggcttcagacacagcctggggcacgagaggggcaccagggaacagtgggagcaagcaggctaagaccaggacagccagccctgcaggaagcccgccccaccgatgactcaagaggctccctcttctacattctcacagttggtattatgttctattattacacctatcacatggcatctgccactatttgcttccttgtctgatctcccactggactgtgaatgcttcttgttttcctcatcctctttgtgtacttattgcctaacagagcggttcaccatcaccacagtagccaacgttgagtgccaaacgctgttctaagcactttgcgtgcattctctcatttaatccttgcagaaaccttaggagatgggtcctatggttacttccatttcacaggcacagaaaggttaagta

SEQ ID NO: 5276 - DNA, 1175 bp, Homo sapiens
ctacccgctggtgtaccccgggcacccgctgcagcccgccgcgctctcgtccagcgccgcccaggccgcgctccccggccacccgctctacacctacggcttcatgctgcagaacgaaccgctgccgcacagctgcaactgggtggcagccagtgggccgtgcgacaagcgcttcgccacctcggaggagctgctcagccacctacggacccacacggccctgccgggagccgagaaacttctggccgcctaccccggggcctcgggcctgggcagcgccgccgccgccgccgccgccgccgcctcctgccatctgcacctccccccgcccgccgcccccggcagccccgggtcgctgtccttgcggaatccacacactttgggcctaagccggtaccacccctatggcaagagccacttatccacagcggggggcctggccgtgccgtccctccccacagccggaccctactattcgccatacgcgctgtatggacagagactagcttcagcctcggcgctgggataccagtaactacagctcttcctccaccccagccccctcaccctcctccctctccctcctcctccctccccacctgccgtcgccgctgcaacctccactactgcttgaccctgccgggattccccacccagcccttccccaccggactgtgtatttatttactataatgttagcttacaagctgggaatataagtgcattaacggcccacatgagtcaatggtatgcaaaaagtctgtgttctcccaaataataatattaatcccacaaataacgacatgatccccgcccctgttcctttctgttattttttcttagatataagttttacattttttattccttttcctctttttttggttttgattggtttggtttgagggagagttggggtctttgggttcttctagacgttttgttttcccttcctggggagtttcttgcatgagtcttaacttaaaactacgtttccgccttctctttttccctcttcccccttcattccctcttgtttccttccatttgcggttctgtttttgttttttgttttgttttgttttgttttttcctttgttgtacaagtaacagagaggaggttttttttgtaactcattttgggggtggagggggccacctgggtggcaggggcc

SEQ ID NO: 5277 - DNA, 1141 bp, Homo sapiens
aggcagatgctgagtgctacactgctatgaaaatagccgaagccaataaggtaaagaccccgcacagcctgataaaaaggagtctttgggtctgggtctgtattgcaggagagtttccagtgttgagcgcctgccaccacccaaagcccttcatgggcagaactgaggatgcctttgctgtgtggtgcaggtactttccttctccttggacatgccttgatagaagtttagtttaattttgtgttaaacatggaaacttttaacttttgcacctatgctccaagatctgagatgactgtctcttacagaaatgtaacaatgagaccacaaaaagtaggtaggggcataaatataggaaaattgaaggggcaccactcccctccttctctaatatggttcaacataagtcttccatactttttttttttttaacagctgaagctaacccctgaatatctgcagctgatgaagtacaaggccattgcttccaacagcaagatttactttggcaaagacattcctaacatgttcatggactctgcgggcagtgtgagcaagcagtttgaggggctagctgacaagctaagctttggcttagaagatgaacccttggagacggccactaaggagaattgaaaaaaacttgatatgactgcaaatgatacttaagcagatctttattttttaagatgaatcagaatgttcctccctccccgactaccttctctgactgtcttccagttactgtggtgaaaaagaagaaatgaacttaaatccactccctttctagggaaaggagggtggggactgatgatggggggttttatttcaggtaagcagtttatatgacttccaataagatttgtaaatcatgggcttgacctttgacctctagacactaattttatcctttgaggctggcttaattagggatgctgtcattaaggagagggagaaatgtagagtgttacctccaactcatttgatttcccttacttgggaaaatgcagtccagtgttctcacctctgcctccaaggtaggagatgtctgtgggtgaggctcagcaactgagcaaatatgtgcctgtgagtttgccagtagagctgtgaagaaacagctgcagagaacatttgaccttcc

SEQ ID NO: 5278 - DNA, 1164 bp, Homo sapiens
agccgggtgcagtggctcacgcctgtaatcccaacattttgggaggctgaggcgggcggatcatctgaggtcaggagttcgagtccagcctggctaccatggtgaaaccccatctctactaaaaatacaaaaattagctggacatggtcacgcgctcctgtaatctcagctactcaggaggctgaggcaggagaatcacttgaacccaggaggcagaggctgcagtgagccgagatggtggcattgcactccagcctgggtgacagagcaagactctgtgtcaaaaaaaaaaaaaaaaaaaaaaaaaaaaattctgctctcatctaccacttcccgaagagaaagcatgagaatgcatgcattgaagaggctgctggtagcagagaggagaggccagttcatggggattgtgaacattgttgcagttgcttccattcaaaggtaactcctcagcctttctcctttcaggtggtataagttgaaatccaaaccaggaaagaaggacaaggagcgaggagaaattgaggttgacatccagtttatgagaaacaacatgactgccagcatgtttgacctttctatgaaagacaagtctcggaatccatttggaaagctgaaggacaagatcaaggggaagaataaggacagtgggtcagacaccgcctccgccatcatccctagcacgacaccttcggtcgacagtgatgatgagtctgtggttaaagacaagaaaaagaaatcaaagatcaagaccttactttccaagtcaaatttgcagaagacgcctctttcccagtccatgtctgtcctgccgacttcaaagccagaaaaagtgctgcttcgtcccggagactttcagtcccagtgggatgaagatgacaatgaggatgagtcctcctcggcctcggatggtgagtttctgcctcttcctgcttgacctctcttcttcctcttaccatgcttcgttctgagagagaagaaacagacaaatctcaagagaaagagtttaattcaattcctcaattacaaaatcatggtggtggggatgatgatagcggtggttaagatgccctctctaaggctaggcgtggtggctcacgcctgtaatcccagcactttgggaggctgaggcaggcagattgcttgagcccaggagtttgagac

SEQ ID NO: 5279 - DNA, 1198 bp, Homo sapiens
aagccagaagattggacagcccactatagagtctatagtgtgctgtgttgccaggtggttttgtccaactgtaggctaatgtaagtgttctgagcacatttaaggtagggaaggctaagctataatgttcagtaggttaggtgtactaaatactttttttttttttttttttttgagttggagtgttgctctatcgcccaggctggagtgcagtggtgcaatctctgctcactacagcctctgcctcccaggttcaagccattctcctgcctcagcctcttgagtagctgggattataggcgtgtgccaccacacccagctaatttgtatttttagtagagatggggtttcaccatgttggccaggctggtctcaaactcctgacctcaagtgatctgcccgcctcagcctcccaaagtgctggaattacaggcgtgagccactgcacctggccctaaatgcatttttgacttaagatattttctatgtatggtggatttattgggacatacttcattttaagtcaaggaacatttgtattaaacagtattgctggtatttcttgtcccaatattaccgaacagggagtggatgtgactttttttcttttttttaaaaagcaaaaacaaaaaacttttaacagatagggcctcacctctgtggcccaggctggagtgtctatgggctgaagtacagtggcgcgatcaccactcactgtaactttgagctcctgggctcaagcaatcttcctgcctcagcttcccgagtagctgggaccacaggcacatgctaccacacctggctaatttttattttttgtagagatgaggtctatgttgcccaggctggtcttgaactcctggcctcaggcaatcctcctgcctcaacctcccaaagcattgggattacagatgtgagccactgcatctggcaactttttcttacactgaacaagccagtattggggccggggtctcagacactgtgactgatgctgtttatttacctgtttgcatccagcattgctgacaaggcaagagtaagtaactgctgctcactgacatttgggtatgcacagcaaagggctccatgtaatctgatggttatgcccatgaaagctcattaagagagctcagatactaggcccagaggatcagggcttcttaggtgtgcagggacacttggtgaaaatggttgt

SEQ ID NO: 5280 - DNA, 1207 bp, Homo sapiens
tctgaacatgctcaacagttactttgtgggcaaaataaatgcaaagtatttcctatgtctcctaacccctattcagcaagtaggatgttgaatcaggagttgttttaattcccttagcatgttatctgcttactgagggcacagctctggtagatacaatggtgggtattgcccctccttttgagttgacaacctggtttggagacaaaaaaaaatgcaattacaaagtgttatataaacaaatttagaacaatataaaccttgtgttggtgttttggatttttcagaaaggatatatgtggataaagcctgttgtccaaaatttgagatgacccatgctctttatgcctgaaccatcctttttttcctttctcattgctgctgactcactcctttaggtatattgtctactctcctcagcaaacctatttccaatcatgtacctcttctagtgaattaaaatcatattgtgattgagaatgaaagacttttttccttatactgactgtctgttggaataattgtactgctcgctctctgtaatgttctttatggtttgtattatgctaatacatttataaaagactatctaaacataaggctgcattatcgtgaaattaatccaccttgggtgagattgtgaagaaatacatatatgtgtgtgtgtgtgtgtgtgtgtgtgtgtgtgtgtgtatatgtatatatatatacatatatatatgttttcttgtttttttcttgcgactgggtctcgctctgctgcccaggctggagtgcaatggcaggatcacagctttctgcagcctcgaacttctgagctcaagggatcctcctgcctcacccttccaaagtgttgggattactggcatgagccaccacacccagctttcctttataatctgttgtatactttctagttaaaaggttaaagtgggttttagaaatgctgatgtcttaattaacatgtgacttgtgatttaggaaagagtgtttttaaaaagaaagaaaaatactgaaggatcaggaagaaataattgatcttggtagcaacatctgctgggaaaacacactagctaagcaagcctggtctcttagagaggcctaagatagggccacttttgccagaaaaatttgtttggatagacagtttaggaaaggaagtttactagagagataactgggaggaattcaaggaagaatcaaatca

SEQ ID NO: 5281 - DNA, 1733 bp, Homo sapiens
ccgcagcagagcaggaagaggcgcgcggggccggcgcctgccggggaggtcgaggcgctccctcggcgagccggcgccgccggccgggtctcctactgcttgcaaccgggggagggggaccatccgacagctcagccggggctgagagggagacgacgccaaggcggtcttgcatcgcccccggctttccaaatgcagaccctaccggaaccggagcccttccctgacagccgtaggacgggagacggccgaggggtcgcctggactgccccgccctcgcgcggtgacccaccggggaccgtgcgagggtcgcttctaacccttaagagctagagagccgagtcaccctgaggagcgccgtatggcgctggttgcgcgttgttctttaatcagcctcactgaacgcgccgatcccagttttacctcccgggccccacctttccacgcctcctccggcttcccggggtgttttgtgtgtcactctcccacgtacagtccctccccgtccctcgttcctcggccctctcgcccggtctccctagtcgtccagacgctagctgccgcgggcgttcctggttcgcgctcccgccccctccgccccgccgactcgccgcttcctccggagccccagcgtcccgaaccagggactgcatttcccggcaggcgccgcggcccgcggccaatgaggggctgaggatttggcggcggcggcgccccgagagtcggggtgggggggctttgtgcgcggcggcggcgggagaggcggcggcggcggccagcacggaggcggaggccgagggggctgtgcacaggtcgccgcggagaggcgtgcgaattccgagccgagcgccgaggaccgtgctacccaggccgggctgccagccgcaggctcctctctggcagcagcggcggcgcggcgacccccgtccctcggcctccccttcccatcccacctcccgagccttcctcttcccgcagcacgcccggcccggcccggccgtggccctcctcagtgccggccgccatggcagaggcgtccggcgcggggaaaatctagcccggggatttcatgcggcctagctcggttccgcctcctcctcgcgcggccccagcggctgcccgcaccccagccccactccgggcctccgtgtctctcctgtgatcgcactgacacggccggggggttagaatggaacaaactgaaggtaaagtgcgtgtgcgtgtgtgtatgtgtgtgtgtgtgtgtgtgtgtgtgtgcgcgcgcgcgcgtgtgtagtgctaggaagggctgaggagggaacgacggggagggggcgacctagggatggagcgccagaccccaggaggaatggaaggggaagcgggtggcctgaaagggctcgaggggagtcctgacggaggagcagatggcaaggtggggggtgtggagggaattggggggtgggccaggggaggtggggagtgggatgggagtcggagtggcgctgagctgggaattgggaaagtgggatgggggcggggataaggatggatcggggaggggcagggaaaggggagaagagttgcatggagattacagacctgggtggactgataaatagggagatttggggatggagtgtaggaaccagaagagtctgggagaaggggataaatttgctggagaaatggggcattttatgggaatgaagggagaaatgaggaatggaagtgaaggaaaaggtggattagga

SEQ ID NO: 5282 - DNA, 1101 bp, Homo sapiens
gtccaatacaggactggctcagctggctccatctcatcccttagctgggactcctcaagcacaagccaccatgacgccacccccaaacttggcatccactaccatgaacctcacatctcctctgcttcagtgcaacatgtctgccaccaacattggcattcctcacacgcagagattgcaagggcaaatgccagtgaaggggcacatttccatccgctccaagtctgcgccactgccctctgcggctgctcaccagcagcagctgtatggccgtagcccatcggcagttgccatgcaggctggccctcgcgcactggctgttcagcgtggcatgaacatgggggttaatctgatgcctactcccgcctataatgtcaattccatgaatatgaacaccttgaatgccatgaacagctatcgaatgacacagcccatgatgaacagcagttaccatagtaaccctgcctacatgaaccagacagcacagtatcctatgcagatgcagatgggaatgatggggagccaggcctatacccagcagcctatgcagcctaaccctcatgggaacatgatgtacacaggcccctcccatcacagctacatgaacgctgctggcgtgcccaagcagtcactcaacggaccttacatgagaagatgagcaagatgaacttgcaatcaaaaacttaaatatatataaataaaggaaccttttatactgacaaaccagagaaaaatggacctttttccagttaaaatattgctgtagatttagaggaatttttctttggtttattttattttttagaaaacctgatcttctctttttttgggttcattttgttctgggttttggttttcttcacaatcttgaacattttacagtagaactcatctaaaaatggatttggggatggggaaacatgcacaaaatcttttcataattaaaaagagccttactttctttacataccacatggacagaatttgtgtaaaagtgaattatctttattttaaaatgtatgtttcccctcactgtttgcagctcccaatgttgtcatttttaaatgttatatacatctcaagggttaaccagaccctttc

SEQ ID NO: 5283 - DNA, 1193 bp, Homo sapiens
aaaaaataataataatataaacactacatagatgtatggatagagattagaagataaaactaggtgttggagtactgtcattattggtcaattgtttttcagttcctttagtgatgcttctaaatgactttcataaaagtagatgtactggctccacactgggtgtgcccagcccaacactctctctctggcactggaaggacctggttgttcatggaagcgtgtcagaagaataggaattttccttaataacttatgatggagtatccatgagtttattcaagttatttttgaacacatctaattttcaatcaattcctttgtggagtgagttgagtttctcaggttggtttgctgattctccgacacagaactttctttctctgctcctaaatctacctcttttgagcctcctaacacatcgccagctatcaatcttcaaatacacccccgtggtgaatgtgcaggctactggaatgagcctggggttggaagtcagaaagtttcctttctctcctctgaggtcagttgcacgactctggtccagtccatttacctttgataagctataggttccttgcgtttcagataagagaagtaaagatggaaagaactttgcaagggaaagcctcgtactgttttctcaaagatgaagaaaggaactttaaagagcccctgactcaaattttttccaactgcctcctaagctatgttagtgttacacacatgaacaagaaccaaggctaccaagttaaaaattgaagtactctcttagagcagtactttttttgaatatttagttgatatggtttggctctgtgtccccacccaaatcttacctttaattttaatccccataatccctacaggtcaagggcagaaacaggtggaggtaattgcatcacgaaggcggttttccccaagctgtgagtctcatgagatctgatggttttattatcgtctagcatttcccctccttgtgctcattctgtcttctgccgccatgtgaagaggtgccttcctccatgattgtaagtttcctgaggctctgccagccatggggaactgtgagtccattaaatctcttttctttataaattacccagtcttgggcatttctttacagcaccatgagaacggactaatacattagcccagtgaaatacattttttaaattcccatacaagataat

SEQ ID NO: 5284 - DNA, 1175 bp, Homo sapiens
cggagccgggcccgtcctccgcgaacgcggcaacaaaggcgaggagcggcggcgggtcctggacgcggggcagtcaggctcggccacccccagagcgcagcgcagccccagctgcgagcagccgcacggatcccagagtcgcccgccgcgttcccagcccagccccggccggggtccgcccggaacagcgacgcctcaggcccggcaagtctctctcggaccctgggccgagcctcctcgccccgcccgccccaggccccggatgtgacggcaccgtcgcccgcagcgctcgccccacgggccgcgcgtggagggtcccggtaggtggcggggggagggggtcttcccgccggcccgcggcccccacgtacccaagtgaggaggctctcgcacagctccgcccgctccagcgactctacgctgaacatcttccccgccgcggccaggcagcgcctaccgcctggccagacaccgccgccgctctgtcgggggatccgggggcccgcgcagctgactcggcctcaggcccgcctgctcctcggatccggccgccgactctcgcccagcgctggcagcggctccgcaccgtcacccccagcgcccctccttctcctttcactcgggaccgcgcgccagccgcgcgcgacttcggacacgcccgccgccccgcgtccccgcccccggccgcccacaccgctcctccccagcgccgccgccctggctggagccgaggccgaggagccactgcgcacgctcgcgccccggccgacccgcgccgccgcgccgccgccgccgccgccgccgccgccgctgccgccgggcgcgcccccgccaccagttcgctgcgtgtcgaggcgagcacgcgctccgccctggaggctgcggcgacgggtcctcctccgccgtccggtcgcgccctcgcggaagctcggcagtgcgcgtgcgcccgcacccgcactccaaattagaaaggggacgtctagtgggttgcccgggaggggtggcgggagcggtcctggaaataatctgtcctctgtcgccgggaactggcgaggtagttccttcgcggtggagaggtacgtccggcgcgcggcggccacgcccaccctatcggggcccgcggagccgcggacggcggggtctggccttcttggggtagctctggccgccgaggc

SEQ ID NO: 5285 - DNA, 1276 bp, Homo sapiens
cagtaattatcaattattagaagaaaatatgggctgggcacagtgactcacacctggaatcccaacactttgggaggccaaggcaggtggatcacctgaggtcaggagttcaagaccagcctagccaacctggtgaaaccccatctctactaaaaatacaaaaaaattagctgagtttggtggtgcacacctgtagtctcagctattcgggaggctgaggtgggagaattgcttgaactcgggaggctgaggtgggagaattgcttgaacccgggaggctgaggctgcagtgagccgagattgcgccactgcactccagcttgggcgacagaatgagactccatctcagaaaaataaatatgtttatactatacttacctaatccacatgcatacacatacttctatctgatctttactgaaagtcccccaggcacattctggaaaccccagtcaaatcagttaaacacatgcacttgctgtctctcctgatcaaatgaaggtctacaaagtctcaagaagaaactacagcaaagttaattaaggaagaagatttctgtaagcaacgtcgtcttaactgtcattttctttttttttttttttaatctttgtctaacatccccatgtacaccagagattaactttcattttctaatgactaagattgtgaaagagaaaattctgggctgggtgggtggttgccaaccatttgttactttatgggtacctggatgagggttgtggtgaatgtaaccagaggcaaatccgaggagaccctgtgaatgcccagagttgcgtgagtgactggagagtgataagggatcagagcagagatttctgaagggggaaagctgacgttaaagaagacttaccgctcccttggaatacctgtcccactggtttctaattcagattccacacagtagctaaggattttttttaaaaaaagtaaatcaaagcacttcccctgcttgaaaatctttcagttaatgtatacacctggagctgatgagaggcatccaagtgcagagatttttaattaaactttttattttgaggtaattgtagattcgcatgcagttgtgaaaagtaatacagaaagatcctatgtatcctttacccagtttccactaagggtaatatcttgcagaactgtcatacaatgtaaaaaccagatcttgttatgaatgtagtcaagatataatagtttcaacaccaaaggatccttcctgccactcttcataggcatactattttcttccaccctgtcaccctcc

SEQ ID NO: 5286 - DNA, 1107 bp, Homo sapiens
tacatgctaatgtataagtaagtttggttttgatttttctttgtattagttagttcattcttctgcaaattgcatgttttcttttgattcttagctttgcctcagagagatcatcaagattattcgatatttgagtctcaatataaacaaaaagttttaaaatttaaattttaagtcagagaaattttttctaattagatgtttctattattaaatcataggggcgctaatcgtactgaaacagtcacgtcttttagaaaacgagaaagtaaagtgcctgctgatctcttaaagtaagtacccttctgccctcacccttagtgggatcacagcagccgcacagctgtgtctcttttgtaggcgggccttcgtgaggatgagtacaagccctgaggctttcctggcgctccgctcccacttcgccagctctcacgctctgatatgcatcagccactggatcctcgggattggagacagacatctgaacaactttatggtggccatggagactggcggcgtgatcgggatcgactttgggcatgcgtttggatccgctacacaggtgcacttgctgtgctctcgtgatcctgggcaaggcgagagtcatcataggactttcaacaacctccagaaatagacagtttttaaggaaaaacaacatattagttagattcgttttgtcatggtcattgaatgcagaaagggataatcacttagttcagcctcattcagtcaggtcacagaagtcatggtgatcagtgatatcatcagagccggtaattaaatgtgttcgcagatcaaaggaagactctaagaaagttttaggaagccccgtaataaaaatgtctggtcaaaaatgtgatacagatcttttctctggttaacctctgaatgttttggatcatccttctcaatctctgcggccctgtgtcctgtgcacgtgggttttgcattgagggataactcaagccgagggggttactctcgagcataggaactcacatctgtgtagctgatttcaagggaagcagagtctgtatttttactaaatgtgaacagtaactatgtgaggatgctgccatttgtgctcggtactttgagagttct

SEQ ID NO: 5287 - DNA, 1186 bp, Homo sapiens
aaaaaagaaaattttcagtgattttaaactgtttactgttatgtatttatcaccttaagttgggacatataaggagcaaaatggctcaacacagggtatgttacccattcatcaaaagataaaatttaggccagacatgatagctcactcctgtaatcccagcactttgggagcccaaggcaggtgacccaaggatcacctgagggtcaggagttcaagaccagcctggccaacatggtgaaaccccgtctctactaaaaatacaaaaattatctgggtgtggtagtgcacgcctgtagtcccagctactcaggaggctgaggcaggagaatcgcttgaacccagaaggtggaggttgcagtaagtcgagatcgtgccactgcactccatcctgggcgacagaatgagactccatctcaaaaaaaaaataagtaggccgggtgcggtggctcacgcctgtaatcctagcactttgggaggccaaggtggccagataacgagatcaggagatcgagaccatcctggctaacacagtgaaaccccgtctctactaaaaatacaaaaaattagccgggtgtagtggcaggcgcctgtagtcccagctactcaggaggctgaggcaggagaatgacgtgaacccgggaggcagagcatgccgtgagcctagatggtgccactgcactccagcctgggcaacagagtgagactccatctcaaaaaaaaaagaacaaacatttactaaggtttagaatttctgcctgtaattgctatccagcagcttcctattcctgagtctgtgacattgtctcatttttctttgtgtagatgtttctttctcagcaaaatagaggagaagcttacccctcttccagaagataatagtatgaatgtggatcaagatggagaccccagtgacaggatggaagtgcaagagcaggaagaagatatcagctccctgatcaggagttgcaagttttccatgaaaatgaagatgatagacagtgcccggaagcaggtgggtactcgtgtctgtcctccctgctgtgtcacaggattttgctaaattagcttttctctaattttagcttttctttagagtctgaaccttaaaataattggtaggtgttattttttttctctctttataagtaaacttggccgggtgcagtggctcacacctgtaatc

SEQ ID NO: 5288 - DNA, 1214 bp, Homo sapiens
tttagagtattttgtttaatttaatgtcaaaatagacttggattctactttcttttatagttcataaagtgcattttatattcaagttatttatctgatataggtatctatgaatactagaaataaagttaaaataaaaaagaaaaaacatcaaaagaaatacttagatgaaattgtgcaagaatcttggagaaaagaatatgaagaagacgacattttggcttcagatgatccatcttcaattgaacagtatgagaacaccagaacatatgaacttcaaagcaaaaaagatactgagacagaaaatcctccagttgaaaacacattatctccaaagctagaaattacagagaaatgggaaaagtattggaatgaatatggaggaggactattgtggcaaagttggcaagaaaaacatccgggtcaagcactatcttctgaaccttggaactttcctgatacaaaggaagaatgggagcaacattatagtcaactttattggtattatttggaacaatttcagtattgggaagctcagggttggacttttgatgcctcgcaaagctgtgatacagatacttacacatctaaaacagaagctgatgacaagaacgatgaaaaatgcatgaaagttgacttagtatcttttccatcttcacctattatggttgataatgatagctctggtacaagtgataaggatcatagtgaaatacttgatggaattagtaacataaaactgaattcagaggaagtaacacagagccaattagattcctgtacaagtcatgatggtcatcaacagctaagtgaagttagtagcaaaagagagtgccctgcttccggccaaagtgaaccacgtaatggaggaaccaatgaggaaagcaactcatcggggaatacaaacacagacccaccagctgagggtaagattaaccaagatttattctgccatgtaatggttagcaaaatgaattcatttagcaaaataactactaatcctttattgtagagttaaataataccaagtacatttcatataataatgaaatgatttaatccatcctgttttcatatcacaagttatccttttctattaataagaatatttgcatgcagttctcaaaagtatcattccttctcttgtactttggtggctaatgaaggaaaatgtggaatctcttgagaaatctaatataaagtgagcttggaac

SEQ ID NO: 5289 - DNA, 1243 bp, Homo sapiens
gccaagcaaactgaagaggaggtaagttacatgagacccctctcaccagagcgtgttagagtaagcatttgtatgcataagccagtggttattaaatgattgttatgttcacaacaccagtaatcatgtaagaagaggcaggatctactggtaagattctgagcctttggacctggacctgtggttaaggccgaactctgccactcacaaactctaagtacatttctttttttttttttttaagacatggtctcgctttattgctcaggctggagtacatggtatgatcatagctcactatgatcttgaactcctcagctcaattgaacttgaactcctcagctcaattgatccttctgccttgagtagctgggactacaggcatgtgccaccactcctggttaattttttaaaattttttatagagacagggtctcgctatgttgcccaggctgatctcaaacttctggcctcaagcgatccacttgccttggccttccaaagcactgggattacaggtgtgagccaccacacccggcctaagtacatttcttaatttctcatctataagattggactgatgccttttttgtgattattgggtagacaggagctagcatgtaatatatctgacacttagtagctatcaatggatcataacttttaactaataattaaattcatatcttctctctctctctctctctctcaccagttctaatgtttttcaaaagtctggatatattttatcccagatttgtattgctgaaaaagacctcaaggtcatgctctcattgtatagataggaacactgaggcaaacaggaatgagtaccttgctcagttttcttcacagcaatggcagctctaaagccagagcccagatcaactctactcgaagcagtgcaatttctgtttaccactgtgaaagttgtaagagtcaaaacagagtcacttgtgtcagacactggtaaaatgtagccagggaaggccatgaaagactctcatgcactatttgcttgataacaggaactgtcacaagaaatttttccaagccaaagcatcacacaaagacagatagctgcttatacaggaacatgtgcctgacacagtctcacaagcccaattcgaaactgcagaggcctaaccataactctcagtttacaagtttatctctgcccagaagtggcagtggttgtgccactcctgaagcagtcctttgttgtaatttgtaagttattcct

SEQ ID NO: 5290 - DNA, 1147 bp, Homo sapiens
gttcccggccagcagcctccccatacgcaggtcctgctgggccgccccgtcgcgccccccactctgaactcaagtcaccgtggagctccgccgccccgaaactttcaccgcgagcgggtgagtcctctgcgcgagcccaggggtgggcgcgggcacgcgggcagtgggtgcaggggccgcggctgtgccaccagccggagtcccgggcgcagggtagactcggggccgggggcatcggcgcggcccgcggcggcttcctggccgcaccgcctctgggctccggcggcgaaggctcttagatgtcttcagccgacgggtgaccgggcccgggggagccagggcgcggggactgaggctccgcaggtgtccgccgcggagccgcgcaggggagcggtgggaggtgcgggcgcgggggcgggctcaccgcgtgtccttcccggtgagggcccgagggccggctgctgtccctgctccggccgcttctcgcacacagtggggaagccgctgcccttgcggagcgggcgcgcggcggggatactggagaggactcctcggattgtgcaatctgatctcccctctggaccctgggtctcctggcagtgggagatggggctcggccggcgccctctcgaggcccgcggacagttgccctccctggtggccccgggcaggagcgtgacgtcgaggggctgcagcggaggctggaactcaccctcccgctgcggcgcctctcggcctgccgaggagcagtccggtgcttttgccggctgagaggaagcgagagttattttaagaattcaggggttgcctttccttcgccttgggggaagggcgtaagagtcagttcccactttcctgcattctctgggcccatggtggcatcttttgcttgcggtgcattcgtaactttccaacagcctgcctgtcatgtggattagcggttgtgtttttgtatatccgagtgtgttaattatcccaaattcgcccttcttcgccagctcagaatctaggccttgcacttttctggctgtatatttaggggaccgattattgaaattccctgtttgagtttcttcatctttgagagagcatatatacctcaggggctgtttagtacacacaaagcccctagtacgtaccaagcatt

SEQ ID NO: 5291 - DNA, 1214 bp, Homo sapiens
caggtcctttccagaaatagatgtagatacttctgctggactgggaagccaggagctgaaatatcacaacaggacgtttcaggctatgaaaaataactgcttactaattctaacgtaagttatccagattacgagaagcatttctgccaatgctcatgtcagctaagctcagagaagttacctcatcctcagagagcaacgaatggtatggtctatgtagaaagcaaaatttgcaacggaaaaaccagagttcgtgtgcactttatgaggaagagggttaggtgcaccagacagaggagtttctcaggtttccgtgtcgcctgttctctcgaccaggtggccctctcggcgcaggcggggaccccaccctgcgggacttcggctcctccgtgcggacagggggcgcccgcagccgtgcctttcccgccaactccactagtgctccagctcgcccttgtgcgaccgcctctagggcccgggatatttcctgttccggggcgtgtgggacccggatgcaagcgtgctatataagcgttgctcaagtcccacccctttctttttgaggaagacgcggtcgtaagggctgaggatttttggtccgcacgctcctgctcctgactcaccgctgttcgctctcgccgaggaacaagtcggtcaggaagcccgcgcgcaacagccatggtgaggcggcagtcggcggcgggcggcgcaacgcagggctcgggcgccggggggaccccggtttcgagttcgtgctcctgagggcagatgccggggcgtgtaggggcggaaaggcgctcctgaaatggtggggaaacgcgggaagcttccggaagctgcctttctccagaagtggcagaccatttttggcttattgttctttttcatgtatctaataataggcttttaaggataccggaaaaacacccgtggagccggaggtggcaattcaccgaattcgaatcaccctaacaagccgcaacgtaaaatccttggaaaagggtcagtgcattcgttatgcgggggggagggggaattgggcgaaaagcgacgagctttactcgttaatgttagtgtagaaggtggactgcaagaactaaagtgacaagttacttaaaaaagtaaagcgtggcttaaaattgcttttactgtcatacagctggcgatgaggaggtacctattgtgttgagtaacggtgataattttatacgcta

SEQ ID NO: 5292 - DNA, 1214 bp, Homo sapiens; identical to SEQ ID NO: 5291

SEQ ID NO: 5293 - DNA, 1336 bp, Homo sapiens
tccaggttaagagtttcgcggtgccaagatcaatttgttggcagggttgcattctgttaggaggctctacaggagaatcatttccttgtcattccaccttctacaggacatcctcattccttggcttgtgacctccttcttccatcttaaaaaccagtgctgtttcatctctatgacccttctgttaccacatctctctgacaccagtgtggagaggttctctgcaggactcatgattaaatgaggcccaccggatatccaatctaggcttatctccttgtcttgaaatccatagtaaccttaattacatctgcaaaatctcttttaccatctaaggttacatacaggtttggagattaggacattaacattttacatggaacattattcttgcctactacagttcccacccaccccccgctccactcctgtgttaaagattcagattcatcacaaataaatttacatcactcataggtgctcaaaagtcacaatccattattacagcatcaactctaaatccaaaatcttatctgagtctcaccaactcaaaagtctcaaatctcacattgaagccatctaaattaagtttgggagaggatctgtgtgtgatttctgggacataattccaactgtgcacttgtgaacctagaaaacaagttatctgttcccaagtatgatggcatgacaggcagacaataatagttacacacgttcctgttcaaaaagcagaaacagatggaaaaaggagccatcagcaccaatcaatttacaaaaccagcgaggcacccttctttaagtttcaaggcctgggagtaatcttcagctcactgctgttctctgggcttgttgactgtctcagagtcatctttactttttcacaaaaggtagcacacgtttgcagctgagtatcaacttatcagtttgttcttcttttatattctctaaagctttctgttaaaaatggtggtgcttctgctgctataacgttgtcaagaaacttgtgggtcttttacatatgtcacagggatgcactcatttagataggaggctcctcacgtatctttcctggaaaatcctgtctctgtttttggctttttctgaaatagctgagaggatctatgattcacacccttaatatcttcaaagagtcttgtgtgtgacctgatattcagaccttttgatgtttctgaagtattagcaaaaggttatacagccatatcttcatcactttctctagagtaaaggctgtcctgacggtgaatcttagttttagtggcttttgccatttgaataggccgcgaatttcccaaatcatcaagtcctggtttcttta

SEQ ID NO: 5294 - DNA, 1205 bp, Homo sapiens
tatttgcattgttctatatccataattcccagttgttttagctttagatttacacttaaatggtttagtattcctcacaagatctttgtaccaagcaattatttttaatttattcaagggttttattataggaagcagacaagaaaaaatagaacttacttcacttgtttagtaaatgaatagcaaagcaagagtaagcatcagagtaaagtttatctttgggtgcctcctggtcaacttcctaactaaccaaaatgtctttctctcaggtgctgtgacatgtatatggatgaatgaacagtgtagcagtatcatcacaggaggggaagacagacaaattatattctggaaattgcagtattaagtgccttttcctctcctgaatattaaattgaactctatttaatgcatttttaaaccaaacttttaaacggactggtgaatgtgcaatgttagtaattagaagttttaccacatggaaaatttgtggttttaaactttctaaatcatggtgacttcattgaaagccattagttgctattctcttagggcagataaaatgcggctgtgttaggaaaaacatgttacactgtaaggcagatgatcgtccccgtatgatgattgtcagaagacaggactaagtagcagagaatagctaagagataaattgggctggggaaacttgtcagaaagcactgaacaattaagaaattttccaagaaaatgtgcagtattctctgctacttctgaatctgttttgtcttcctaatctatcacaattgccacccatcgggttttgggtgtgtgttttcatagcgtggttactttctataatgctgtacccagattctaagaacctggagaaggattagcagttcttagtaagtttactgtgtataggaacggtttgtatttcattacagctattcatcttttctacattaaaaatatttttctctaaagaaagctgttttcactttatttaagtaacttaaaagactagtgtttttaagaccacaagtctagaatcatcttctagaaaaccatatttagtgatatgaatgtaattccattattttgaaattatcttcagactcaggtagataatcaaatatttttttctcttctaaatttcaaacaaggtaagctgtatagcagtagcagatttccttttatattcaacctctgaaccatggtaagtgtgt

SEQ ID NO: 5295 - DNA, 1231 bp, Homo sapiens
tccaatatacctatcttttatttattttccttaccttattgccctacgcatgtcttccaataccatgttgaataaaagaagggagggaaaaaatgtttgtcttattcttgattttggggaaagcattcagtctctcacgattaaaatgtaacgttagctgtaggatctttgtaaatgccttttatcaagttgcagacgtccttttattcctagtttgctattccttctttatctttttctgtgtctattgatatgtccttaatttttacacttttctttagatcataaattacacttactgatttttgaacaaatgttcaaaacaacctaggaacaaaacaaactaggaacaacctactttatcctaggaacaaaacaacctttgttcctaggataaactccactcagttattatgtattatcatttttatagatatgttgttggtttgattatcttttgttagcatgtttgcatctaagctcatgagtgatatttgtctgtggttttcttctcttagagtgtgtttgtctggttttctcacgagagtaatggtcacatagaatgagatgaaaaatattctagtctatggccataacaccctgaacgcgcccgatctcgtctgatctcagaagctaagcagggtcgggcctggataatacttggatggaaaaatattcccatctcttcaattctggaacttatattttcttatcttcctttctctccctcccttccttcctccctccctccctcccttccttccttcctttctctctctttctttccccttccttccttccttccttcctgcttgcttgcctgcctgcctgcctgcctgccttccttcctgcctgcctgcctgcctgcctgcctgcctgcctgcctgcctgcctgccttccttccttccttccttccttccttccttccttccttccttccttccttctctctctctctctctctctctctttctttctttctttctttctttctttctttctttctttctttctttctttctttctttctttctttttttctttctttcttccaacggagtcccgctctgttgtcaggctggagtgcagtggcacgatctcggctcactgcaacctgtttctcctgggttcaagcgattctcctgcctcagcctcccgagtaactgggactacaggcacacaccaccacgcccagctaatttttgtatttttagtagagacagggattca

SEQ ID NO: 5296 - DNA, 1156 bp, Homo sapiens
gaaggggagagaggaaagagcaggagagctggatggcccggggcatctggtcagagaggccagtctttcagagttaaagttttcagaatgagagcacgtaccagcagtgtcctcagggttggtttgctcaggtggaatggggcagaaggccacggactgacgggtgaagagacttaggccagggaggggatgggtcaccccctgaatgctgaagtcatccagggtggcagcaggaggtgatgcctgggagagattgactagtgggtcagtaagggagaaagaaggagggcgtgatagccttagaagatggtcccctcgggaggatggcttgagcacgtgggtcagagttccaccctgaagggagcaagagtgcactgaccatggaccccagtctgtctccctgggggactgcatggcgtccacttgaaaggcctgcaaaagagctgtgcccttgggcagactcgaagggttcaggtagatcaggaaatggtgggagatgttggcagaaatgcagagttgttctgttctagagggtgcagtggaagataaggagagattgagttagaagtaaaaaacaaaaaaaaaacaggtggttcagggctgagatgccaggaaaggagaacggaccaaagtggtttgcatttccagtggtggcgaaagacagcaaaggtgagaggtgagaaatgagttgttctcaaggttcctggtggactcttggtaccaggttgtgttatctgaacagctgcttgcacggttttagcagctggggtgtggagattatcatcagtacttgctttttgctggtcatcatttcttcatacacaaatttggcaaggaaggaaaagaaagagatggcataatagcagagtttatagaatttgcaagatatgaggttttgcccataaagtagagtctttatagatagaaggagctagtaatagtcgttaagagctactatatggaaaaactatatttgatgctgtagggcatccagattaagaataataatggacattaagtgaattatgatgacccaagcctgttccacagtctttgtttgatttaatcttatcttcaaccctatcatttttatcctctccagcaaacagctgaggaagcggaaggatgtagaggttaactacacttgcttaaggcc

SEQ ID NO: 5297 - DNA, 1151 bp, Homo sapiens
tactactccagaaaaagtcatttatttcatggtctatgaaaatgcaatgcacagctttttggctgtgttatgagaagcacctagtctgaacagcagtcatatcagtactctttcttgaccaaggcaaatcatctcaactggccaccttccattattatgcagtgctctttgtcattgaccacctttttgcttcctatatactactatttaaaactgtattcctttcaagctttctatccttcttctttatcaacatagtaccttgggtgtagtgaagaattaactttacccaaagaggggtctggcctttgccctcaagtacttggctgtgatctttagaccttcagaatattctgcctgatgggagtatctttgtttgcctgggggctttagccaccagacagtctaacaatgtgatttatgatggtggctttgggccacgatgtatgttttgtctccaacagggactggggactaaaggcaatagcttgacttctgaaaagggctggactgaaggtcagccacatgggcagtgtgaaggatccccagcaaaactctggacatcagtggctgggcaagcttctctggttggcggtactctgcatattgtcacacatcaactctgggagaagatcatactgttcatgtctccacaaggggaggacagctggaaactcagtgtctggacctctttccttggctgattttattgtgtatcctttcattacaataagctgtagccctgaatataacagctttcagtgggctctgagagtcattttagtgagttatcaaaactaagggcagtttgggaatcccccttactcgtacttggtatcagaagcaaggatggcaacctgtggggactggtccccctaacctacatagttggcctcaactcctgccaactctgtctctctctcaaactaaaccctagagtaccttgtaattacttacccttctttgaagaaagttatatgcctgatttcgtccttttctcatttctcatttacacttcagctaattgtgattagacttgttctcactgttccactctaaatgctctgacagagatcatgaataattgcctgtttgcagctcagtcatctatttggtaattaaacacatttttatttagtgtcaccacaagt

SEQ ID NO: 5298 - DNA, 1188 bp, Homo sapiens
tcaggtgagagcaacgtagtactccactgtgcgtgcataccatgatttactttgcagtcccagatttacggtttccaatttataaatactgccattttcaccttcaagccccgatgccaaacacagaaataccaggccacccccaccccctcgccgtgtgcctcccacattttcacacacattttcaggagcccagggcgcagcctcacaccgaacgccgcctctgccgtcccctcacttgccccgtgcccccaccgcagggctgaaggcgacggaaccgagcctttgtacccccaccagccccgttccctggcgtctcccggccgccgggctcgcccgctcaaacgtggcggaacaaccggagccgggccccgccctgctggaagacagggcggaccgggcaaggcaggcgcggggcggggcggggcggggctccggctggcggggcgcggccagcgtgcagggctgggccagcgtgcggggctcctcccctttcctccggcggcgccggcggccgcagaacttccgggtcggcgcggaggcggggcggaggcgccgcggcggctgttattgttcggctgggctcggtcgggcgctgtctccctcggctctgcgggtgtcagttcgtccggcttcctcacagcccctcactcccggcggctgacagcagcagcggcggcggcgggcggcgcctggcgtttcgaggctgagcggcaccggggttggggcgcggaggaggagcagcagcgggaggaggagccgtgtgccctggcactgagcggccgcggccatggcgtacgcctatctcttcaagtacatcataatcggcgacacaggtgagggccccgggcgcggccgggcgggtgtcggcggcctccggacccgggctgaggggcaaacggcgtctggcggtggcggggacgcggactccacccggcgcctccctcctggccgcgccgctccatttccgcagtgctggagctggtgacgtgggcactgcgagcggccgcggcctggccaggcccggtctgcggcccccgacccggccagtcttgcagctgagggccgtggcagccgtttgcgacgcccgattcaggaagtgtgtgacaggaggggaggcctagcgcagggccgccggggcccgactcacatgactgcaccccacccccagggccccttgcgttaggt

SEQ ID NO: 5299 - DNA, 1196 bp, Homo sapiens
tcatttaaagttgttacctggaattctatgtcaattcccaggaaaaggccatagagtagccttttctttgacctgaggataattgaagaggcaaatatattagtaataattatgaattcatttattcattcatcaaatatttattgagtgcttcctttagctagacatggccctaggtgactgggaatatataatggataaaatatataagcttcctgtcctgatgtgtaacatcctaatgagaggaaacctgtcccccaccacatatacttaggcagattagcacttggccagaggaagaaaatagctgtggagtggacaatggtgtcttcagcggccgaaaggaggggcaggggaagccccagcagcaggagcaggtgtgtggcagcccttcacaaggggctttcatgtctcagttgtatgttgccagtgtcactttgttcattgtcatagttgagggagaagacttgcaacaagaagatggacccacaggagaaccacaacaagaggatgatgagtttcttatggcgactgatgtagatgatagatttgagaccctggaacctgaagtatctcatgaaggtagaacacttttttttcaagttttaggataaaatataatcaatgacttctaattactgaagtttttcttaaacccctttaaaactgatatttaacttttgcttagatttttaaaagttgaagcttaaagcttcaattaaagcaaattttttcttaaaatagataccttgattttggttcaaagcacttttcagggaaactcagaatatacaaatttcttataaatagtgagtcaaatacttgaggaaactagttttactatattcttctgcttagggtgctatttgttaaataaaattcaaacaactgatgaaatattggacttgataatctatcacaggctcatgttcacacatgaactctgtaattacagtgagcaaaacacaattcttagcttctgtaccaggcattggcaaacttttttttgtaaatagccagagagtaaatatttcaggttttctggatcgtacagactctgttcagctactcaactctgccatcacagcgtaaaagcagcctttgatagttcctaagtgggtcagtgtagctgtgtttttatacaacttatttgtaaaatcctacccaacatggctggtaagtgcagcggcttgaac

SEQ ID NO: 5300 - DNA, 1136 bp, Homo sapiens
tccattatttcagagtaaattaaaggtagccagaaacgctgtcagactttggcatgatgaaaggcaagtgaaagttaaaggaaagacacaatagtttcaattactttgaatctcataatgtcaaagttatgataccctttgttgcttaacaagtagaattggttttaagccctttatactcaagttcttcttgatgaaacaaaaatatgagaaattgcttcttcatgggacatagaaggctttgtaaaatacagtgtagttttctgtagttttatatgaggttctgctttctactattttacagttgctgtgctccaccttcataccttcgcctatgttagaacttctgagaagctgaagcatcacatataaaaaggtctgaagaataatatcacttgggttaacatgggtcagttgtctttggattgctttgtatatctatctatctatctatctatctatctatctatctatctatctatctatctatctatctatctatctgtctatccatccatccatccatccatccaatctatctatctatctgtctgtctgtctgtctgtctgtctgtctgtctgcctgtctgtctgtctgtctgtctatctatctatctatctatctatctatctatctatctatctatctgaatgtcttttttcttcaatcaggtgatagttgtattctacttttggtttagtcattagagttaacaagcttccagaaaaatcagcatctcatgatgtctcttcaagagtgtcagtgaagctggcttctgaatgtattctgttaactttattgcacaaaccaaggagctcatagtctcatactcctattggatagcctgaaggatgcttgtatttgatcaaagtattgctgtgtgtttattcattcatttatttatttattctctacgcagtgaccaaaatggaggaagcagcaaaatatctatcctgtttagagcctagcatttcgtgtctaaaaccagtgattttccaagaaaaatctatccaattccactcaattactttttactgagcacctacaaagtaataaacccgatgctagataccatcaaatccttgaagtctagggagtgtgactgtcttagtctgttggtgctgccataagaaaa

SEQ ID NO: 5301 - DNA, 1237 bp, Homo sapiens
ttcccttcaccccgcgggagttggaccggtggcgctggtaaggcctcccgggctcaaagtgcaacggacactgcagaaatccaaactgctggcattcgcggtttggggacgccagaggaggtaatgatttctggtttgttaacctcaagtgacaataatgccgagccaggcaggagctggacctacaatcttctgatgcgtggtcagacacgttatcccttgcgccactggcctaccacgctactccttcagtcgccgttggattactgtgtgttgagaacacactcggcaaccactttaaaggacaacgcaggctggtaaaggaaaagtacgacaagggggggcggtggaatcgcagggtcttggcatcgcggaccccagacacctgggttgagggcctttcccgggtcagtcaggctagcgagccggagcgttctgtctttctgcgcacgcgtagagcacacaggccggctctggggctctgcgctcctcggattacgcatgctcagtgcaatcttcggttgcctggactagcgctccggtttttctgtgctgaacctcaggggacgccgacacacgtacacgtcccttcgatagctcagctggtagagcggaggactgtagctacttcctcagcaggagacatccttaggtcgctggttcgattccggctcgaaggagacaagtgcggtttttttctccagctcccgatgacttatggcactttccttgggtgccttcagtgacacattgcattccaacgagcagtttgaaagtctagcgctttctccccattttgggcctcccagcctgcacggtaattctttttagccattcgccctgcgggaacgtgtccgggcaggttcccagcgcagctgtgggtctgcgcttggccgagcgactgccgggtcacgacttctgcgtcttcttaacccgtctttggcattgcccgggccccgagtcacacaggaggcagcgccggctccagggggccaggcggggaccttctcctcagagccccgggcagcttctgcgacccgagggctcgcaacggctgccgtgaggaggtggggggtccgcgggaagaggtatctggcgctcccggaacctgggaatcagaaagagagaacacaatactaaaaacacgaagcctaaaaatgacacaatgttatggagacaaggcggcacccgggaagctgtgcccgctcccttcgatagctcagctggtagagcggag

SEQ ID NO: 5302 - DNA, 1212 bp, Homo sapiens
actcactatgaccattatgtcttaaaatcaaaactgccacagtgaaggatatcatgaaatgtttccaccattttcctgccagtgctaatggctcctgtttccagtttggaataagctcatttgtggaaatactaggtactaatgagacaaacatactcagttacagaggtttgggtttgtcagtactgactatcaaaaaagcagaaacaggtaatagaataatagtacttttttattaaaaagtggtttgggagtctgaaaggtaggttgcaagtacagttcctaaaggaatgagattctcttcttggaccattcctacatataagatgcccaacaaaatgcaaataaaaatgggaattcgaaatgtaatatttaatttccaggtgcaagaaagcctttgaggtgaaggtgtatgaaagtcatcataacagatgttttccaaaaacttgtagaaggttgtgaaaaaactactaggatcacgcggcatgtattgaggtacctaaatttaattaatgttagttatgtgatgtattcttgacagataggtttaatagctggcacaatgatgacttaaattactttttgccgtttacccagctgaggttgtctttgaagaaataattttaagactgagatgccagtactgtacattgattaattactgacatgtatgtaaggcaataatttaattaagggtgaatattctttgtttttagcatataggttgctgtagatgaatgttcttagctgtcatgtttaaaaatacttctgcttcgttacctcaagtaagtgatttgtcaagcaactatgtctgctgacagttcagaaagtatctgataaacttaagggtgggggcagattcttgttgaagttgcttttgcatgtgtggtattctcaacattagttttttgaggggcacttgtgaatattgaggttatatgagaactttgagtatggaatgattttcactgtggtttctgactttgttttggaggtgtggcatgcagcattttggaaggaaaattgaagacgtgttcaagaaaacatgaacagaagcaaatgatgaaaatgagcattttacttgatgttgataacatcacaataaattatggagaaaaatacatatttggctaacttttaattgctgaacaataaagtgttttcttttaaatcaactctaaatagctccattctcatagtcactagtcagac

SEQ ID NO: 5303 - DNA, 1212 bp, Homo sapiens; identical to SEQ ID NO: 5302

SEQ ID NO: 5304 - DNA, 1138 bp, Homo sapiens
aaaaagtaggcctgtgcaagagtgtccctactctgtgtgtagaacatctgtaccaccttgcggccataagaccctgtaccagagtcatcttgaaacatgggctacaatcaagtaaaaataatggtatgcaatggcagaggcaggcgagtcaagagaggaggaaaggtgtgaagctattttcagatcccccatttagaaagaagaggccagttccaccagtgtccagtcctgctatagtgtgtggttatagggacacacaggagagactgcctcaaagaggagacctgactttagaaccagaccagaacaactaaagctgccagtgctgagccacactcggtctgagagatccagagagcagccacacctggtgtaatgaagactgggcccaggtggtcttgttttcctctccagccagccagtgccagagactggacactggacaatgtctagggtgatggtggtagtggagatggcttaacagaagacagaaaacttgccataagcaatgactactggtctctcctcttcccctaacctatgtgagcccacccagacttgtggctactctagggatacacactttgcttacattagcacattccttttctttgttgacaggaaatagagcttcttgcaggaatggacagtatggttcagtggtgggaggtaagagcttatttttctttcttttttttttttttttgagaacggagtctcgctctgttgcccaggctggagtgcagtggctcgatctcggctcactgcaagctctgcctcccgggttcatgccattctcctgcctcagcctcccattatttttcaagatagaggtttaatcaaacttgaggaagggggaaaggggaggtaagaagaggttgaagaagaaatagatcgtaccaaaagacttagcttctacttcttaataggcgatgagttggggacttttttttttttttttttttttttttttttgagaaacagttttactcttgtcacccaggctgaagtgcagtggcacaatctggactcactgcaacctctgcctcccaggttaaagtgattctcctgcctcagcctcctgagtactgggattacaggctcgcaccaccaaacctggctaatttttgtattatta

SEQ ID NO: 5305 - DNA, 1213 bp, Homo sapiens
ctttctttcctgctttaaaacttttaaataaactttcgctcctgctgtaaaaattgccttcatctctcactctgacttatgctctgcggatgaattctttcttctgactagggaagaattgagttgctgcagactcatatggattcaccactgctaacatactttggtgctgtgacttggataaaactgtatgggatgggttttgtgagagcaccagctatactgagggaaactttggagggaaccagctactagatgattcaattagtctttcatccctatatccaggttggacaatcgatttgcccatcaggaccattgcggacctccaccagtttcctctggcttcatcttgcccaggcatagttcacaatctttcatttcctaacacctgtgctcatgctccacctccccagcgtggcaggagatacagaccagtggtagactggtggtattccctcagtagagtggagagtccttgggaacccaccgtgggtgatgagtgctccagtcttcaccttcattgcaccatggtccatggcagtcctgatgtgcaaattaggtgtccaacctgggtataggaaaaaagactaatcaaaccatctggtagctggttccctccaaagtttcccttaggatacctggtgctctcacaaacccatcccatgcagtatcccagtcatggtgaacctgacccaattgtcccatagacagttcttcttgataaacataggaattgacacttttggtcttaaaacttaaaacttatatttgttttatctgagttccttcctcaggaaacaactttcaggcctctcaaaaaaaaaatatcaaggaactaaaattcaccagattaccacatccagacaatcagatgccaggacctatcattcaacattattgcttccttgcccctccctagttcctgttctcttacattgttacatttcttcccttctatataaacccctagttttagtgggtcagggagatggatttagactgagctcccatctcctcagctgcagcacctgattaaagccttcttccttgtcaatagttgtcatcttagggcttggctttctgtgtggcaagtagcaggacctagaccgaacccctggtgttttggtaacaacagcaccaaagtatgtaagcagggatgaatccatatttgtctgcagtaacttgatttttgccttttcagaggaaagaa

SEQ ID NO: 5306 - DNA, 1200 bp, Homo sapiens
taaaatcttgagcatttatataatctaaaacctagaaactccatttctaggtaaatgccttagagaaataagtatcatatagcatgaaatatgaacaacccttgttagtatgttcatggatagggaaatggataaattgtgaaatttttttatgcagtagaaacctgaatgcctttcaactacatacaggcgatggataaaatcagtgatgtacaaatacatcccctgtatgtagttgaaaggcattcagatttctactgtgtaaatgtacaacaattgttttcctgaaaaaaggaagccctgatttgtagagattgaagatttccgtggtgtgaatactcccaccgtggctgatttcaagcagccaaactgaaatggcagttggttctcccactctggtatagcaagttgcagctcaccattaaatgagtcttaaaagcctaatgcttcttaaacaaaagcaagtcacagaatgccatttttataaagctccaaaaagcaaatctaaataatatgttctttaggaaaacataagtgacaaaactatatttaaagacaggagttgtctcccacacgggctagcggttaggattcctggtttttcacccaggcggggcccgggttcgacctgcggtggcaggtgcctgtagtcccagctactcgggaggctgaggcaggagaatggcatgaacccggaaggaggagcttgcagtgagccaatttcgtgccactgccctacagcctgggcgacagagcgagactctgtctcaaaaaaaaaaaaaaatgacaaacacaaaatattggttattctcaaggtaagaggaggctgggtgatgggataaggaaggagcccacggatatatgaaggttattgaaaatgccctaattattaagtggtgggtttggggtgtttattttgtctttgtaatttgtaatttaaatagatcatatatactaatagatgtgatatattttacatgttatatttatataaatgttttacagatgttgcatttttataagtcaaatattaggtaataaatattaaaaaaactgctaagggaacataaaccaatgttaatgtagcataatagaaagaaatgaccatagttaatgcatactcaaatctattataatggtgatgacatggcatgttcttatgatcgacctttaaccctgacaatgaacattaagtaatgt

SEQ ID NO: 5307 - DNA, 1396 bp, Homo sapiens
tatctttcatttatcaattgtcatctttttgaacttaaagcaaaatctattatattatctgggtttgtgacttgagctactgagctgaaacttctccaggggtgattcttgagctaccaaatgaccaggaagagttttctcagttttctgctcttggccgagactgttggacaggatgattcactcagttccacccagctccgaaatatttccctaaagtatcttctctgaatatagctttattgccccatcgtattcagactatagaaattaaataaatacagtctgttaattcagacctttgccacatgcacaactcagcttcctcttcaccacacttgattttaccgtaggacaacatggtgtctttagatagttgaccagccctcccagttgactggcatttctggccatgtcattcctaaatccttcaattatatcattcaaaccattcatctccttgcctgtgtctcatgggtagcttaatctacttaagagttttttctccattgtttaaatattttagcaccattccacaaaggcccgcggcgggtgttgacgcgatgtgatttctgcccagtgctctgaatgtcaaattgaagaaattcaatgaagcacaggtaaatggtgggagtaactatgactctcttaaggtagccaaatgcctcgtcatctaattagtgacgcgcatgaatggatgaacgagattcccactgtccctacctactatccagcgaaaccacagccaagggaacgggcttggcggaatcagcggggaaagaagaccctgttgagcttgactctagtctggcatggtgaagagacatgagaggtgtagaataagtgggaggcccctggcgcccccccgtacccgcaaaggggcggggcggggtccaccggccttgctgaaataaaagaggatacaaacaaatggaagaacattccatgctcatgagtaggaagaatcaatatcgtgaaaatggccatactgcccaaggtaatttatagattcaatgccatccccatcaagctaccaatgactttcttcacagaattggaaaaaactactttaaagttcatatagaaccaaaaaagagcccgcatcaccaagtcaatcctaagccaaaagaacaaagctggaggcatcacactacctgacttcaaactatactacaagcctacagtaaccaaaacagcatggtactggtaccaaaacagagatatagatcaatggaacagaacagagccctcagaaataacgccgcatatctacaactatctgatctttgacaaacctgacaaaaacaagcaatggggaaaggattccctatttaataaatggtgctgggaaaactggctagccatatgtagaaagctgaaactggatcccttcctt

SEQ ID NO: 5308 - DNA, 1198 bp, Homo sapiens
gatttgggactgcacttttagaccctttcacctaaccttccttcacggtctttccgctcttctagcctcccctcgattcctccctactttcaggcgattggcaggttaaggagctaattgttaagaggttttagatgctgaactaaggaaggtctgttacgcaaaagatagaacccttgtaggaaaagcctggggcccttcaacatgggtggaaatatctggatggatacttctgaagctattgactgaagctccctgagccttctcggcttgtagagaaggcccatccttccctaccgcgagctatcggcttaacagctacaatcaaaaaagataagaatgggcagtttgaatcgcggtgggacgaaggagtctcgccatgggtctgattagccctttctctgccttgcttgagcttcagcagaattcgaaatgactggcggtaaggctgggaaggactccggaaaggccaagacaaaggcggtttcccgctgccagagagccggcttgcagttcccagttgggcgtattcatctacacctgaaatctaggacgaccaatcatggacgtgtgggcgcgactgccgctgtgtacagcgcagccatcctgaagtacctcaccgcagaggtacttgaactggcaggaaatgcatccaaagacttaaaggtaaagcgtagtaccactggtcacttgcaacttgctatccgtggagatgaagaattggattctctcatcaaggctacgattgctggtggtggtgtcattccacacatccacaaatctctgactgggaagaaaggacaacagaagactgtctaaaggctgcctggattccttgatatctcaggactctaaatactctgccagctgtccagtgttgcggattccagtggactgcatctctgtaaaaaacacaattttgcctttttgaaattctatgtgagcaatctggaagtttaattagctttccaaccaaccaaatttctgcattccagtcttaaccatatttaagtattactgtggcttcaaagaagctattgattctgaagtagtgggttttgattgagtggactgtttttgaaaaactgtttggattttaattgtgatgcagaagttagagtaacaaacatttggttttgtacagacattatttccactctggtggataagctcaataaaggtcatattacaaacctaa

SEQ ID NO: 5309 - DNA, 1221 bp, Homo sapiens
tatagccctttttgatatgtttattaataatgattcttaatggggctcataataagtttaatatgcacagcatcttagaaaagtttaacctgcaaacacttttaaaacataatgcctacttgatttatatctataaaaagactgacaggtaattatatttggaaaacatttaatgcactaactttaaagaaattgaaaattcaggtggataaatagtcttacaaaagacaatgtgctttatgttatacctatagctttggtcccatctttaattgagaaacatttatctgtataaaacatatttttggataaatatatatatatatatttgtatctctacagaaaggctctaaaaagcatttgaggaaaatatttggttcccttttctataatcatcctttaagattcttatagctacatttggtttattcatcatatttacagtatatatattgttcttttcagtgttcacatcttgttccccatttctcacttgtgtcaccagctgtttgtgccatttttagtgtaaaagttgcagacctattagatctgcagtttaagttgccatgctgctaggaaattgtcctttttctttctagctgttaacctacttcctggaaaaagtagtagctctctgtagcattatggagtttcagtggaaccaaatttttgccattaaaaactggcattatactgaactatacattgagaaatcaatcaaaataaaaatttttactttcacaagttgtatcctggatgtttctgtcattgttggtgtttaggctattttggtatataacctcattaaaatgtaccatatttaaaacacttcatagacattcagaataacccttttcaaaattgtgttctgcaaataaacagatttgttccacagaatattggtgaggactactggggggatagatggtcataaccaaataaatctgggaatcactggattaaactaacctaaaggtgtctctttattatgggaccgttcagtccttaatatgcaaacgtgtttcctggtgcaccaagaatgttggatataatatgcagtgtttcccaccttatttgcctgtagaattttctgttcactgaattactatagcactttgttttctgcagcatacactgtgtttaggcaaagaaaaaaaaaagcccttgacatgtcattaccaagggctaatatatacacagaagcacatatacacacaagta

SEQ ID NO: 5310 - DNA, 1176 bp, Homo sapiens
gtttctctaactcttcctcctttagttctcaattttgtttgtgatgttctcattagcattattattatttgtaaatatataacacttccagtctgtcttataagtgtaattccaacagttactttgtcttaatttaagtggtttcaatgtcaagcatgaataatttacacaagcttctctatttctgagtttattttaattcactttcgatttatgattagctaggtgttattgtcaagtgggttttccaagagtgactcctaggtgttatagcctcagagttcttgcatatttgaaaatgtcagtttcctgtgtagttgaatgacaacttgcctgagtacaaaatgtggatcacactaaagactctgagccacagtctcctggcatttgaatattggtcatgtttctttattacggtttctttgttcttaagtatggttgttattgcaaaggattttctaagtttctttgtttgctttttaaaacatatcaagaatgagataacattttacatgggagagatctgtgccaaacagaaagagaaaggggacaggccaagcctttatgcctgagaaattgtgggggaaaatagagggacagatgaagtgagtcggtagggtgctggggtctctctcttcacacccattcttttttcaagacaacactttttgcagaggttggggcttggcctttaacaacaaccagatgggtatcagggtgcctactaaaactgggccaggtaacttggttccctgaacataataggggagattgcaagcctctagaaaaagctccatgtggccacttctaacattgcacaggagccaaggtgaggagctgtcagaggcagacaagtggatgggtgagcctgaagcacgttagtagttctcatgggccccagagagggtacaagagagaaatagaataaagtaggcagagaatttgaggccagtaggaaatgaatggacccctgagctccagaaagtgaacaaaacattgctcccataatgccggatgggagtatcctaatgggcgctgggtcacaggaccctatcagaccatctgtggatacccagaggacacaaaagggaatctgaggaccctacactgctgctaatattatgttatgcagaacacacattcacacacacacacacacacacacacacacacaca

SEQ ID NO: 5311 - DNA, 1219 bp, Homo sapiens
gctccatgatgcagtccattgccaatgagcacttggaagagccctaaccagtgtcacaccagtgatgaccatctccaatatggaatgatgcaaaatcctagatcctatctccaacctaagaaccctgtaccatggaggcagacattcatccccaggagatggcattttatggcctaagtatatatactaggtctgtaccgcttgtcattttacaggctccttacagaccatatattctgtggttggaatcccttggcatcagctgctcctgtactcttcacatgagcagttatgagatggcagtagtgcattttatgctcgcaagtgcatcattttttttaatatatcacagccccaatcctgccttagctaggcatagtaacaaagctgctgtcttcctgtactgctaaaggcagacccagagacagtattatatatagttcacttttattcacttggcttagctcttagtgttgtcagagctaccgggctcctatttcaaagtaacttatgggtggctgtgttcttctggagcttcagaggggcacaggactgctctaaatgctatcagctaaagtgcctggtgacctcacaactaaactgaattatgttctgatgcttttttccagtctttaagtactcatgaattaaaccacacctactttaggatgaaacttcaaatggaaacatcagtgattctcctacctttaccaattttagatagtgatccttcagtatctaaatttcttcattagtaaatgacagatggtattggtgagtcttcacaactgtggtcattgatatttaacacatattctgtacaatatattacaggttacagaatggtatgttaggccacctgccactgaaatgtcaattgatgatctttttctcttcagtttttcattagtgttgtcacaagaatatttcaccttcattttaaaacatggatgaaagattcaccatgttgagttggggagtgttttgggagtgtgaatcaactgtgtttttactattgttctatgtatattcaagtttaataaatgtcaagatacatatatacatatatgctgatacaggtatatcagaaatactatatatacttaaatatataatatcttcaaatatatacattttatttattaatgctgtttgaattatattttgctttgtgtatttgcatttttacttactgatatttagtgcttaacattttata

SEQ ID NO: 5312 - DNA, 1109 bp, Homo sapiens
attctgtcaccacaaagctcttccttatgttgtcccttaactactcttctcttcacctctgctaccctactatctctagcccttggcaaccatgaatgtgttctccatctctatgcttttgtcatttcaagaatattacataaatggaatcatagtatgtgactttttgaatagtattctatgtttttgagtagtgttctgtgtaccacagtttgttgaacccttcacctattgagggatgttttgtttttcttcagtttttagctatacatataaagctgctgtgaatatctatgtatgggttttgtatggacataaatgtttatttctttgggataaatacacaggagtgtgatacctcagttgtgtagtaaatatatgtttagtgttctaggaaactgctacactattttccagagttgctgaactgtctggcatcacaatcaggaatgtatgagagattcagtttcttctcatcctccacagcatttgtggttgtcactatttttattttggtcattctgatgtgtagttatatatcattatggctttaatttgacatttccataatggttagggatgttgaacatcttttcgtgtgtgtgtgtgtgtgtgtgtgtgtgtgtgtgtgtctggctgtgtgtctttggtgaaatatctctgtcttatgcacattttctataaaattgttttttttttactgttgagttttgagagttttgtatatattttagatataaatcctttgttagatatgtggtttgcaaatcttttctccctgttcatagtttgtctttccatcctcttaacatagtttttcatagagcagaagttttttattttgatgaagtccagtttatcagttttttttgtgagtgtgctttgggtatcaagtctaaatctcctcaccaaatctagatccccaaaggtgttctcctaggttttcttttaaaggttttatggtttacatttaaatgtacattttgaattagcttctttttatcaggtgtcatgtttaggtcaaaggtttttgtttcggttttttgcctgtggttatccagttgttcagcaccatttgttggatagctctccttcctccattgaattgc

SEQ ID NO: 5313 - DNA, 1366 bp, Homo sapiens
gaagacgccgcagtaaatcatcaaaagtccttctgttatttcggtcagcctttgattgacccacaagagacagtgcttcgtgtcccagtcagcaaatatcagtgtcttgcctgtgatgtggctatcagtgggaatgaagcacttagccaacacctccagtcaagcttgcacaaagagaaaacaatcaaacaagcaatgagaaatgccaaagagcatgttagattattacctcactcagtctgctcccctaatcctaacaccacatctacctcgcagtctgcagcttcttctaataacacctatcctcatctttcttgcttctccatgaagtcctggcctaatatccttttccaagcgtctgccaggagagctgcttctcccccttcttctcctccttccctttccttgccttcaacggttacctcaagtttgtgcagcacctcaggggttcaaacctcactacccacagaaagttgttcagatgagtctgacagtgagctgagccagaagctagaagacttagataattctttggaagtgaaggctaagcctgcttctggcctagatggtaatttcaatagcatccgaatggatatgttcagtgtgtaggagtgaagacaggatcccgtgcttaaaaaaataaaaaataaaaaaataaaaaaaaaataagactttaactgcagttccaaagcttctctaacccaaaaattacagtaccaaatgattgactcaggattgtttttcccatattgatatgctggcaatataggatggtatgtaatggacagaactgatgcagatggttgaatgcgcttgtactatatgctaaaatatggaaaaggaaaaaaaaatctcacaagttcttttggaacttgtttcaagccaaaaactctcaagaaagcaaattgcacctcagctggattgatttccaaatgctagcatgtactgtatgggaggatgatccagatgtttcaaagagaatttctcttagtttagttaggtgtaattcagtagctttaaattctcaggtcagaacataacatttctcatttgttaaaagcagcaagaagcctggtaaaactgtgacttttccccaaacgtcaatctttattagaaagcattttctaggtgtgtttagtgtacaaagagactttataacccttactggacaacacacagatccttgagctcacgctgcaggatagtacagttttaccgcagagggaatctggaacagtggaatcatgtgtctgccctgtgtattgcagtttgtattgccacaagctatatttataccagtgtcacccttttcttgtagaatatactaataatctgtgccaactctaccttctcacttttacctctg

SEQ ID NO: 5314 - DNA, 1177 bp, Homo sapiens
atccggaggcgcctgctttgcgagcgccccctagcggcagcctcggaccggtgctccctgtggtcacctccgcctccaaactgtcgccgcctctgctctcctcagtggcctccctgtcggccttccccttctctttcggctccttccacttactgtctcccaatgcactgagcccttcagcacccacgcaggctgcaaaccttggcaagccctatagaccttgggggacggagatcggagctttttaaagaactgatgtagaatgagggaggggaaagtttaaaatcccagctgggctggactgttgccaacatcaccttaaagtcgtcagtaaaagtaaaaaggaaaaaggtacactttcagataattttttttttaaagactaaaggtttgttggtttacttttatcttttttaatgtttttttcatcatgtcatgtattagcagtttttaaaaactagttgttaaattttgttcaagacattaaattgaaatagtgagtataagccaacactttgtgataggtttgtactgtgcctaatttactttgtaaaccagaatgattccgtttttgcctcaaaatttggggaatcttaacatttagtatttttggtctgtttttctccttgtatagttatggtctgtttttagaattaattttccaaaccactatgcttaatgttaacatgattctgtttgttaatattttgacagattaaggtgttgtataaataatattcttttggggggaggggaactatattgaattttatatttctgagcaaagcgttgacaaatcagatgatcagctttatccaagaaagaagactagtaaattgtctgcctcctatagcagaaaggtgaatgtacaaactgttggtggccctgaatccatctgaccagctgctggtatctgccaggactggcagttctgatttagttaggagagagccgctgataggttaggtctcatttggagtgttggtggaaaggaaactgaaggtaattgaatagaatacgcctgcatttaccagccccagcaacacaaagaatttttaatcacacggatctcaaattcacaaatgttaacatggataagtgatcatggtgtgcgagtggtcaattgagtagtacagtggaaactgttaaatgcataacctaattttcctgggactgc

SEQ ID NO: 5315 - DNA, 1159 bp, Homo sapiens
gctactcgggaggctgaggcaggagaatcacttgaacctgggaggtcgaggctgcagtgagcccagatcacaccattatactccagcctgagcgacagagcgagactccatctcaaaaaaaaaaggaaaagagaattacctccattagttattgctcattctttcattatatcccatatttcatactaaatagttcatctttccaggtatttctgtccttcacatgtttacagcctgatgtcatatccctcaaagtcatcaagtaactcagttccacctacttagctcctttaagtctttcttcatatatcagatcctttcattcctctgcacataagaacttatactcacatatattccctccattctatttcacagctctttagtggcagtggcccagtgtgtacaatctgttccatgtgtccagactcggcaggaaatggggagtgggagaacagacaatgaaattctgtaggtcaaacagaaggctaggatggatgccattattgtattgggcttggagtgagaggaccaggtttgcagcctatctgtgctcagctgcatgacttgggacaagccacttgaccttttgaaccttggtatcttcagttataatacaggaatgatttttagcccataaggggctcaagtctatcttatattcttccttcatcccctctcctttattccctaaggagaatgagggctgacatggatgaatcaagggcttgttcctgggccaactggtgagtagtatggtctcaccctctaaagaattataatctctttgaattgcaaatccctcatggctagtaactcaggatgggtcctgggctactccagcctaggagctattctgctctgatgaagtaaaataagccaggcctgctataggcttagaaagaatctccttttcctctcctttgctgatctcatattttcttgaaccagcctctccttggactcggggcttaaaaacagagggttgagaattaagtaaagcttggtggcaggcaagtaaagcttggggcctacttaccacattgctgcctctgctgtgtcacgaggagccctacaagcagtccagcctggctcccgggcatgcccccgggttcaggggcaaaagactttgccttggctttagcacatgtctctgggg

SEQ ID NO: 5316 - DNA, 1224 bp, Homo sapiens
gaactcctgagctcaagcagtctttccacctcggcctcctaaagtgctgggattatacgcatgagccactgctcccggccaatgataaattattatctattcactcaagatagacagaaaaatagaatgtacttgaaatttttagtaaaatatcttacttattaaagagtttaccattatgaggtgatatgttgttttccttctatgaataaaagtaaaaatcagaataaaaatatacaaaaataaattttaaaaatatacaaaatgaacagatttcaagtgagataataaaggttgaaatggacattatgagataattgtttcttttgtttacttagtaatgtgataagacagtctatagtactgcggacagctggcaatttaagatagcctttgacattttcagcagctatctaattttcattagctgcttgttagaaaatgtaaaaaaaaaaacaaaacagaaatacaaaccaaaaccaagcagcacagaagagtacaaagtgaaaaacaaaaccattgctatctacttccctgatttttgagtcctatttttgagagagaaccactataatgttttagtatttacctttatattttttattatgtatctctgtgtgtgtgtgtgtgtgtgtgtgtgtgtgtgtgtgtgtgtgtgtgtgtgtttatttagaaatcacaagtgggacctgtatttgtcaggttctagattataggataattcctgtaaaaatctcaaagtttctgtttctttgcataataaaatttgaacacttgctggtctgatttgcagtgtctttatttgggtttttcttcttggcagtgctccattaaatggaaactcaggaacccaggatctgtccacatggtggctttactcccacctgtttggatgtgaaaaacagaattcgaattatagaattagagaaaaagaaccaagagctctatagccaggctgccatctttaccttttgagtttgtaagtaattagatttgtgaagatatgaacatcctgtcaattttttgtcattctgtcagtttcactctatagttaacattcatgcatttatacaatgattgtcaaattatcaaaatatacatgaacgtgaacgaagtgaagttataatacacaggaggatgataatccatcaaaaatattcaggccatcagtttggatgagagagctggagagtgttgaaatgtttcaagttgtatcaaaagatt

SEQ ID NO: 5317 - DNA, 1198 bp, Homo sapiens
gaggaaaagcataactaaatccatttctgtcaatttatcctttgcttcccacctccaaccaccctcccttccaggctatgttattcacccaacaccatttcaagtacccttcttagatttttttcaaagtgtttattatctctttcatatccacacccactttgtttcaacaatttatcaaagagtcattttgtggagggagatgacagcctttcctagttcacagtcttggcaaaaaatcaatgtgattctctttttcctctcttctgtatttcctcaatattctgttttaattctattcatctacctccctctaaatttaccagtgcacttgaactttattactatagtggtttccagccaagaataattggtgacaagtccttcaataaaaaaaggtctttcgtacagaccatgacttaagcagaaggtagatgataaggtataagtctagatagaagacacactaccaaggaattaacatctggacattaagaatataatttgcctttaggcaatgagtaaacttgtaagaattgtttaatgaaaaatgactggttcgtttcaccttttacatccatatctctggactatatgaagaatgacttgagaggggtagtattcaaagcaaagagatcagttaagttgatttgtggtaaaaccggagttatagcatacaagagatgagagaatgactttaattaatattccgtaagttcatgaggattagttaatgatcagatatgaaatatgaggtagattgaagaacaaagaagagctttcatgtttctagtttggatattaagatggttgtcatttgaatggagaacatcagggagaaaaaaatagttggtacagagcattttgggcttaataactgtgggacatacaggcggaagtctgaggcttgtaagagagaaaaaaattcagttcaattattgttctaaaaggccatatattggtgatcttgctatctcatcagatttttgttacctaatcttactatcttaaatttattgtctatattttgtgttaaaatagataagaagagattaaatattccaatcctaaattaaaggcaatgaaacaataatgttttatagttctataattaaacaccattgtatatggtccaagatcaagctaatttaaattcaattgtctttcataataggcatagagtgggaagattctactt

SEQ ID NO: 5318 - DNA, 1102 bp, Homo sapiens
catttctactgggaacctgtaggtactgaatcagccttagtgacagaggagcagctttgctgcttgaataaagcctggaaccacataaggggataagactggtgggaaccagccagggatgtgcattttaaggccagggcagtagtggaggacacccagagccaacagaaacaaatctgaatggggactggcaaatacagggtcgacctagctgggccaaatgattgtgagacccagttataaggggaaggggtttggcgagataccaggacaggtctagggactcttaccaaaatacacaggctggtcggagaaagagctgaagtcagatccaattctagactggtgagctgaaagtgctgctgggacagggagccatgatcaagttccagaggggttgaactaccagaggggcaggagctagggttgtgggagaaaaataaagccaacgtcttcagaagaatcagcggtatcactgtggaggcaggttgcttgatgaggcctgtggacccatgctgtaattcaggactcagaattcctgcacagccatctggaatgaccactccagacagacctggattgttatgatctgcagaaggctaggtatctttcctatggtctcagaggttagattttattagtctctgctatttgacttgaccagagattctcttcagcctcatgtggttttagctataatgatctggtctaatgaaacatgagtaatagtacgttgtaaacatttgtctccttcccatatctgtacttaaaaaaaaaacaaaaacctcaaaatggccgggtgcagtggctcccgcctgtaattccagcactttaggaggctgaggagggcggatcatgaggtcaagagatcaagaccatcctggccaacatggtgaaaccccatctctactaaaaatacaaaaattagctgggtgcggtggcacgtgcctgtagtcccagctacttaggaggctgaggcaggagaattgcttgaacctgggaggtggaggttgcagtgagccgagattctgccattgcactctagcctggtgacacagcaagactctgtctcaaaaaacaaacaaataaaaccctcaaaata

SEQ ID NO: 5319 - DNA, 1195 bp, Homo sapiens
caccacacccggccctatcaattcttggtatggcttatccattgtttcctttgccttctttattttttggtactatcactgggctttttttcttactattgttagagttttctcttttttcctccctttcaaatgttctttagtcagtgatttattatgctagaaagtatgcctgttagcaaaactataaaagttaatgttagatgtgaaaaatgattatatgtcatttgaccttcaaagattcataatgccaccactgctcaccaaagcatgatatttcaggtggatcttttagcaagactcaatgtcacttccattggtggtactcagtgacctgcaggagtcctaactagagcattcctttactgtacccaccattaccttcagcctacaatctagcttccttcccaccaatattttcccttcttgttcttgcttgtgagtgggaatcgtattggggttttttttggagagactatttattcttttaatataacagcttagcagtatgcaatcataactttttaaaagacattaaaattcatcagtattatggtcacatttaccaatatgaattaggtggatagcatattagtaagtttcctcataaaaaaaaagaaggaaatactacatactcattttagtaaatcattttgaaatgtctcttgcaaatggttgtattatatctagttcctgtgaaaattaccagagcaactgtgtggttttctggacacattgttatccggctatttcaccttccctggcttttagtttaccacgcctttagacttcaaggtgacggtcagtacctgttaaaagaggtacctgcaactgtaaagaggaacttacttatctgtccacattttcatgtttatgtgtcagaattttttaaaaagaagtgaaaattaagacaaatacttcctgatggtattgtcaaaacaattttataaaatatgtaaaattgcaccccaccttcagtacttcttgttctccttctttattgttccctgtagcacttactgccacctaatatactatatatgttacttatttgtcttcattgttgtctgccttcctgcagtgtaactaacctctccctgatggggatggtggcctgctttgtttattgttggctctccagcaccttagaacagtgcctgacacacagtaggcaatctataatatttgttcaata

SEQ ID NO: 5320 - DNA, 1207 bp, Homo sapiens
agcccctctgtgatgacttctcatgtctcattggccaggatgagtcacatgctactgatggaacttcttggtgccctttctagctctccttttctgggctgttgtatccatcctttagctgctggtactattgattaaacaacttagaaccccttccttttctggagaattatctttgattgaatgagagctgtattctcctctatagtttgcaatcaacgactgactgatttaggggtaagcagcaaatggcagctcccttgccttagagtgatttcaggaccaacgttatggtgcagtttatgctctagagctccctgtaatttagctcaagctaaattatagctgaggccattcttgcttagtttcttcccctaccattttctgattccattattccctttctcctgagagctctccctctgtaaatcacatgcaaacaaatcactgtcttaggctctgcttccagtgaacgcagtatgagacaagaacccttgagtatgtcagtcatttgcaaaggaggggacagaattaccatgattgacttaatcatttggggtttgatgaatgtctgaaagccaaccacagtgatccttctaccgttctttctcgtctttcctatactccccaatctttgtcatcatcatgcatattcttttagaggcttaactgaatatataccaacataaatgtatttttcccaactctttcaatgatgtgtctaaaaatttaaaactgactagatgtgttaaatttaaaaaaattagcaattgctggtccaacctgggggtggggaggacccattaagttttagggaggtgattattaaattccttgacattaaaaaagttatgtcatctatcttaatgaaataaatgcatttttatttacttttcacattatttatatctttggacaacattttctaatctcttatttgaaagccatctgatattacattgtttgtgctgatttatatgttcttttggcactattataattattgaaacatgctaatgtttctttgaaaattagcctaaagctattgcatactatatgtaatatatagaaggtatatgaatccattacagtctgtattaaccctttggatggtgaagatcttaatttgatctgataactttgaaaggtagtaataataggtgccattcaatgagtgtctactgagtgtcaggcattttgctgggta

SEQ ID NO: 5321 - DNA, 1099 bp, Homo sapiens
acctttcttttgtagtaaaaataacattagttgatctacttttgtattctacagaaatgaagctctagatgaaatctgttttaaagtttgtgcctgtaatacagtccgtgatatactggaaggcagaacaattagtgttcaatttaaccagctatttcttagaccaaataaagagaaaatagactttcttcttgaggtatgacatgtttttctttccccttttgatttataatttgctttaagcttaccagtgacctcttaattgccaaatccagttccttttttcctgtctgccttgcgtttctgtgcctgacaattggcacttttgacagactatgcccttccgcctggtcttctgctgtagctctttttctagttcgctccatgtttcttcagcatctttattggattctccttagtccttcattgacttctctattgctcttcctttagtatttctgttcatagaacttttgtccttggctcactcatcattttttatttacttccaaagcttcactcatctgtttcatcacctgtttactaagaactcccaaatcaagcctcttgtctgtcatgtgtgctgtggaatctgtgtttctactggatcactctacttctttcttaacagtcttaatgttagagacattgagagaagtacataaagcacagataataccacttacttccaaaaatacaacgttgccagcactctagaagcctttgttgtggtctttacaacctcctctaccttcccttgaggtagctactgccctggcttttgtgatcataattttcttgctttcttttatatttgtatcacctctgtatgtatccttaaagaacattctttaatttgcctattttgaacttcatataaatggaatcatacaatgtgtattcatcatcttctttcactaaagagatttatttgtgagatttattcaagttgtatataaataacaatttttttcattgctttaaggtgttagagcctgggtgcagtggctcacacctgtaatctcagcactttgggaggccaaggcgagtggatcacaaggtcaggagttcaagaccagcctggtaaacatagtgaaac

SEQ ID NO: 5322 - DNA, 1184 bp, Homo sapiens
tatggcccataaaacctaaaatagtttctgttttgttttgtttttgctgaggactgttgatggcaatcaataaaatatttttttctgaattttattttgccatacaccctgaatatgtttataaataaaatattttctatctggctgtttacagaaaaagtttgctgacttttgagtagatcatacctgtcactttatagatgtagaaataaggctcggagacaatgagtgaaatattctgagattacacagttaattggtggtcaaattgcaaacacagttttgttctccttttaactgcttccattccattatttttgttagagggactgataccttggtgagataagaaaatctgtggtacagaattttgcttatgaattttatatatatatatatataaacactagggataatctatcaactcttagataacattggtgtacaaaaactttttaaatttaggtacagaggtaggatttgattgtagtatatatggtttcctgcgtataaatctttgcactgatctgctaagcagtttgataatatgatactttttgttgcctgtgcagccaaatgggcggactgttgaagtggctgagggtgaagctgttcgaacacctcaaagtgtaacagcaaagcagccaccagagattgacaagaaaaatgaaaaggtaagtttgggagcatatgaaattgtatgcaagactcttaatagaatgacatataaggataatgcttttctgtttcataagattgtatgtatacctctcatttaaacaaaactcagaaaatctgaattaaccatagtggatgggtggtaaaagtttaactgagttgtttttgtttttttaaaggaaagttgcatcaccaaatattttaaacattgctgtggcaatactaaatattcattataccaaaaacaattcattcacaacttgaacatcttgtgtaagttttcagatatataacatatataccttttattcaaaaacagaactgtggaattgtgttacctttgttagtaagacacatctagcatgaaaaccttagcaaaatcgttcagtgatgtttagtgttgaaatagatttctgttgtgttggaaacataattgtctatttactagacatagattaacttcatttaacaaaagaaaatgtgggccaggtgctatggctcatgcc

SEQ ID NO: 5323 - DNA, 1165 bp, Homo sapiens
attgcagaaggatgatcctggatccactatgtagctttgcattcattctctgaaactgcttcctagatggcttcaaagctctcaaagctccactagtttgaacctgtaaaatgtttgattaactgagacaacttgggttgcttacctttagctctagagtgtagctgactcactggaaagtttttgtgctttttcaaccactggcgccagggctgatgcctgtgtttgtgtgtgttgttcactgctctatggtgcctgggccagggggaatgaggtaaaatcctgctgttgtcttcactccaagccttgtgcacttggctgcaactgaatgggctggcagcatttctgccttgggaatgtttatctgctccctccatgggtggggcttagtgttgagagtcaagccactgaagaagttgcctgtggccagcctgactccatgtggtcagtgtaattttctattataaggattgcatcctggggttacttaaattcttttttttttttttttttcttgttgcagatcatcaatgctgtggtactgttgattttattgagtgccctggctgatccggatcagtataacttttcaagttctgaactgggaggtgactttgagttcatggatgatgccagtaagtagtagatatttgggtattttcaagggcagggaatctgactgccagcacttcctattaaattacaaatatagactcgtgagttcatttgagctgatatataacttgtcattgcaaatcaacgaatatttgtgtgcgtctaacattctgtcttctaggtgcaagagtctaaataagatctattttcatcttatgttaacttacccacttaaaaatgattgcattatcatagactttctaccctgggccttttggccttttttgagaggaaggggtataaatgccaggaaggaaggtgaaaaggcttgtgcttatctccttgtgtcttctattatgtttcagtatttatttttattctaggagtgatccttttccattctagaaatgatgttgcagattatttgggggaatttagggccttttcccagtgaatggaaatatgtacagggatgtggatgtggggtaagcagggaggaagctaggctcccagcttgaagatcactgcagcctcatcattttataatcat

SEQ ID NO: 5324 - DNA, 1176 bp, Homo sapiens
ttaagaatctctgtttaaatctctcgtttgtattatgtggtactaggaaaaccaatattatactggaaatttttttttttttgggaagacggggtctcactctgtcacacaggctggagtagagtggtgtgatcttagctcactgcaatctccgcctcccaagttcaagtgattctcccacctcagcctccagagtagctgggactacaggtgtgtgccaccacaccttgctgatttttgtattttttagtagagacgtgatttcaccatgttgggcaggctagtctcgaactcctgaccttaagtgatccacccacctcagcctcccaaaatgctgggattacaggtgtgagacaccacacacagccagtcctggaaatgttcactgaagcttatttgttgactgcttatatttggcatactggtttccaccatgacctgggttaatgaattccaatttttccatttcctttcagattaataaaatactttgaatttaagaaaaatattgttttataatattgaacacattaactttctattttctgttctgtttagcaacgcgcagcctggatcatcccattcttctgttaccagatctttgactttgccctgaacatgttggttgcaatcactgtgcttatttatccaaactccattcaggaatacatacggcaactggtacgtggacctcttactgctccttttcattaattcttttcattagggaagctggttaagtaagggatgtgtagagatacacagacattaatttcaggatttttagcttgcagctgagttactcataggaaatttcttttttcttttttttgaggtggagtcttgctctcgtcacccaggctggagtgcagtgatgcgatctcggctcactgcaacctctgcctccagggtctcagcctcccagctagctgggattataggcatgtaccaacatacctggctaattttgtatttttagtagagatggggtttcactgtgttggtcaggctggtcttgaactcctgacctcaggtgatccacccatcttggcctcccaaagtgctgggattatgggtgtgagccactgtgcctggcctgataaagttttgagggccggggttatgattggtggcagtgatggtggtggttgatgtgcctacctaaattatagtcca

SEQ ID NO: 5325 - DNA, 1203 bp, Homo sapiens
ttgcaggaaggaaggggtcccttctggctgacaaccccaggatgaaaaggcctgatgacgtgggcacagaggtcccctatttaaagtgataagggggcccgaagaaagcagggctatggctgggagtgctggtggaccaggccacattttgccttgtgggtgtgccccttacatctggactccagagctttgcataaggtgtgcaagagacaaccactaagagagcccccaggtccctctggtcacatctattgctcactgcaactttcctgtcactctgaccccagggacatggccttgggggaaaagtgctgggagtccaacgtcattgtacttctgaggtggtctgtgactggctcacttagacattgattaacttttcaaggaaacacaatcattaggcaaattccatccacctatcaggaaagatataaacatcagcaaacattaacccagacccatgggtttacagctcacagctgcccctgggcacactggcggtaccagcttgccccaggtccaggtagctgcttggttgaagggaatgaaactcacagtcatgtgcaacagatacaggaatgtgacccttggaatgggggcctgtgcatcaccaacgtttgtgaatcagcaagaaacacaaaacacacatgccctccaaggctgaatgatagctcatgctgcatctgtttttttctgacaaggctaacctagttttaattatttatactaaaacttataagccactaaaaatgtcctgcagaatgaggatacaagggaaagaagtcttggtaatctgagaccctgctgcagcaggagctctgctcttaagcctcactggcaacaagctcgggctgtttctggggagtcctttgctgtgtggtcaaggcagaaagggtgggagaggtttctgtgagtttctgttggaggagtatgggtggaaacagagctagggagtctaatctacactcaaaaagcataaacctctcagagactgctaaggccagggcaatataggactgaaaaaccccctccatgaagcccaccaggccactctgctgtcacaacccccgcaggtgtctgggtgctggtggctggacattctggaactcacagtaaaagcactggtcgtattggcagcaccaatagcttcactccaagatgatccctcagctgatgatctttgaccccttttatgcagttcag

SEQ ID NO: 5326 - DNA, 1169 bp, Homo sapiens
cctcccaaagtcttgaaattacaggcgtgagccactgcgccctgccagattttgtatagtaatatatatataaaatgacctgtcacaggttggctttcatagttttacctttcctttttgggtggtgcccttgggtctctactactgtctttcatcactcccaagaaattgagtagtgcagccaggatcaggaccagggattggcaaatgttttttgtaaagggccagataggaaatattttgggctttgaggactgtgttatctctgaaatgatcttgttccagtgttaccatgtcaagacaaccatagatagtatgtatacaaatgaacaggtatggctgtgttccagtaaaactatggataaaaacaaccacattgcatttggctaagggctttaatttgctactgacaagtgatagtcctggtcttaatttgtttttttaacatttacagattgatcagggaccatgaaaagaaacttgtgcttcaccgaagaaaaatatctaaacatcgaaaaacttaaatattatggaaaaaaaacattgcaaaatataaaataaataaaaaaaggaaaggaaactttgaaccttatgtaccgagcaaatgccaggtctagcaaacataatgctagtcctagattacttattgatttaaaaacaaaaaaacacaaaaaaatagtaaaatataaaaacaaattaatgttttatagaccctgggaaaaagaattttcagcaaagtacaaaaatttaaagcattcctttctttaattttgtaattctttactgtggaatagctcagaatgtcagttctgttttaagtaacagaattgataactgagcaaggaaacgtaatttggattataaaattcttgctttaataaaaattccttaaacagtgcacggatttgctttttttcaaagtctttataattgccatgcataaataggtaatatcttaatggtgctgagccgacataagaatcttttatgaaaaatgtactgttaagttcagggggtctattggttttatgtaaaaggcacaagacaattcctgtagtgcattttatgagttaaggtttccatacggattattgaaacaatttgttacatgtatttgttacatgatcttaatatttcatgtacaagactgacacccatccacttttgaa

SEQ ID NO: 5327 - DNA, 1220 bp, Homo sapiens
taaaaggtctttcaatggaaaagtatacctacctggggcatagaaggctgggagggaggagtcaagttacggagctttgaaatttttttcatggctttgtatgttgaaatttgaaatgtataacgtgaatgttgtatggaatatctttgatttatgtaaaaaaattttttagggcctgccttaagtgtgaaagtaatgactgatgaaagtggaaaatccaaaggatttggatttgtaagctttgaaaggcatgaagatgcacagaaagtaagtggtctgtattcagcaggaagaagggggtacaaagttgagttgctcttgtgttgaagtctatgtgcatactaatagctatttgacatgttcttatattttcagttatttgcattttatgcattaggtttgagagtataaattggtaacctatattgtcccaaaaccttgagattttgggatgggtttgtctttagcttttgtgacttaacaaatttgtcttaactgttaaggaaatgaactgtaagttgaaagttttgtgattttttttttttctttttttttggggggaaggctgtggatgagatgaacggaaaggagctcaatggaaaacaaatttatgttggtcgagctcagaaaaaggtggaacggcagacggaacttaagcgcaaatttgaacagatgaaacaagataggatcaccagataccaggttcatttttaattgaacaaccaaaataagacagggatgaggaaacctattttacgttgatttcagttacttccaggtagctggagggtttgagaggggaataggagaagaaatatggggtaaaataatagacccgatgtacttaggtaccaccatggttttctttttctatagttttcttttcttctttttagggtgttaatctttatgtgaaaaatcttgatgatggtattgatgatgaacgtctccggaaagagttttctccatttggtacaatcactagtgcaaaggtaagaaaacatatggttcatttatttgaggtctagtaaaaattcatacatgtagatatatgtatataaattttgtattattatagccactagagaggtgtttgcttcgttacttctaaaacttaaattcacatttgaactggttgtcatagcctaatggttaacttaaaaatggcaagcactgaactctttgctaaggaaggctgatatcctcacatgatatgcact

SEQ ID NO: 5328 - DNA, 1173 bp, Homo sapiens
ctagcccagtgatccttgttctgaattactactgttatattcagaaaaaattaagttttagtgtcattttgttgaaaatgctgcagttatgtcaggctgttgtgtgttagagtacacgattgggaagtttaaatttttattctaggagatggcaaagaaagcgcaagcgccactttaaaatgacgatgaaagctttttaatttgatagaggtctttttattggcatggtacacatgcacttccactcatttgtattgatgggagtgatccctttaaccctaggttagctagagaagagaagtgtgtattaaaagaagtggttttttttttgtgattgtagttagaggcttattcatatatttcatggtgtcatatcttaaattatggccctatttctattttgtagtgtgctttttattagggattctgaatattctcattaacagtaacaaaaccaaccatcaggcttacttaatctgaactttataaaatagaatctaatgttatagtccttgtatatcttattagatttgttggacgatttaagtctcgtaaagaacgagaagctgaacttggagctagggcaaaagaattcaccaatgtttacatcaagaattttggagaagacatggatgatgagcgccttaaggatctctttggcaagtttggtaatgtgtcttaattaaatttttacacacaaagctctgaattagtgctcagtgttaattttagctattactttatactaaaaaagtcaataaaattagacttacatggtactttaaaatatttgtggttatttgaattaagctgctggccatctattacactacaaagtagtataatgcaaataaatagaattctatccaggttaaaggttaatagcattagattagcacagtaaggtatgactaagtaattagaacagattttaaaatattttactacattaagaggctggagatatatatgtgtgtgtgtgtgtgtgtgtgtgtgtgtgtgtgtgtaattagagatcccatgtcatcagaagcatatatttgacacagccagcctacagtggaatgcagtctcatagaacaataaagctggtcagtctaagtaacatcatgtttgagcagtttaaaacaatgactttcagcgatgaaaccaaaaattcagattttccagtga

SEQ ID NO: 5329 - DNA, 1124 bp, Homo sapiens
gatacttgaaaggtctagccatcttgaagcttaaagaggaagcgttcaactgtgagaccatgtgtcctcccactccagtcaccatagtttatataatcttaagtagccagcaaaaattttgaagtaatattgactctgaaaatgtccttcctgcagcggagcgtgctttggacaccatgaattttgatgttataaagggcaagccagtacgcatcatgtggtctcagcgtgatccatcacttcgcaaaagtggagtaggcaacatattcattaaaaatctggacaaatccattgataataaagcactgtatgatacattttctgcttttggtaacatcctttcatgtaaggtaagccaaaaatgtccgatacacatgtttacattgttgagctacatttagtttagtgcttgaaataggaactgtgcagtaatggatatctttatttcacaaatatccaggttagatggctaacagattgtctctcaacactgaacaaatgttaaatcaatagcaaataaagaaaaatgggtatatgtttttccctaggtggtttgtgatgaaaatggttccaagggctatggatttgtacactttgagacgcaggaagcagctgaaagagctattgaaaaaatgaatggaatgctcctaaatgatcgcaaagtgtaagttataaatatctagctaatcatattttgaatcttatttttaataattccaaatccattcattttaagttaatatttgtcagggagaagttagatgcacataagataaaagaataaaaacattttaaagatgaataacaaaaattcatgtagttgtactggagtgaaaattaataagctaatcttgatttttacaattgaattttctacacagtaagtgtaacatacaaataacaggtttaatataattaacattcatgccaaaaggaaaacagaagataagtaaacagaaaaatgtagctttttcaaaatgagtgcattagtgaaaaatcaggaattcagacaaacctaatattcataattcttgaggtactggttaaattaacccattttataggtgaggaaactcaaagtaatttgcttttatgtactgtaaaatgagagacatacattactc

SEQ ID NO: 5330 - DNA, 1392 bp, Homo sapiens
tccctcctccccctggcctccgcgtctcctcctactccggcgctgacgctcgcgtaggggccctggcgtcagacgcgcgggggcggggcgagtgcggcgcggggtataagtagagggtgcaggaggcggtgcttccccttctccccggcggttagtgctgagagtgcggagtgtgtgctccgggctcggaacacacatttattattaaaaaatccaaaaaaaatctaaaaaaatcttttaaaaaaccccaaaaaaatttacaaaaaatccgcgtctcccccgccggagacttttattttttttcttcctcttttataaaataacccggtgaagcagccgagaccgacccgcccgcccgcggccccgcagcagctccaagaaggaaccaagagaccgaggccttcccgctgcccggacccgacaccgccaccctcgctccccgccggcagccggcagccagcggcagtggatcgaccccgttctgcggccgttgagtagttttcaattccggttgatttttgtccctctgcgcttgctccccgctcccctccccccggctccggcccccagccccggcactcgctctcctcctctcacggaaaggtcgcggcctgtggccctgcgggcagccgtgccgagatgaaccccagtgcccccagctaccccatggcctcgctctacgtgggggacctccaccccgacgtgaccgaggcgatgctctacgagaagttcagcccggccgggcccatcctctccatccgggtctgcagggacatgatcacccgccgctccttgggctacgcgtatgtgaacttccagcagccggcggacggtgagcgccgggctccgcggtcggccgggcgggcgggcggccatgaggctcgggcggcggcggcgggcggggtaggccggcgggcccggggaggggggcgggagggcatgtcaccccgcgacggccggcgggaaggcgccggggtccctggagccgcgtttcccgagccggcggggacccgcgctgccggcagccacacgcccggctacttcctcctttgcgaccattttctcggcctcagacgctctcaaactttagggtgatgacgcgccgggagggtgggtgagattcggttcctccgcggcgctcccgccagtggccccgggattctggggcgttgaacgctgagctccttccgtgggtaagaggtggaggcgctcccaccacccggagctcctgccggcgccccagcctggggaggaagtgcagttctgtgctcgaaaaataccacgtgttgaaccctgtaacctcgcaggcccgaggcctgcttctgctcctgctcctggcccagtcgcctgggggagccaccaggccttaggataaagttcctgtggcgatgt

SEQ ID NO: 5331 - DNA, 1170 bp, Homo sapiens
cagtgtctccccagcttgcccgtcggccctccatggtgctgcagcagtggctttagccagttgggaaacccagagatccaaattaactgctcagtgtgcagccagagtcttgtgaaacctacagtaagctgaattcagaaaatgtgcgatgacatgacaaggccacagagacagagcgaagggaacaggctccttggggacacggatatgctccacaggggccacttgcttccactgggaattatgttaatcctgtgcgggtatttactgtggcttctctcctcaaatgcacttccctccaactgatcaaaaagtccccactttctggagggttgggaatgtgttttattgttctcaataatatccagttttggatgtgagggcgatctggctgagacatctgtcaccccattgattgccagggttgattcagctgctctggctggctaggcgggtgtctccttcctcccttgctgctccatgtgcaccctcccgaagccgcacgctcagtggaagaggacgaccatctccgatagaggacgactggtcttcggttaagggtatagactagctgcgctcccctgctagaacctccagacaagctcttgataatatccagtcttaaagaaggatctgttacatgtgcttcagaacaagtggattaagtacaattgaagattccatgtataatttcaatcatcttttagttaaaaaaaaatttaactgaaagcatttccgtaagagctactccaacctggagatcaccaagtaaaacggaggagaagggccaaaagtttgagaaaatggatttcagtttgagctgaaatactaagtaaagtcctacctaaagttgactttatccccaagtgaaatggagagaaatcaagagggtaacatatgagatcagtcaaccgtgggcatgacagggagtcagtgagtaagcagttttagagaatcaacagcctgcaattccatcaagatagttgagagacagacccaggaatcatcctagcaaagcgacagcctccgtcacttgcagtggctaaaagatgtgaagacaagacaccatcaagcccaaatcttattggttacaaaaatggctgaatctaataatgctgacaacacattatatcaaccaaggtgaagtctaagtagttttactttatttag

SEQ ID NO: 5332 - DNA, 1136 bp, Homo sapiens
ggattcgccctcctgcccgcccctccgggccgcggacacacgcccggcagggaggcggcggcggcccctgcgtatttgcttccctccatttggggactgggaggcggcggcggctgtgggttttggggaggggtagagggctggggggcgggcgagagcgggagggggccgccctcgagtggaggacgagaaggaaagcaccatgacgtccatccatttcgtggttcacccgctgccgggcaccgaggaccagctcaatgacaggtaatagggctggcgggtcggcgggcgcggggggaggggcgcccttccctccctcccctcccccacgggccgtgccgggcgggtgcgggtgtttacgcgccggccggccagctggggtggggtgcgggggtccttactgcctcctgctaggctccttccggggcaaacttctcatcccgggggcagggggccgcggggggagcgcggtgtagacgggactcgcggtgtagactggagagcgctctgtaaacccccttccccctcccgcaaggagcggcgttgaactcggcggagatgggggggtggtttctggctcccggggggcaggcggtaattactgcccggccaaggcccgaggaatccatattagtcaaagttgaattgagacagacaatgcggatgggggatggtggaggtaaaaagagagggaagaggagaagcggggccaggggccccggggtgggctgggctgggcttgtcccgggcccccggcagctgtgtccggtggggtggtctggacctggggatcccggggtcgggttggggagagaagccgattcccggcagattgctgggagcgggcggggggtggggggaaggtgatagttgggggagggagtgagggaggaagcgccatgattattgttattattattaaatttgagcccctgcagtgaggtttgcctgccccgggaggggatggattcaagcgggggtggggaagtgcattggattccctttactctcctcctgaaatggtgctggcagctcctgctactagcccctgtggtgcgagcttttttgtttccttttctattctaatgatagtgttttcctgagttgtaatttgacagctgaaaaccgtgcgtaga

SEQ ID NO: 5333 - DNA, 1131 bp, Homo sapiens
aggtgtctctacaactttctgctcctttaaatttagtattctatgtgtttcagatttcatgtttcgagtgcttgcaaagaatctcaagtatatgtacatgctctatctgatgctcgatgtgtgtttgacatggctgtaagttctttcttttaagttattttgatattttattttagccaggatgttaagttaaagactaagtattttctgcctgtgtgaattactctgactacattcaacgtgacacacacctcatttttattatataagcattcagagctctgtacagtcacaccttttaagcaggtaaaggagtgaaatagtaatttacttgcataagtctagaagagagtacaaataaaatcaaagagacagcatacctaacattgaataatctgtttctatcagtaaaaaaccaagaatttgctgtactaaagatcagaacagatatttacctccctaggagggggtttttaaaatgttctcatatccattacaatttggaaaaacatttaaattttttttttccatctctagggagaaattggctttacgatgaacatgttagacattggtggaggattcacgggaactgaatttcaattggaagaggtaaacttctcagtagatgacattaacagaataattgctttctttgttacttaagtggtggatgtgtagagcaggatttttacaatggcagaaactaaaccctataacatctctttaaaattatgttcttagaaaaggaataggcagttagtagacctagctaactttgaaaagtttgatagaattctttgaacattatcataaaacattttctatttcagttgtgtttctgtacttaatggcacaaatgatttaatacttagaaaacttcactactacctttttttttttttttttaaagtcttcctgtgttgcccaggctggagtggagtggcgcaattatagctcactatagcttccaactcctgggctcaagcgatcctcctgcttcaacctcccaagtagctgggacttaaaaaaaaaaaaaaaaaaaaattgagtctttctatattgcccaggctggtctcggaactcctggcctcaaatgatcctcctgtccccaagtgatcctcctgcccc

SEQ ID NO: 5334 - DNA, 1183 bp, Homo sapiens
tatgctttagcaaacagactggcagcattgtgcccctgacctagagatctgtggaactttgaacttgagagagatgatttggggtatctggtagaagaggtttctaatcagcaaagcattcaaaaattgatctggttgtttctaaagtgtacagtaatatgcatgaagaaagagatggtctgaagttggaacttatatctagaaaaggaaaactcattttctggggagaaattaaagctggttgcagaaattggcatcagtgatgaggagccaaatgttaatagctgagaaaatggggaaaaagtctccagggcatatcagagatcttcaccacagcctgtcccatcacagacctggaagcgtaggagaaacaaatggtttcatgggccaagaccaggaccgtgccactttctgcagcctcgagacattcccagccactccagcttcagccttggctaaaagcggccaagatataaattgggccattgcttcagaggatgcaagtcccaagccttggtagcttccacttggtgttgggcctgcagatgtgcagaaattaagagttgaggcttggaagcctccacctagatatcagaggatgtatggaaaggcctggatatccatgcaaaagtctgctgctggggcggagccctcatggagaacctctactagggcagtgtggaggggatatgtggggttggagcccccacacagcatccctactggggcactatgttctgaaaaggctgcagacactcaatgccagcctatgaaaacagccgtggtggctgtatcctgcagagccacaggagcaaaggtgcccaaatccttgtgagctcaccccttgcatcagcatgccctggatgtgagacatagagtcaaaagagattattttggagctttaacatttaatgactgccttgctgggttttggacttgcatggggcctgtacaccctttgttttggccaatttctcccttttggaatgggagcatttacccaatgctgtacccccattgtaccttggaactaactaaattgttttttattttacaggcttataggtggaaaggtcttgccttgtttcacatggggctttggactagaacttttgagttaatactggaatgagttaagacttttggatctgtttagaaggcatgattagttttgaaatgtgag

SEQ ID NO: 5335 - DNA, 1196 bp, Homo sapiens
ataatgcaagacttcactttagaaaaacacaagccagaaaacaatggagtaaatttttaaagttctgaaaagaaataaaacctcatcaactgaaaattctgtctagtgaaaatatcctttgaaaatgaagaggatatctgggtagaaaataagcatgtaagaagaagctcggcagctgcagccattgccttgagtgagtgtgccgctctccagcccgtttgaacgctccccgcagccaccgccacccattggaatggccaacaggggacctgcattatggcctgagccaggaggtgcagcagaagattgagaaacagtatgatgcagatctggagcagatcctgatccagtggatcaccacccagtgccgaaaggatgtgggccggtcccagcctggacgcgagaacttccagaactggctcaaggatggcacggtgttatgtgagctcaataatgcactgtaccccaaggggcaggtcccagtaaagaagatccaggcctccaccatggccttcaagcagatggagaagatctctcagttcctgcaagcagctgagcgctatggcattaacaccactgacatcttccaaactgtggacctctgggaaggaaagaacatggcctgtgtgcagcggacgctgaggaatctgggtgggttggcagtagcctgggatgatgggctcttctctggggatcccaactggttccctaagaaatccaaggagaatcctcggaacttctcggataaccagctgcaagagggcaagaacgtgatcgggctacagatggggggcatctcaggcaggcatgactggctactggatgccacaccagatcctttgatcccaccccaggccttgcccctgccctcccacgagtggttaatatacatgtagatatatattttagcagtgacattcccagagagccccagagctcttaagctcccttctgtcagggtgaggggttcagcctgtcctatcacctctgaggtgcctgttggcagcctctcccccgtgcttactaatacattcccttccccatacccatcaaaactggaccaactggcctcttcttttcccctgggatcaaaatttaggggcctcagtccctcaccgccatgccctggcctgttctgtctctcctttttccccctggcctgttctgtctctgagctctgtgccctccgttcattc

SEQ ID NO: 5336 - DNA, 1196 bp, Homo sapiens
tttaaaaatctctgtcatatgaagccttttctatttccagggatatttatctaataacgagttacagaattcaaattaatgaatcataagcctctgacaaattgattaccacttatatttttattagtaatgattgcagttattgcctgattcactgcatcttcaccttcacttttgtttgatcattattaattggtgtgtagaataaacttgtgccaatcttttttttttttactgtcaagttattttatgtaataactatttcttttgtgaagtttttatttgtcttagtgtttcttaccaatttgtatgatgtgttttaaatttgaataatgcttctatatcaagtgagttaatttttttcttctttttatattttggaatgttttttattcagctcattaattcatctggaatttgtttttccttttctctctggtgtgccatatatgcatatatttcacaccccaccttaaggcacccccccccccccccgcccccgccacctcaaaattacactctttttacaagctttgacagatttgtattaagatactgaagaagactgcctggagtggcttggtgcagtagatgtagatttttttttttttttttttaatttagaaccttattagatattccttcttaggggaatccttaaccattagttaatactactaaatgtgtttcatagagttgtttatgtgagcagggtgtctcagcaaatcagtggctaatttagagctgtgcatatagaaattaatctagtgttattactgaaaccagaaggaaatttaggagactcattccaagcaaaagcaacagaggagattgagaacaacttggtcttttgtttctgtttttagacttgtgagtctttgatacaggtttcaaaggttctgttttcaagaaaaacctgaaaaatgtctgccaagtgtgccctgatgtttctttgtcacgtagagatttgggggaaagtgtattctagcagaattcatgtaaccgaagttaaaagtgtcatgggaagctggcttaccaggtctgagttctggcccaacattttactgactaaaaggaaatataactgttcttctcactcgctatcccttcctagtctttttggatacttaccagctttatttaatggctgaacattaattagtactcaaagaagtaaaatgagcatttctagatta

SEQ ID NO: 5337 - DNA, 1176 bp, Homo sapiens
atggcccaagttgttttctcacacagaaattgtgaaaagaatttaagtgtaaaaagtaaataagtttgaaaattattactacagaacatgaatttttgaactcctccctgctgggaataagctatagaatcccatggtccttgtcagccatctctttaggcctgtttacaattgaaaaacatgactttttcttcaagtatgtctcggggaaaggaaaaaaaattattattccccttatgaatttatatttttaaatttctctaaattgattttgtttttgttttcttctgtgacttacacttattctgttaacattatttaggaaccagctatacaagttagaaactatcctttgcttctccttcgatacttaaaaccttggacatttcaatgtcttgtagctcccctgctagagaatgagcaaataaaagagaagtaaaaatagatattttaatttatgttcttagtcttcttactgttgttaagagaagacatactttttaacacagtaaaattgtcgttttttagtgtgcagttctgtgaactttatacatatgtataggttcgtgtagctaccaccgtcaggatacagaacaaacagttccctcaccaccaaaacctccctcatggtattcctttatagtcccatcttatttcaaggcaactcactaatcctgttctcaatcaccataattttgattaaaattatttttagtatacatattgattacatttccagtggacttgaattaattatatagtcttgatttgtaggttggcttaaactaaacagtttgtaaagaagaatatctggcttatttgatttgtataacttttttatggaaatactgaactgtatctgaagttttccatttccccagaacacaagtaaatacgttagaagttttagttaacccccccctttttttttttttgcatttatggtttaatattctgaatagataatagtcaaatgggtcaaaagtataacatataacagttgtaattttttggatttttactagctcggagtgtatatatgtgaattatttcagtaaaatacagattaccttctaaaacatataccagtttatactccacgtaatatgagagtgctcccttagtcttgccaacacaatgttgccaacagtgtgtatgtatacatatatattttta

SEQ ID NO: 5338 - DNA, 1180 bp, Homo sapiens
tgaaatgactcccttaacaaattccagcatttttagattgtaaagtacattatgtaacttcattcatcatgtagacctcagacagatactttaatttttttttgaaaaggtcttgtagcacacttaatctgcagatcttttctggcaggaggaaaaaaaagcatatactgttagatttggtgacataaaggtcaaaagataaactgtaagtgatacctatgtttatttttttgacagtgttaaattagcaacccctcagacctctcttggagcagtacaacctgagtaattgaacatgtcgctggggagtatgcttggttaagctgattcctattatgttgacttgtcagggaccaataattaaagctgaagagcgatgctcattagtgtctgcaagatgattcgaagaatgagaagaagtccttgaggcacacctgcaaaaggcaggcattgcatggaggtgagagcagacggactggcctgcttttctgctatgttagcaagccagcgataaaggggatacactaaattaagtgttgcaaatgtattctccccaatttagattataaaatgcattttacttccgcctttgaacataattttattccaattttattccatgtaatcatattttgctcaattatgcttttaatgctatataagatgttttagaaactagatataagtctattcaaaagcactttgaaaaactttatactatgaatcatttcattcattttcctggaagcatcataataatcaaaatctgctttgcttctttgaactctcaatactctgcacgtaaaacatgtgagttatccagctttgatgataaagactttagtggcatacatttgtcacatttacttcacaaaaatggaatttttaaatgtgtatttaacacgtactaaaccacatacagtatacaagcattggctcccgagaaggccagaggaaaacactacatcataagtatagaatttatatttatcacaacttgagcaaagctgttgacttttggaaacaattcaaactttttagcactggaatgatacagaaactcaatcctaaagctctgagaagcatttttcttcttttgaaatttgccttaggtaggctcactttttacaaatctatcataaaatcatgggatatacaaatatcctaatattttggaata

SEQ ID NO: 5339 - DNA, 1216 bp, Homo sapiens
aaccaagagggtatatacacagtatgagcatatgtatacacacatatacatatacatgtacatacagagagagatttattataagaaattggcctgtgtaattatggaggctggcaaatccagaatctgcagaaccagtgtcccagttggagttgaaaggctagaagctgctgtagaaccaggaagagctaacatcctagtttgagtccaaaggctggcaggctactataaaattaagaaccaatgtcccagtgcaaaggccatcaggcaggagaattctctcttagtctagaaagggtcagcattttgttctactcaggccttcaactgcttagatgaggcccacccacattatggaaggcagtctgtgttatccacttcaccaatttaaattttaatcccatccccaaacacccagaatgatgtttgactaagtacccgggcacctcataaccaagtcaagttggcatataaaactaaccatcacacttgctcttgtattactgccattctagtggagcacacacagtcatgctttttctatgtatgctcaagcttcagattgcggcaaaactctaattttccaagactgcagcagagtaccatgttcctgctgcgggaacatcctcactgaatattccctggcccgagcctctacaaggagttctggggaatgtttttagccctgagggcacctaataaggctaaacaatacagaactgggttgtaagaggtccctctgatttctctaagttctgccaggatatgcctatgcttaccttacccccagacaactcagagctttggggttcgaggagagtcttgaaggaataagagcattcaagaaaagaagaatattttaattgttttttctttgtttaattctgtcgtgtttattcttctgcatatcccaagtgctctctaaagaaaaaatagcagtaatgctaccaggatttcctccttccaatgcatcctctctcaagcagtgactcaatttcttgctcggaaatggtgcctccagccattggtggctcaggttgaaaatgtgagtcatctctgatgtctgtctttccctcagaccccacttctgggcattgtaaagttattaaaaatatagccagagttttactatttcttattacttcttccctgccaccccagtacaaagacaccattacctcctgcttagatgactgtgatagtccgcggactcctc

SEQ ID NO: 5340 - DNA, 1220 bp, Homo sapiens
tcataatacttagaaaatattaatttttaaaagatgatttggtaacacactggtatatggccaaatttgtatagactataaggaactatatattcaacttcctggccacaatgctgaaaaactctgtgtgtaactaattacatgtcttatttagatacttctcccattcctgatagaagtgataaaaacttaggaatccctctttacatactgtcatcagcttcctctttctttagtctggctttccgtatcatcagcaggaattcatttgggtatttttaatcttgaaggtaaagaacaagcacctttggagatgagtatgcatccagcggcaagcgctccactctcagtctttactaaggaatctacagcctccaaacacagtgaccaccatcaccaccatcaccatgagcacaagaaaaagaagaagaagcataaacataagcacaaacacaagcataagcatgacagtaaagaaaaggacaaggagcctttcactttctccagccctgccagtggcaggtctattcgttctccttccctttcagactgagaaggggacaaaaagacctttcctttcatgtccagaagaatgtatgtaactaaagctttgtcctctgtgaagaattataaaagggaggggggaaaggattcgcctctcctacagaaattctgaattcatttaagttctaagcatttgatttatgttatttatacagttgggatctaattaggaaaatgtgttttgtagttctggataaactatttcatccgctgtttcctccccaaaacacacacacagagcaaactccctttcataaaagccctcatatccactggcagtccccgttcgcatcatggtctccatgtgtaccgccaaagtcaattatgtttgaaagcctttggtggatgttatggggcaaagttatgatttacacagaagcaactgccaaatctgtggtgcaaccactatctccagtgaaatattgtataacaccatttggaactactgaaaagacagtggcttttctacagtactcttccttattgcaccatttttgtattaacgtagaaactaagcatcagaatttatgaacaaagaatatgttatttttccttttgctctaaaatactgagatttggggaagcaattcttttttaaaaaaattttgaataactatcttttgataacacattcggcggttacgatgttggaattt

SEQ ID NO: 5341 - DNA, 1232 bp, Homo sapiens
gcaccactacactccatcttgagcaacagagtgagaccctatttctttttttattttatttatttattttttgagatggagtcttgctccgtcgcccaggctggagtgcagtggcatgatctcgactcactgcaacctccgcctcctaggttcaagtgattcccttgcctcagcctcccaagtagctgggattacaggtgtctgccaccatgcccggctaattttttttgtatttttagtagagatagggtttcaccatgttggccaggctggtcttgaactcctgacctcaggtgatccacccgcctcggcatcccaaagtggtgggattacaggcacgagccaccacacccagcccctatttcaaaataataataataataataataataataataataataataataataatttggagatagcatggacaacagtgaacttggagtttgaattaaggtcttgccagaagctaaaatataaagctttaaagtgtacatatattgtagttatgagagtgcctatgattcctgggcgctgtggtgcgtgcctgtagtcccagctactcaggaggctgaggctggaggatcgcttgagtccaggagttctgggctgtagtgcgctatagcgatcgggtgtccgcattaagttcggcatcaatatggtgacctcccgggagcgggggaccaccaggttgcctaaggaggggtgaactggcccaggtcggagagtgcctatgattgagatcatccagggacagtgtgatgtgcaactgataaaagggctgaagttaaagcctcactaacatttgaggtggaagccttgaaagaagtatctgccagaggaaaaaattgcaagcaattggagaaatagaataaagcagtgtcttggaaactgtattactttgtttcaaatgagcaagttctggtttacagcaagattcatttcattctatgaaaaatagagtagcttaaattttaatttcacatcttttgttaaacttccaacattttgcttataaaacaatcaggcttttaccccactagatggcagtattatttaatgttttatagagcagcctgctttgccttttttttcttccactgccttagaaaaggaaagtgaaggaatatttattcaattatttactgagttaagcacttaactgagtaccctgtataggccgggcgcggtgactcacgcctgtaatcccagcactttgggaggctgag

SEQ ID NO: 5342 - DNA, 1177 bp, Homo sapiens
aagcttcccagggcagatggtgtcttgactgcatgtacgccatttgcaccacagctaagggaccccaaaaggcagcctgacctggcttctatatttcaggggccatgtgactcattgggcaacgctttgaaggacatcctgcttttaggggacagaggaaaaaaacccaagctatcctgggcagttcctccctatttcaagatagtacatttccagtgcattctgcagttattctgagtaaaatgggcatgaagaatggggagagagacacggctaaggctatcatgggaccatccagcacatttatctaggttggattcattgtggaggggactgcacaaaaaggaataacaggagatgtggttcattcaatggcttttgggggtatctttacagactagctaccattccctatctgtgatttctgatcaggtagaagaaaatgtgattcagggaattctactttgctatctaaattccctcaatttaaaaatcaggtcaatgtttaaaatgcaaaataattgagtatgcttattttctgctgcttaattattattattatttactttgaaatatgtaaggtcgagagaggtgagtgattgacttttattttttgttaaatccttgctataacacatttcccaggaactgagtactaattgttggcaaagggcatcattaatgttgaccttttttttttcttatttctcaggttttccttttgacttattatcacttccacatttttctggggagcagattgtacagagagagaaacagttagctaatgttcaagttttagctttggaagaatgcctaagtaagtaacaatttgtgtattttatcctaccctaaaaatgttgacttgtttggacataagctacctttatttgcacactttttcatatatagtttatcttttagttatgctacttaattatagaactatttttgaaagcaatgatgtagagtagaagagatattttcactagattcagaatatttctgtttatttgtacatcactgttaacatttgtaaaagtatttcaacaggcaaattttgtatttcaaaatttgtttttaattgtatgctagagaaggtatgtaagttttatttttctatgtataactcttgataaaatatctttttatatatttttgtagcggaagttgggtg

SEQ ID NO: 5343 - DNA, 1177 bp, Homo sapiens
tcacactttgaggcaactaaaaaggcttcaaacgttttgatcagtttcttttcaggaaacattgtgctctaacagtatgactattctttcccccactcttaaacagtgtgatgtgtgttatcctaggaaatgagagttggcaaacaacttctcattttgaatagagtttgtgtgtacctctccatatttaatttatatgataaaataggtggggagagtctgaaccttaactgtcatgttttgttgttcatctgtggccacaataaagtttacttgtaaaattttagaggccattactccaattatgttgcacgtacactcattgtacaggcgtggagactcattgtatgtataagaatattctgacagtgagtgacccggagtctctggtgtaccctcttaccagtcagctgcctgcgagcagtcattttttcctaaaggtttacaagtatttagaactcttcagttcagggcaaaatgttcatgaagttattcctcttaaacatggttaggaagctgatgacgttattgattttgtctggattatgtttctggaataattttaccaaaacaagctatttgagttttgacttgacaaggcaaaacatgacagtggattctctttacaaatggaaaaaaaaaatccttattttgtataaaggacttccctttttgtaaactaatcctttttattggtaaaaattgtaaattaaaatgtgcaacttgaaggttgtctgtgttaagtttccatgtccctgctctgctgtctcttagatatcacataatttgtgtaaccaattatctcttgaagagcatttaggaagtacccagtattttttgctggattaattcctggatgcagaattcctgggttttcattttaatgaaggaggatgcttgctaactttgagtgaggagtcatatctgattgtagcatgctttatggcatttttatagcttctacccatggatctgagccctggaactttataaaattagtttaatcctgtttcctcataaggcacacacagactagatagcaggtgccatgacattcctgagcccttttttttttttttcctcgagggtgaacatcccagtctgtatcttgggccttcgacaggccaacttcactcatcacaaggtgaggtgacaggaagcaggttgtatgtatgtc

SEQ ID NO: 5344 - DNA, 1180 bp, Homo sapiens
tttctaatcactctctgagattatcttacttcattatctatttgtttataaattatcccaatgaggatgttaagatcaggagagagggtaccacgacagcgctgacagccgcagctgcccagtgtctagaactgtgcccaacaaacacttgtggaatgagtaagcagacgaggaactagacacttcgtttgccttcgtcccctttaaataccctccaggtggacccagccgcattaaaactctgagaactaggtgaatggcatttggcctcgccactggccggagcgtttgccgttgatccaggcaaccactgttttcccaccagtcgtgtagtcgctctacctggctccgccccccaggacgccgagcctcggccgggcggtaaaatcggcgcttaccctttaagcggcgggacttctggtcacgtcgtccgcggtcgccggaaggggaagtttcgcctcagaaggctgcctcgctggtccgaattcggtggcgccacgtccgcccgtctccgccttctgcatcgcggcttcggcggcttccacctagacacctaacagtcgcggagccggccgcgtcgtgagggggtcggcacggggagtcgggcggtcttgtgcatcttggctacctgtgggtcgaagatgtcggacatcggagactggttcaggagcatcccggcgatcacgcgctattggttcgccgccaccgtcgccgtgcccttggtcggcaaactcggcctcatcagcccggcctacctcttcctctggcccgaagccttcctttatcgctttcaggtacttaccggagacggggggcgtggagactacaggccccaggaggcccagcggcggctaagcgtaggctggcatgttgcgggcgcgcggtgcctgctgggatttgtagtgggtccggcgccggcggtttagggcggggtcctttgggcccggggaggctctgggatctggagcggggtgctggatagctggagttgtgggctggcctggtggggaggggttgacttcactggtatagtgagattgtgcttcccgctcttcgcactcagtgaaggaagcagtgagattagtcgttggtagttgtcaatctgttggacgctggcgattaggtccgcctggagcattgccctctgacctccctctgtcacccacgtgggtggcctgta

SEQ ID NO: 5345 - DNA, 1184 bp, Homo sapiens
tcttggatttgttcttttctccattgcctctttcttagttgaggccctccatatctcctgtctgaattattacagcaacatataaattagtctttcttgttcaatctcttcccctccaccagatatcctcaaagtgctctttctaaaacatagactagatatggtactcttttacataaaattacctgcaagagaaagcccaaactcactagcatcaattttgaagttattcttcatcaaagcctttgtcagccttgtctcctacatgaatgagatgttgctaacatgttccgtcatacactttatcaactagccacaagcttccatttttgtggatattaatggaggtgcctcatataatacctaaccacccattgcatcagttcatctatggtgtttatatgtaatgttacttctagacgtacagtgttttacctgggtaacaattttactttttaccacagtcaccaaggagctagttagctggatgagaggacatgaatcatcagtattttcgatctctgtgcatgcatcagggaaatatgccatcacaacttcttctgatacagcacaattatgggacttggatacctttcagagaaaaagaaagctgaatattcgccagtctgtgggtatacagaaggtcagtgagggggtacatcttggtctgttgtgcttctcgggctaatttcttggtcaacaggatgtatagatgatataagagtaatgattcactttgtccttgtagctctgtaactcagcaacaagcaaagcaaagtggccaacacaaagatgttgcctatagctacaatttataacttagtgagctcttttctaaaattatagctatgtaacttcaactgtcctaaggcgaaagttatttagttgattgcttttgttttcatttttaaccctctgacattttattatgaaaaatttgaaacatgcagtagatttgtgagaatttttgaacacgtgtacattcagtatctagattctaccattaacatgttactgtactatcctttactctactttacatggtaccatactctcttatgggtctatccatctttctttttttttttggtttttgttttgttttgttttgagacagaatctcgctctgtcacctaggctggggtgcagtggcatgatctcaacttactgtaacctctgcctta

SEQ ID NO: 5346 - DNA, 1287 bp, Homo sapiens
cagcactttgggaggccaaggtgggcagaggcaggatcacttgtgctcaggagttcaagactaacctggccagactcttgaagaagtctttttttgacgtttaatcaattatattatgggaaattgcttctgaatatgaggtggaaaagcatagctcactctgtaataggctattttcatgatttcaagtggttttatgaagaaacagaaagcagtgatgatgttgaagtgctgactctcaagaaattcaaaggagacctggcctacagacgacaagagtatcaggtagaattcaacatatggtgcttgaagtgggctcttgttttatcagttatggcatatgtaaataacagtgtaccaagttagtgtggtgtttatgaagatgagtttaatcttttgtgatgtgtgtttataatctgaggctcccaagtttccgttcttttctgcttggctctgtatgatttgtttgttttctgtaactccaacaaaaggatctctttggggtccttgtccttgtaggtttattcctcaaggttctgaatctcctcattacttaggaccctctagcacagacatttcacagtgccacaggagcaaatcaccccaaaatgtataagaaaaagaactaacaactagatgttagattgcgttacatatgtatctcatttcatctgcatgagaatcctgtttttattttgctgatgaaaaggttataaagtaagttagtggcaataccagaattcaaagcctagtatatttggtcccagaatgttctttctgctatatcatgatgctttccatagtagtagtgattatattctctagccattccttctctaccttttaggaaagtaggattgactagatgtattagtccatttccatactgccatgaagaaatacccaagactagataatttatttaaaaaaaaaaaggtttaatggactcacagttctacatggctggggaggcctcacaatcatggcagaaggtgaaggaggagcaaagtcacgtcttacatggcggcaggcaaagagagtgtgtgcaggggaactgccttttatgaaactatcagatctcctgagactaactaccatgagaatagcatgggaaaaacccacccccatgattcagttacctcccaccaggtccctcccacaacatgtgggggttatgggagctgcaatttaagatgagatttgggtggggacacagctaaaccatatcactagaatagtgaaatcttctttaattcatttaaatattcatgtaattcattggtcagt

SEQ ID NO: 5347 - DNA, 1287 bp, Homo sapiens; identical to SEQ ID NO: 5346

SEQ ID NO: 5348 - DNA, 1190 bp, Homo sapiens
tgggagggcaaatggcagaaatgaacaaaagctattaggtgaaagcatccccaatgtatcagttgtgagatgatttttgtttaatgatgatcaggtttacattgaagtggcttggaagacgtatttcagagggactgggtttgtactgcaaaactctgaacactagagcaggttctactagcacttgggcagtaaggtagcgggtgtgtattatgctattgccatagttctcgtctttgtggattcacataccctttcccatgaggagcttgctactaacagcctcctgtttctgttgtttttatatgggagaagagaaagagcttggaatttcaattgtctaaacaattggtatgatttacaagaaggcaaaccattcaggagatgttcaacagtgtatcattcttagcattcaatacaatgtttattataaaatatacacctgagtttatgtttttctgccaggctgaagggcaataatgtcttgctatgcaaacactctattttatgtgtgaatttttttaactgtaattttatgtgtgaatttttttaactaaactctatcatcattttctatgttgacatcttttttttttttttaatctgtttccaactctgagtctgtgaactatctcttctgactggatgctggcctaaaatcctattagtgcttaaacagacctcaaaacactctgaacctgtaggccaatacagagatgttgttctttgatatatcttgggtccttgatggcttcaacaaacaaggtcataatttgtttaaattcagtgttttctgtagataccttcttctcagtttcattaagaagagtaaccatctttggttttccaaagaatggaaactcctaccctagactttagacttagagcgtctgcctttcacgatgagtaagagatccagaatgtttaggggatgtgcgtcagcccacctggtacagtggcaaagctgaatgcgaacttgaggcctcctgaggcctgaccttctatgcccccagccctccaccccaagcaccttttggtgtggctggaaacacatgacattggatgtgatttttctcaagcccttcactgtggaaggcatgggagactgcccagcattgggcatgtggctgttaacgtttccatttcaagtccctgattcttactggagaagttaaggagccacttaatgt

SEQ ID NO: 5349 - DNA, 1099 bp, Homo sapiens
gacttttcaagttaccttccttgggaagtttgtgcagtgttatagtttagtttagctcctcttacagggtaatggtttgctagtttaaaactgtaaccaaacgaactggtcagacaacatatatctaaaacacttaaaatgttaggaagtttgggaatgttataacctaaacgtttttgctggtaactttttgttatttatagatatttgtgtatttaacatacatacttcaggaaatatatgcctttcctaaaacttaaccatgcattcaataccatggcctatctatagaattgaatattttggaccatgttatctgtggcacagtcagtgctgtgtttgaggtaaatgcagtaacggttagttttctactttgtcttatagaaggtagaaaccatgtgtatgttatgtttgtctataaaagaaaaaatactaatattaaataatttcttacgactctgagtcactcacttatttttccaataattgatattgtacattcctagtgccattaggtatgtatgtatgtaacttttacagtttttcagctgaaagttgtaagtattttttttttttgatcggggctctttaatctcattttaatttcctttgtttgaactgtagttattttatttattcctatattaaccatctaaaccaactgtaatgacatgtacactaatacagaattgaacatttgtagttgttggcagtgaacccagttgttggtgaatttaaagcttaaaatatgggaatgatttgctgctatatttcctttgagagagaaaggaggaagaaatagaacctaatagtgatcatgaattttagggaaagtaccgaagaaccatggggtcccctctggtttcttgtgttgaatgaggcaagggtaatcatctgattccgagctgaagacctctggtcctcttaaggagggagagtgcatttttagagcttttagcaaaatgtgaaaagctgatgtttgcgccttgctttgtgaatttggctttgttttacttatacattaactcatgtaatctcttaaatcttacaagcattgatccatttcaacaaaaaggtaaatttaaaatgcagactttgt

SEQ ID NO: 5350 - DNA, 1208 bp, Homo sapiens
tgatcttggctcactgtgtgtgatcacacagtggtgtgatcttggctcactacaacctctgcctctcagattcaagtgattctcctgcctcagcctcccaagtagctgggattacaggcgcccaccaccatgcccggctatttttttgtatttttagtagagacagggtttctccacgttggccaggctggttttgaactcctgacctcaactgatctgcctgcctcggcctcccaaaatggtaggattacaggtgtgagccactgtgcccagccaggcaaaggtttttaaagtcttgcaagatctacatgattcctaccctatctcctttccagcccttccccatactgatacaagttatagctttaaaaaaaataattgccactctcctgcttaaaatcctttgggtagtgataaaatctaagcaaaatgctggcatataagagccctcacaatctgggctcactctaccttcccagacttgacttctgcttacactgtgcatcctactttctgccacacttgttcctctggattagccaggcccttctgcagtctgcctttgcttaaggtgtttgtttgtctttctctggcctaactcccagtcatgggtaaacaactgaaatgtcaccttggtataactctctcctgtttcccctcaaagcagacagttgatgtgccctatggtcctggtcatagattcctacttgtataacagcactactatcttggactctgtctgcttatgtgctccaggagggcaggggtcctcgcctgactcactgaatgccttatctaaagtgccaggcacagtgtacctattcatctggtggatggataaagacagggactgtcttggttcttcctgtgtagccttagtaacttgtacctttcctgacatggcaggggctccaaaacatctgttgcaaacaatgtatatctaaaagacctctataaaaataattagaatgtaaaactgttaacagaatggaggttgagaaaatgactttgcaagtagcaattaacttgccaactcataattagcagtagattagaggattgtgtattttttaaatgtggtttaaatcttttcagcttgcagatgctagattttcctaagctctgcaactaactgaagaacaagtattgatgaagccttcacagttcttttttttttttttttgagatgtattttcacttttgtcttc

SEQ ID NO: 5351 - DNA, 1202 bp, Homo sapiens
gtttatcaaaattagaggaaaattgttgccttattaagctcgatagcataaacataagtgagttacacagcaatgcaaggaaaaatctaaaaaaaatactaaggatagaaaaatgaaagaataatgacaatagcagcaattaatgaattagaaaagcagaaaaacaataaaatgatcaatctaagagctggattactgaaaattgaaacaaaattaagatcaaaagaaaatatgaaggccagctctgtggctcacgcatgtaatcccagcactttgggaggcccaggcagtggatcaccagaggtcaggaatcagcctggccaacatggtgaaacctcgtctctactaaaaatacaacaactaactaggtgtggtgaggcacctgtaatcccagctactcgggaggctgaggcaggagaatggcttgaacccaggaggcagaggttgcagtgagccgagattgcgccactgcactccagcctgggcaacagagcaagactccatctcaaagaaaatatgaaattaggaataaaaagaggtatataaccatagacgtgttgggaatttttaaaaaacatatttgaaaagtaatatttttaactctgtgacaattcagttttaactctgtgacaattcaatctgcaaaatgaatcttttcttttttctttttcttttttttttgagacagagtctcactcactctatcacccaggctggagtgcaatgtcgcaatctcggctcactgcaacctccgcctcccaggttcaagcaattctcctgcctcagcctcctgagtagctgggattacaggcatgcgtcaccatgcccgactaatttttgtatttttagtagagacagggtttcaccatgttggtccagctgctctcgatctcctgaccttgtgatccacccgcctcctcctcccaaagtgctaggattacaggtgtgagccaccatgcctggccccaaaaatgtttcttaaatgaccaaaatgagcttcaaatggctaacaactataaatgacattgacaaaaacagaatttaaagaaagactcctccctcccccaaaatgcaaattccagacatatttatcactcaatactgtcaaactttgaaggaacacaaatgtcctatgttatctaatctatttcaaagcatggaaatgtcttgtgaaactttgcattttattttatgaagctagg

SEQ ID NO: 5352 - DNA, 1200 bp, Homo sapiens
ctgaaagcttctcgggttaccagctgtcttagcttgatgagacatagccattggcccagttagttggtcaacacaaaaacctgggagtaattttaaactcttctttttccattatttctcacatgcaatgttcattaagtcctgtttctgctagttacctctgatgttgaccattcaacaagtatttattggtccctcaacaaatatttatgagaccccactatgtgccaggtaatgagcatatagcagtgaataaaactggcaaaaattcctgtcctaaggtgctgatattccagtggcatgttggaaaccactgatctgttcaatgaaacctttgtcattgcaagccactgggaactggaggctgtttgttactgcagcataacctagtccattctgacgaatacaccagtaagcagtgcaccacagcagtgaggaaagagctggaaaaggaatgtatagtgttctgtgggaacacacaggaggggaggagagaacagacattaaccctataggagaggtctctgaatgatttctacttttcatctgcatcccccttgcctttccctggctcaggctttcctaacgtcttgcctgggctttgtcaatattcttgtctttgaacttctccctatgagctattctctacccttctaaaatgtaaatctgattgtgccactcccttgctaaatctgataatgataccctgttgcccataagaagaaagttagactctttagcttggcatactttgttcctcatgatgtagtctctgcaaacttcccaacttcccgaatactgggcctaactctgataacttgggattctttgaccatctgtttgttcttctctccatgcctttgtacaccctgttccctctacatggaatatattctccttttcctcctggaaaactcctactcatgttccaaggttctgatcaaatgtcctctccaccttgaagccttccctgatatctccaggcagagttaaggccctcgtccactgtgtgcctgaagattcctgctcatctttatttcccagtgctttgcacactgaaattgctgctagcccgatagtccttggagagcagggactggcctctgtgcctgacacctagagtagagggggtgtctgacacataataggtgttccaatcatgtgtgttgaatgaatgaatgagtgattcagtgacaaaga

SEQ ID NO: 5353 - DNA, 1199 bp, Homo sapiens
cttgggccctctcttcctcatgcggtctctcatcttcgtagtgtagttgaaggttctttacagtccgacagctagattccaagaggcaagaagagaaagcttcccaaactcttgaagccaggcttagaaactctaggacattatttctaccatattcatgtgggcaaagtaaatcgcaaggccctaccagattcaaggggagggaaagacagacttcacctcttgttgtgaggagcagatatatgtggaaagatgggagaaagtgttggtggcaatattggagactctctgtcacaaaggtagaagaggagtggtggcagaaacccaaaattatcctcaggcaaacaaggagctgttaaggattaggctgtggtttgcctgccagaaagtaactggtgtcctactcaggtaatagatacctggagtgttaaacttctccagtgtgtcctggggagtctgagctgaccaggccacttggagctatcaactttcatattcttcttttccaggttatgacacctggaaaaggcatggagagaagtgatgtgcacagcacactgcgaggctgtgcaggaccagggctgctattgccaagtggttaagagcatggctgttggggtcaaatgttgattttgtcaccaaaaagactaggcaattcatagtatcttatggaattccacctccttctttatttaatgtggatactcataccttctttatagggcaaaatagatcgtggtgaatagtatgagatccggaaccagactgcctgagttcaaaacctagctttcccaccaatcacctgcattaccttggaaaaaatacttaattaccctatgcatcagtttctgattctgtaaagtggagataataatataataatgtaatttagattggtgcaacctaaattgaaagtaatgacaaaaaccccaattacttttgcaccaacctaataatattatataataatattacaacaacaatattgtattattgtattatataatgtacatataatatataatatttaataaacataatatcacaataatcatagtgtacagagttgtgaggatccaatgggtttgtagaaacatctagaacaatgcctagcacaggattcacaatcagtggatgttatctacacttattagagtgtgttgatgaaaattaaaatgagataatgcttgcaaaagcct

SEQ ID NO: 5354 - DNA, 1172 bp, Homo sapiens
aggtcagagtctggatcaccttctgctggaggccacagcaaacctcctcacagcccactggtcctcaagaggtgccacgtctccacacatcagcacaactacgcagcgcctccctccactcggaaggactatcctgctgccaagagggtcaagttggacagtgtcagagtcctgagacagatcagcaacaaccgaaaatgcaccagccccaggtcctcggacaccgaggagaatgtcaagaggcgaacacacaacgtcttggagcgccagaggaggaacgagctaaaacggagcttttttgccctgcgtgaccagatcccggagttggaaaacaatgaaaaggcccccaaggtagttatccttaaaaaagccacagcatacatcctgtccgtccaagcagaggagcaaaagctcatttctgaagaggacttgttgcggaaacgacgagaacagttgaaacacaaacttgaacagctacggaactcttgtgcgtaaggaaaagtaaggaaaacgattccttctaacagaaatgtcctgagcaatcacctatgaacttgtttcaaatgcatgatcaaatgcaacctcacaaccttggctgagtcttgagactgaaagatttagccataatgtaaactgcctcaaattggactttgggcataaaagaacttttttatgcttaccatcttttttttttctttaacagatttgtatttaagaattgtttttaaaaaattttaagatttacacaatgtttctctgtaaatattgccattaaatgtaaataactttaataaaacgtttatagcagttacacagaatttcaatcctagtatatagtacctagtattataggtactataaaccctaattttttttatttaagtacattttgctttttaaagttgatttttttctattgtttttagaaaaaataaaataactggcaaatatatcattgagccaaatcttaagttgtgaatgttttgtttcgtttcttccccctcccaaccaccaccatccctgtttgttttcatcaattgccccttcagagggtggtcttaagaaaggcaagagttttcctctgttgaaatgggtctgggggccttaaggtctttaagttcttggaggttctaagatgcttcctggagactatgataacagccagagttgac

SEQ ID NO: 5355 - DNA, 1431 bp, Homo sapiens
attgttggtctgttggcgttctcaggagccctttaccagtacccttaggccccagacgacctactcctcaagctgatcatatctgctggctgtgtccctgctctgggcccagcaccctcatggttttccataacacgtatcccaactcctgctgatgggaccctcgtgagctgtctgtgtagggagcatggctgcccctgggtctgctttcctgcccctgacccacaggaataggatgtggcagagtgggggccagatgacagagatgctggtgctctctgagctgaggcccactgctgacctgctggtggcttgtcctgctcttggatcataggcactgggacatcctgccttccttcagtgtcccctcccactccctctccttcagcatcagaggaatgaaggaggcctggaggagtagcccctatctaatagagacaggagtgggctgggtgagcatggggtggtcgcagggggaaggggataggagatggagagaggaacctgctatctggtgggttccaggatggtgacagacagtggcagaagcagtgcagagaccttagtttgtgctggaggttcagttaatcactggtgaaggcagacatcactgcaggagaccagactgttatgtattgtctgtgcattcatattagtacacagggaagatcttgggctccgagacctaggcagatcttgcctcccatctgccgaccctccgcagatgctacacattatgccaggtaaacacattatcaaggagccttgggccgtgttagaggaaggctccttgtgcctgtgaggagtttgcactaatgctatgtgtgtttgtgtgtaaggcttgcattcactgattcactgtagaggatgacttgaaacccaagtcatcagctgggcagtgcatgggctgctcgcctgaatggtgaagctctaccaagtggtttccacctagggcctggcttagctggcctcagatgcccttctcagttctgctcaagacctgcctgcggccttcctcgggcttgcttgcccagaatgctaggaatggccagggatactgcctgggcatgtgtttggcctcagccaaggtcaggctgtcaggaaggaagaagggggaggggcacacttgcctgggagggtggaggaggaggggtccaagccgccacagcctggcagtccttttttgtgcaaaggagacccatcagctcctctgcctggaacacccccatttactcctccgcagttagaggggtgggaggtgaggaattttgtgaggggaattatctctgatcttgatgtgcacattcctcggcagtatcccgggcttggccagcttgctgacacctggctggaataacaatgagcgatgcttctggaggatgctccgctggggagggctctgctgaaccagcacttactccctgcttttcg

SEQ ID NO: 5356 - DNA, 1239 bp, Homo sapiens
accctaaacccctcagctccctgcagggacctctcagccctgcaggggagcccaggctatgtgccaggcctggccttgctgtcagctttctaagccagtcacaaacattctcctctcaactttataatggatgccccccagcctcctctcccctctcagggtgctcctgaggctatgagcagctggcagttccctgtctgagaggtccttcgtaccgcaggagaggcagctctcacctgaaggcctccctggacaccggtctcaactttgtgtgttaccagttatggagaattatttttagtgagttacactctgttagggccaaacacaaggaggaaagagtgactgaatactgctctgagtcagtgactgtgacaagactgtttttttcttcttccctgttgcaggcctgatcttttggccagaaggagattaaaaagatgcccctcaagatggctgtgcctgtcagctgcatggagcttcgttcaagtattttctgagcctgatggatttacagtgatcttcagtggtctggggaataacgctggtggaaccatgcactggaatgacacacgcccggcacatttcaggatactaaaagtggttttaagggaggctgtggctgaatgcctcatggattcttacagcttggatgtccatgggggacgaaggactgcagctggctgagagggttgagatctctgtttacttagatctctgccaacttcctttgggtctccctatggaatgtaagaccccgactcttcctggtgaagcatctgatgcacgttccatccggcgctcagctgggcttgaggtgaggctgtcctggctggtcacggagggttcactgggatgtggctggtgttctcaacgaggtggcatttaatgagcaccctctgtgtggttggcgtgatgctgggtgcctgggggagacagatggaactaaagaggtccttcctggaagccgttactgttccctgccctgacgtgtgttattgtacctgtcaccattttctgatgttcccagtttacgtatctgtcaccatctacctccctataaagtgcctctgctgttggttctgtgtccttaagacattgtgtggcatttggcacagtctctcatgctgcagaaagggtaaattaagacaggattgttaatgaatgaagacatgggagattcaatggaaagatatgcatggggggataatttcttggctctgtgctcagagctaggaa

SEQ ID NO: 5357 - DNA, 1209 bp, Homo sapiens
tacagtttataaagtgatttctcatcctttctcctttcttgtattgcacaaatatcgaacgagaacctgcagtgtgccactgtgcagggtgcctagaataaaggagaaaagccactgtgctttctctgaaggaatcacagggagtgaagctagcttcatggatgccagaatttcacagatgaagggactggaggcttggagcaattgcattgcttgagatcccccctgctcatggatggtggctcccaaatcaggacatgagtcttctgaatcccttaaacctgccctgtgcctgcctgttctcccagcacattctctgtactctcttgtgctgctcctcaccccctctccaactgtctctccttctccaccattgtcctctgcccactcctagtcccttctttcagctctgtttcttctgaaaatgaggatctttctctctacagtgcctcttgtgggacgggttctgctgatgggggctgtgtttgggatctcgcctggaaacacgatctctccaactttccctgggagcagagccttgggtctcactgaacccacctccccagcaccttgtgtggtgactggcaggaggtagccattccctcctgtcctctctgcccttgtccactttcctgttatgagtcagttgctgagataggctatgaggagttaacagagtggataaaaaagagctttgtccttctttaaagccttcaaaatatacagatgtattagtcagggctttccagagaaacaggaccaatagaacatgaagatagatgcgtatccatgtctatatcaatatctaccttgatatttatatctatatctaggagatttatttattataaggtattggctcatgcaattatggacccagaggggtcctgtgatttgccacctgcaggctggagacctaggaaacagctgtcgtgtcacaaagggcagagggctggagaacctgtagtgtagattccagtccagattcgaaggcctgaggaccaggaatgccaagggcaggagaagatcgatgtcccagaacaagcaatcaggcagagatgaaattcaaccttcctgtgcctttctgttctattcaggccttcagtgggttgaatgaggcccaacccacattgaagaggaccatctgctttactcagtctcctggttgaagtgataatctcatctggacatactcagaaatgctgttta

SEQ ID NO: 5358 - DNA, 1208 bp, Homo sapiens
tctgagtgaaaagggaactcagggtgatattttgagcaggtgagtggcataaaataatgtatgttttaagagattcactctggatgctgtgcttagaatagactctagggtgttaaggaagaaaggagaacatcaggtggtttttgcagtaatacaggcaaaagatggtggtgccttgagccagaagagcagtggtgtggttggtgaggagcagttggattctgatatttttctgaaaatagagccatcagtgcttcctgacaaattgaatgtgggatatgagagaaagaatgacagcacagatgactcctattcctggtttggcctgagcacaggatggatgagattcctgtcctctgagatgggggagctgctggttacacagttttaagagaggaccatcaggggttcagtttagggcatgttacgtttgagaagttcatgaagtatccaagtggacctatcaagtagtgagttgaaatactagtctgggacttgggagatcgggctgggcagaagatgtaacatctgggagttgttgacatgtagatacatggtattggatgtgagggcgatctgactgcgacatctgtcaccccattgatcgccagcattgattcggctaatctggctggctaagctggtgtcccttccttgctcacagctccaagtgcattcctcccaaagctgcacactaggtcgaagaggacgaccattccctgacagagaaggactggtcttcggtcaagggtatatgattagctgagctctcctgctagaacatccagacaagctctcaagacccattagatatatggtatttaagaaatgcaacgtagctgacaactattccaccactggctttcctaagattaatttcaccttattttggcctaagtccaagaagtagaggttttcccttcctttctcctccctctgcttcttccatctctctgtcctaccccagtgagtccttgcttctgtatagaaccattcaatcacaattgaactctcttgtgcttttctagtttatccgtctgtctctacttagtttccccagtgcaatgactgcacactttgttgggattttgcttcaagccacaagggaaacaataaaactgagggatgtaggaaatgaactcatggacttggctttgggagactgggtcacacaccactgagaaaccagggacggaggatttttgcac

SEQ ID NO: 5359 - DNA, 1162 bp, Homo sapiens
ggggctgggggcggcgcgcgtgcgcagagcacttccttgtttggccccgtgactgcagcgcgagcgccgcccgcccgcccgcccgccgcgggagtgtgcgctcagtcagtcaggcccgcgccgccgcctgtcagcgcgtctgaggaggcagcgccgggcgccccagccgcccagcccgcgcacgccccagcggccggccggagcccagacccccgcgaagaccccgcgcgcagccgcgtcccctcccccgccgctgaggagctgccgccgccggcatgagcagagggaggcgggtcccggagagccccctgcctcgcgcgcggcttggagtttgaagggccccgcgccgagccccgccagcgccgccgccgcctgccttcgcccgcctccttccctccctctcgccgctgccggggacgggagccgcgcgccaggccgggcggcgggtggcgggctgcgcgccggggttcatgagcctccgggcggcccgcggccccgggagcctgcgccgtgactcaccccccgcccccgcttgtgtctcgtccctcccggcaggatgccggaccagatctctgtctcggagttcatcgccgagaccaccgaggactacaactcgcccaccacgtccagcttcaccacgcggctgcacaactgcaggaacaccgtcacgctgctggaggaggtaggtcgggccgggacccccgccgtccacgctcgccgctgccgccgcgcagctggaggatctcctctccgagctgggaggaaggggacgcgggggccgggggcgccacaccccctcagggagccgccgggtgaataagggacttcggacgggcggcgccttccccatctcctcgccctttctgggtcttgcgggttgaaaggcctggggactggaggtgggagaggactgagcgagctgtggacactccagggaggacagaagatggaagtcctgtccctggcatgcactgttcggcgcttccacatcttcgtgaccctcctgtaaccctcgaggtaggtggcgtcaggccaccgagggcccagaggcgaagtagtgcagccaaggtcaccagcaagggactaggagatgggcagtgaacgcacccctcagcggcccgactggaccaggcaggcgtagctgcggagacgagggccgttg

SEQ ID NO: 5360 - DNA, 1183 bp, Homo sapiens
aaaaatatttcagcaaacgttgggcatcatggtttttgaaggctttagttctgctttctgcctctcctccacagccccaacctcccacccctgatacatgagccagtgattattcttgttcagggagaagatcatttagatttgttttgcattccttagaatggagggcaacattccacagctgccctggctgtgatgagtgtccttgcaggggccggagtaggagcactggggtgggggtggaattggggttactcgatgtaagggattccttgttgttgtgttgagatccagtgcagttgtgatttctgtggatcccagcttggttccaggaattttgtgtgattggcttaaatccagttttcaatcttcgacagctgggctggaacgtgaactcagtagctgaacctgtctgacccggtcacgttcttggatcctcagaactctttgctcttgtcggggtgggggtgggaactcacgtggggagcggtggctgagaaaatgtaaggattctggaatacatattccatgggactttccttccctctcctgcttcctcttttcctgctccctaacctttcgccgaatggggcagcaccactgacgtttctgggcggccagtgcggctgccaggttcctgtactactgccttgtacttttcattttggctcaccgtggattttctcataggaagtttggtcagagtgaattgaatattgtaagtcagccactgggacccgaggatttctgggaccccgcagttgggaggaggaagtagtccagccttccaggtggcgtgagaggcaatgactcgttacctgccgcccatcaccttggaggccttccctggccttgagtagaaaagtcggggatcggggcaagagaggctgagtacggatgggaaactattgtgcacaagtctttccagaggagtttcttaatgagatatttgtatttatttccagaccaataaatttgtaactttgcagcggcttgtgtcttttttctgtccctgagagattgtgtgtgtgaaacattgcagtgcagggatggctgtttcactggggggttgcccgtccttgacacctaggggaccccagcccctcatctctggaattctttcctcggagcatcacgtccagcagaaatttaagtcagctcatatgttaattctaatttccca

SEQ ID NO: 5361 - DNA, 1181 bp, Homo sapiens
actgtgcctatcttttgtgagtggttgtgagtctcaataaaatcacttgccatgcaatccctgcgttgagtgctggcggatgtaatatgctcttgggttgtagagtagcactggtgtgtgtggtagacccgcagccttgaggttgagtaccacctgcctccacagaactctcccctctaagccccatcccttccttctgaaatggagctgatgccattcccccattcccctactctcgagctccccaggctgtgcagcgccaggtagagggtgtatgtatgtgcttggaaggatgtactttgtctggttttgatgaagctgatgataatgatggtgctgatgagaatgctagtgttgatgatggtgaggggggtcgtggtgatgttgatggtggtggtggtggtggtgatggtggcagtgctggttgtggtggtggtgatgactgttgatagtgctggtggtggtggtgttggtggtggtggtaatggtgatggtggtcgtggtgttgttgttggtggtggtggtgttggttgtggtggtgttggtggtggtggtggtgatgactattgatagtgctggtggtgatgactattgatagtgctggtggtggtgatgatgatggtgatgatggtggtagtagtgatggtggtgatgactgttgatagtgctagtggtggtgatgatggtattgatgatggtgatgtgatggtggtggtggtgatgactgttgatagcgtgagtggtagtggtggtggtggtgggtgatgatggtgatgatgatggttattttttacagaccacagatttaaatgagaaagtcaactgattatgttctctttctattaaggacaaaaggagttattcttgtcctgtttgtgaaaagtctttttcagaggatcgattgataaagtcacatatcaagaccaaccatcctggtaaggttgtgcattttggagtggaagattaatgttaaaaatgcttatgtttattttaaaacaatgttttacattaactgcactatatagaaataaaaagggatgaagctgtgaatatattcatgggaaacaaacatctttattcgacgctgggaagttgatgtaattatttatttccttttgttcttttatctggtcttcagatgcatcaaccctcacccctgcaatttcagtgataccctctgc

SEQ ID NO: 5362 - DNA, 1149 bp, Homo sapiens
actgggcccacgtacataccttcactgctctaaactccaggttttcactttgtaaaataggcacgacactacctcccagacaccagacacacgatgaggattcagtgacctgcatcaagatggtgcctactagactccaggccctagagagctggggcatttatccttgctgggtctccagtgcccagagctgtgtctgaaatgcaaaagacaaactgtgtttgttgaatgaatgacgtatgtgaaagctcttcctagcagtcttatttggagaataaagctaatgcaggaatgtgtggagaaatgggacaagaggattagacagggactaggatgaagggcctcatgcatggctaaggagtgcaaatgtgttttaaggttctggatcacagctgaaggatgtcatgcaggagaatggcgtgctcagctctgttctagatggatcgcttgtgggtactgaacagggaggttgaaacgttttgtattatgtgagtttagaattacatgtggtctttctagacaccagccttactaaaatgcattgccctgactttgaagttgtggctgaggatgagatcactcagggagtgtgtggaatcaaaagggaaaggacaggggagggatccttgtggctctatcaccattgaaaggttggtcaaaggaaaagaatccctcagttcttcctttccttgcttacttagcatgactaaataaaaagtttactgaattctgtaaattacacctaaaactgtttatttgaaaagtttttttttttttttggtgatgcattttttaagtaggaatcttaaaactcattacttccagtgatgcttacctgcatgcttcttgagccataagctgatgagaatttggaggagagacctttggtacagagagctcagcaagtgtggtggagtagctggggtgtcacaggctcctccgtccggaaagcttcctggctcctcaaagcttctcttcattggtgaccacgtggcttccaaattgacttggacttggttcacactttccatttagacgacgcgctttgtggcttcccatccacaccagcacatgcatgctgaaactgctgctttcgttctgaatgtttttggttagtgttgctacttctggtagtggttggacttagat

SEQ ID NO: 5363 - DNA, 1337 bp, Homo sapiens
atttattcttgcattgctgggaaacattgatgtgtggggactcactcctctccgtgtgctcttttgtcagatgacttccatagatctatgcactgagattcgtagaaagctgttggtggtggctctgctgggcgtgaggccgtcggtcacagcgaaggagcttgcctggccctgggaggcccaaggatagcagggccagcagagggcatgggccgttcttctggggtttgcatttggggccccagacttgggtttgccaatctagaaactgttgcactaagagtgacaccacggacgattttgaaggctaacaacagacaactctgtttgtgctgagtgggctttttgtctctgtacacagttttagtaagactcaaatccatgttccgtgtagaggcgtcaggaaggaggcgagcctcccctagtgctgctgtgcgctccgtaggtcccctcttcctgctgctgttccctccccggccctgcgcgacacttacctcggcactgtggtggggtggggtgccaaaggagctgcctcctgctcagcggcacccccccccccacctttgtgctcagctgctttggaggcagcaggaggggcagcaagccgcaggtcgggggtctcccgatacctcgcctggatattggcggcaatgacaaagggatgactattatttgtgaagatgtgtactcagagtggtgtgtgtgtgtgtgcatgcgtgtgtccctgtgtgtgagtgtcttattaatggcattagtctcttctggctgtatttttttttaatctttttaaatgacagaagctcccactctaagaaatggcagttccttttgttttagtggcaagtggcactttctcctgttttcagaaggatacagacatgctcgtagcttaaattaatggatgcattcaagctaaggagggaatcttgtgactaataacttttcaaatctgaaattagattagtttccagccatttttacaatcatctggaaccatgtgtctcaaaggtgtgtttcttccacctgcgtcaggctgtctgggggatggcggttcttgtttaacatgcagatttgtgggcctgctgccacctcctgcgtgcggtacttcagggatggccagggcatctgtgtctaagcgatggcctgcagccctgggctccctggggtctgaggacccagctctggtggcacccagcagggaggaggtgcttcctgagcagatgcctgagacagactgggctggcagaaaagtaggactacaatttttgttttttttaatcattttgaaggaaaactttcatttttagtgggccagagtacttcgaaaagggtacttt

SEQ ID NO: 5364 - DNA, 1144 bp, Homo sapiens
tggagtcaaaaggctatattccagccaggcacagtgactataatctcagcttctcggcaggttgaggcagggagatcgcttaagtctaggagtttgagactagcctgggcttagcaagaccctgtggcaaaaaaaaaaaaaaaaaaaaaaaaaaaaacagtaaaccctaaagggaggaggatcaagtacccagaattcctacaatatattatctaaaatgtctaatctccaacaaaaaattacaagacatacaaaggaacagaaatatatatgaatgatagacaaaagaaaaaaagactgttctggctgggcacagtggctcatgcctgtaaccccagcactttgagaggcagaggtcaggagttcgagaccggcctggccaacatggtgaaaccccatctgtactgaaatacaaaactggcatgcctataatccaggctacttgggaggctgaggcaggagaatcgtttgaacccgggaggcggaggttgcagtaagccaagatcgtgccactgcactccagcctgggcaacagagcaagactccgtttaaaaacacacacacacacacacacacacacacacacacacacaaaccgtattctaagaacttcctgtagctagatgtgagcaaagcagagcatgtttgtggggaaatggaaaatacttctcactatgtggtgtttttttttttgtttgtttttgtttttaacttaataaccatgtaattggagcatcttcatttggtcctaaacctgtctgttgggtaacctctgagatagtttgcctggtgctaaacttggaggccatgatggcatcgaggcactttcccactcaagtacctttcctttttttttttttttttttttttttcccggaaacagggtctcacactgtcacccagggtaaagtgcagtggcacaatcacggctcactccagccttgacctcctgggctcaatctgtcctcccacctcagcctcccaagtagctgggactacagtcacgcaccaccacgcccagctaatttttgtatttttggtagagtttcatcatgttggccaggctggaacaagtacctttcttaatgcctgtgagatggtattgtatttttctctttgcttgttttccttacttagactgagc

SEQ ID NO: 5365 - DNA, 1123 bp, Homo sapiens
agctctccctgccctgaacgttcggatggacagggtgaagtgggggtgctgacagtggcctgggactcggaggcatcaggagggcctgtggagctcagcctgcccacagggagtgggaggtggctgagcgccctgctcggtggacacctaggccacagcaggttgtctttgacacctcgctgatgctccagggtggcggcatgcgtggggtggggttggcctagaggagcaggtcccagctacaccaggcggctctggtgtctctgctgcatggaggacgctcgcccttgccgagcaccctgacctggccttcaaggtgggtgagttgcctgcttgcctgggctgatgctgcctcccgcaggtgcaagcggttcagggtgccagtggagaagatctacagcaaaacacagcgggagaggttcgcctgggctctcgccatggcaggagaagactttgaattctaacgacgagccgtgttgaaacttcttttgtatgtgtgtgtgtttttttcactattaaagcagtactggggaattttgtacaataaaatgtgtgcaagtgcttgtacatcactagaaaaagtccccaggccggccgggcacggtggctcacacctgtaatcccagcactttgggaggctgaggcgggcggatcacaaggtcaggagatcgagaccatcctggctaacacggtgaaaccccatctctactaaaaatacaaaaaacttagccgggcgtggtggcgggcgcctgtagtcccagctactcgggaggctgaggcaggagaatggcgtgaacccgggaggcggagcttgcagtgagccgagatcgtgcccctgcactccagcctgggcgacagagtgagactgtctcaaaaaaaaaaaaaaaagaaaaagaaaaagtccctaggccaggcacagtggctcatacctgtgatcttggcatgttagaggcctgaggctggaggattgcttgagcagacattgaggctgcaatgagctgtgattgcgcccctgcactccagcctgggcaacagagcaagaccccatctcaaagagaaagaaaagtccctgacgcctgccgtgtcctttgaagcctccaccccgagcatggagtctgctggg

SEQ ID NO: 5366 - DNA, 1159 bp, Homo sapiens
gggcgggggcctcttgcagcagcccctgagccttgggctgccagggaagctgttgggaaggcgggcctgtgcccactgctgagttagctttaatgatctgggcagtcagagctgtacatgatgcaagctgggcaattagacgcaaccctcgaagctgtgggtaaattgccagctatcaagtggaagggaactcgggcaaaagattcctgttaattgcatgaaacattcagcaagaaaaaagccgtcgtgtctatcaccctgcaaaatgttatgaaaacagtgactaagtacataagtctgtctgggcacagcggtgaggaggtgccgcttgaggaggtgagtgctccagcgcccctcccctgtgcagggcacaggccaggagcctcccagccccgcccctctggcctgggtggaggtggcccatctgccttcctcactgctctgctggaagtcagtcagccacctcgagtccccctgttgcggatactgtctaggggactccaaggcatccccggctgccagacccctggcttctcctggttttcctgtggtgtgggcattcccttgtttctccagatggctggagggtgtgcggggctggtgcccgcctctcagaggctgcactggctagctcctgaagcgtcggctgccaggcgccctggggatgtgtgtgccacatgggttgagggttttatccacggggcgatggagggtcttcaagctccggcggaggcggtgggcagagctggcactgtgggtggcctctctgaccctacccttgccggccttccctgacccatgtctgtgccctgggttttctctacagcgtccagcctgcatgccgtgcggactgcacccaccagcaaggtgatcaagacccgctaccgcattgtcaagaagacgccggcctcgcctctcagcgccccgcccttccccctgtctctgccctcctggcgggcccggcggctctcactatccaggtaggaaggcttcctgcaggctcctgcaggcctgggaactgggctgtctggccctgccctgagggctgcagggtagaatccaagggccagggggagctgagcacatcccagaactgcttggtgttgggctcgttggctggggaccagcctgatttttctgtgtctttagcaatttctgc

SEQ ID NO: 5367 - DNA, 1197 bp, Homo sapiens
gccgcgcacgcgcagaacgaggcggggacgtcactagtgagcgccgggaagtggcctggtaacggctgggaagggactgcttgggctctgggaggccgcgcgggcccagcttgtgcagtccgggatcgcgtccccttgggagacttggcgaggggcgagacctggggcccacccagcccataccgcagttccttcccacagtccctgcgtttcatttcgccccagttgagtgttgggggggggggggtctacgcggggacccatgggagaagggccagttaacaattactcttgacccaggagggtctgtgaaacctcttactgtggccagaggagaagacatcggagagcaaggttccctggatagacatgttgaacctctgaaaacatgaaagtttttagttcgtcattggaaacatgtacaagtgtaaacctctgtgcgctgttggtgggaatgtaaatggcgcagcaccgcagaaaactatggagattccacaaaaggttaaaagtagaactaccggatatgagggcgatctggctgcgacacctgtcatcccattgatcgccagggttgattcggctgatctggctggctaggcgggtgtccccttccttcctcactgcttcatgtgcgtccctcccgaagctgcagctcagtcgaagagaacgaccatacccaatagaagagctgggcttccctggtagaacctccaaacaagctctcaaggtccatttgtaggagaaggtagggtagtcaagattccagacacatccaaatgaggcgctgcatgtggcaatctgcctttctaggagaaaacaaaaatggaactacggtatgatccagcaaccctacttctggctatattcccaaaagaatggaaaccagagactcaaacatatttgtgcccccatgttcactgcagcatttttcccaatagccaaaagacggaaacaacccaagtgtccacgggtggatggaaggataaacaaaatgtgatccatacaaacaatgaaatatttttcagccttaaaatggaaggaaattcggccgggcgcagtggctcacgcctgtaatcctagcactttgggaggctgaggcgggcggatcacgaggtcaggagttttgagacaagcgtggtcaacatggtgaaaccccgtctctgctaaaaatataaaaaattagccaggcgtggtggc

SEQ ID NO: 5368 - DNA, 1166 bp, Homo sapiens
ctcaacgccctcttcctgcagctggtggccgtggggggccagccacgaatgaagctgaccgaggaccccgagaagcagacgttgcctgggagcaaggctgctttccggctcctgggctctgacggtgaggccctcccatcccccctgctgtccaccttcaaagcaccagggcccccgcttattcttgccccgtccacacagggtctccactcatggacatgctgcagttagcagaagagccagtgccacaggctgggcaggagctgagggtgtggcctccaggggcccaggagccctgcaccgtgaggccagcccaggtggagccactactgcggctctgcctccagcagggacaggtggctgccccaccgccctcatcctgacccccagccccggtagagccctgactgggagctagccccaagcttctctttccttacctcctccctgcagctgtgtgagccgctcccatccctggcagagtctagagccttggcccagctgtccctgagccgactcagccctgagcacaggcggctgcggagccctgcacagtaccaggttggggggaggcccaccctgtcattctgccctgtgcgcccccgccctcaccctgcccaccgctcctgtcctctgctccctgcaggtggtgctgtccgagaggctgcaggccctggtgaacagtctgtgtgcggggcagtccccctgagactcggagcggggctgactggaaacaacacgaatcactcacttttccccacagcttgtcctgtgttgtttgtgtcgtttgttcacccagcccacgggctgcgcctcccgggctgcggctgggctggagtcgggaatctgagctcgaggtagcaggaagatttgcatcccagtgaaagcacaggccctgccggcgtgggagacagccctgtgctgaagcccgaagggcagtgaggagttccccggctttgggtaggctgtggggagtcagatcccacactagaactacaaagccacaggcagggagggctttggtgtctgccttggagttgagggagttgctgcagacctttccttgctagaggcaggctggggacaggacagggttgggggtagtgccaggtaagagggtccagccgtggccctgggctcccacgcctgcctaggcactgcccccc

SEQ ID NO: 5369 - DNA, 1199 bp, Homo sapiens
ccgagtagctgagactgcaggtgtctgccaccaagcccagctgacatttttttttctttttttttttttttttagtagcggcagggtttcgccatgttggccaggctggtcttgaactcctgaccttatgatctgcccacctcggcctctcaaagtgctgggattacaggcgtgagccactgtgcccggcccagtctaggggttttctgtcacgctcctcaaaattcttcccgcctcaccactgcccaactccaaagccatctccacattgttaggcattccagcagcaccccacttcctgggccaggatctgtgttggtttccacttgatgttgctgtaacgttgccacacttccgtggcttaaaacagcacaagttcctcaccttacagttccgggggccagaagtctgagatcatcttatggggcaaaatcaaggctgtggtccttctggtgtctctgcggggagaatccgcttccttgtctcttctggctgctggaagctgctcacggtccttggcccaaggctcccaggcagctgtcttgtcactcagcctccctctcccctccctcgctcctgctgcctagtgtgggcccttgtgatgacagtgggcccacctgggtgatccagcatcctctctgccgcttaacttaatcttatcacatctacagaatccctttgccatgggagaccatatttacaggctctgcggactcgtatgtggctttgtgggggccattgttctgtctgccacagccacagccacctaggggtgtgctggctcccgggccataagctgggcatccctgggtgggtgggcccaggaagggctgccactcctgtctgccaggtggggtgctcctttgtgccttgcgttctgcccactggcttgcacccctggcttgcccaggcacctgaccaagtccaggctaggcagacatgagattaagggagcacagatttttgcgcccaagtcaggcatattgcactccagtgcccagaaggcagcggtcgggggcttggccctggggctgcaggaactcttcagccctggctgtgtggagtcaaccctaaggtgtctctgggacaggcaggtggtcgcactgttagggcttagggactggtttgctgctataacaaaggtccatagactgggtgacttaaaccacatgtattttctcacagctctggaggctgga

SEQ ID NO: 5370 - DNA, 1096 bp, Homo sapiens
aaaaaaaaataacaaaaaaactcagaaatgctaagtgtacttatttgttgaagaaacttgttacatattactaacatcttttttttttatgagaaatacttttcccataaccaaaaaattcagtgagcagaatggccttgcttgaggtttttgcaaatctctcgggtgtctggcttagtgggaggcagctgggccctcatacctgcctccgcacttcagctgtttgacataaacccagcttcgtgtgagtgaaagggaagggcctggggaccctcagaggttctcggaccacactttgagaactcctcgtctggaagacaggcctggggatgccatgtggggtgagggcttacgggcttggtgtcgctttgtggagaaccgctggtgtctgaagcgggtgtcagccccactgcaccttggtgcttctgggctgtcctgatgccgaggcccacttcccagccatgctgactttgcctctttcccctcccagcagaaaaatggctacaaacttcctagcacatgagaagatctggttcgacaagttcaaatatgacgacgcagaaaggagattctacgagcagatgaacgggcctgtggcaggtgcctcccgccaggtgagagctgcacgtggggcggctgggcggctctgctgcccgacaggagtggccggggcacacaaagcggattcagccaggccaggaaggcagaggcaccctggcccagtggctctgctgtgggtgctgggagtggggtctcggggcaggcggccttggccgggcccccgggccgggtctgctcagggccctcctgccggcgcctgtgcacttggtgtggggccaggcctggcactccttcccccgcagacatgggcgcctttgcctgtcgtcacagcctcaggcatctcccgcttttctggcccgccaagctctcgttctgtgcagtactttcttgctgtctctatgtgagggttcatggggttttttggtttgttttttaattaaattcttttttaataataaaaaaaagactggttctttctgcactgtctgcaggagaacggcgccagcgtgatcctccgtgacattgcgagagccag

SEQ ID NO: 5371 - DNA, 1159 bp, Homo sapiens
gtactgagattacaggcatgagccactgcgcccggcctgttttctcttcacaacaaaacgtccccacatgggcttgacttcgaagtcctcgaatgtcatctcatggaagccccactggggagcatcctcagcccctgcccagggagggcagccacggggagggcgggcacggggagggtgggcacggggctgcggccacccgctgtgttgcaactctgccctctgcttgctttttatcgctgtgtccggaagatgaggagcgggaaggcctcctgcaccctggagaccgtgtgggaagacaagcacaagtatgaggaggccgagcggcgcttctacgaacacgaggccacacaggcggccgcctccgcccagcagctgccagccgaggggccagccatgaatgggcccggccaggacgaccctgaggacgctgatgaggcggaagcccctgacggcggcagcaggcgtgatcccaggaagagccaggacagcaggaagcccctgcagaaaaagaggaagcgctcccccaagagcgggctcggccccgcggacctggccctcctgggcctctcggccgaacgcgtgtggctggacaagtcacttttcgaccaggcagagagctcctaccgccagaagctggcagatgtggctgcccaggcagcctggcctcctgccttggccccttggggtctctgcacccatggaaaccaggtggcctgccaccacgtgacctgggggatctgggtcaacaagtcctccttcgaccaggctgagcgggccttcgtggagtggtctcaggccctgttgctggcccccgacggcagccgcaggcaggggactcccaacacaggccagcaggtggccgtccccgacctggcccaccagcccagcccaccggtcaatggccagcccccgctgggcagcctgcaggcactggttcgggaggtgtggctggagaagccccggtatgatgcagccgagaggggcttctacgaggccctgtttgacggccatcccccagggaaggtgcgcctgcaagagcgagccggcctggccgagggtgcccggcggggccgcagagaccggcggggccgcaacatcttagggaacaagcgggccgggctgcgacgggccgatggggaggccccctctgccttgc

SEQ ID NO: 5372 - DNA, 1345 bp, Homo sapiens
ctggccgaggccccttcccctgcgcccaccccgtcgcccacccctgtggaaggtctgtgggtcagggcaggtcgggggggtcagcctgccgcatgggctgcttccaatgcccgcttcttgtccccccagacctcggcccccagaccagcacctccccgggacgcctggtgaggagccggtggctatgccttcccttcacccccgaggcatgggggtggggtctggcctgcccccacccccgtggccctcatccccccctttcctctcactctctgcctctcccctcacgctgtcctttcaagcccttgtctggaaagaagtttgactacagggcctttgcggccctgccttcttccagacctgtctatgacatccaggtacctggcctccaggcctctgcatgcctgccaccctgtccgtgcctgccaccgcccccatccgctcccgcagggcctccccacgctctgccgtggccctgcctcttcaccccccctcccccttcagccgggctctgtgggcctcagggctgggagcccacccgtccacctgggtggtttggggcagggctggcaccggcctgaccaacactctccccatcacagtcaccggactttgctgaggagttgaggtccctggaaccatctcccagccctggtgagttggggccgggctggggtgagctcccaggagcccagctgccctcagctcactgcccacctgtccctgccctccaggcccgcaggaggaggatggagaagtggctctggtgcttctgggcaggccctcacccggcgctgtgggccctgaagatgtggcactgtgcagcagccgccgccccgtaaggcctgggcgccgtggcctgggccctgtgccctcctagaggagcaggcacctcccccagacttggggtgggggccctgccagctccagcaccacccttgccccaagtcttttaacctgggtgttagcattttaaagagaccccacaggagttctggcctgtgactaactaactgccccaccccagccgagacctcggcgagactgtaactagtgatgtttgtacaaccaaagactctattttgtggtttaaggagaataaagttgactacattttacctcccgtctgcctgtccatcccccacccactagcacagacccttcctgccctccgaggcgaggctgagctccgagggctgcaccctcaccgtccctcccacgtctcccgctgcgcctcactgcgcacgggtcggccgggcaggctgcccatccccagcagggcctcccccaagtgcctgcagacccatgtccgccggccggggcccgggactgccggagtcctgga

SEQ ID NO: 5373 - DNA, 1175 bp, Homo sapiens
ggtggccagcatggaggaggcgcggcggcggcagcatgaggccgaggagggcgtgcggcgcaagcaggaggagctgcagcagctggagcagcagcggcggcagcaggaggagctgctggctgaggagaaccagaggctgcgtgagcagctgcagctcctggaggagcagcaccgggccgcgctggcgcactcagaggaggtcactgcctcgcaggtggctgccacaaagaccctgcccaatggccgggatgcacttgatggccccgcggcagaggcagagccggagcacagcttcgatggcctgcggcggaaggtgtcagctcagaggctgcaggaggccggcatcctgagtgcggaggagctgcagcggttggcgcagggccacaccacggtggacgagctcgcacggcgggaagacgtgcgccactacctgcagggccgcagcagtatcgcagggctgttgctgaaggccaccaatgagaagctgagtgtttacgccgccctgcagaggcagctgctgagtcccggcacggccctcatcctgctggaggcgcaggcggcctcaggcttcctgctggaccctgtgcggaaccggcggctgaccgtcaacgaggctgtgaaggagggtgtggtgggccccgagctgcaccacaagctgctgtcggccgagcgcgccgtcactggctacaaggacccctacactggccagcagatctctctcttccaagccatgcagaagggcctcatcgtccgggagcacggcatccgcctgctggaggcccagatcgccacgggcggcgttatcgaccccgtgcacagccaccgcgtgcccgtggacgtggcctaccggcgcggctacttcgacgaggagatgaaccgcgtcctggcggaccccagcgacgacaccaagggcttctttgaccccaacacgcacgagaacctcacgtacctgcagctactggagcgctgcgtggaggaccccgagacgggcctgtgccttctgccactcacggataaggctgccaagggcggggagctggtctacactgactccgaggcccgggacgtctttgagaaggccaccgtgtctgcgccgttcggcaagttccagggcaagacggtgaccatttgggagatcatcaactcggaatacttcacggcagagcagcggcggg

SEQ ID NO: 5374 - DNA, 1187 bp, Homo sapiens
gcgcggcgaggcggaggcggcccggcgggcggctgaggaggcggaggaggcccgggtgcaggcggagcgtgaggcggcgcagtcccggcggcaggtggaagaggccgagcggctgaagcagtcggcagaggagcaggcacaggcccgggctcaggcacaggcggctgcagagaagctgcgcaaggaggccgagcaagaggcggcgcggcgggcacaggcggagcaggcggccctgcggcagaagcaggcagctgacgcggagatggagaagcataagaaattcgccgagcagacgctgcggcagaaggcgcaggtggagcaggagctgacaacactgcggctgcagctggaggagaccgaccaccagaagaacctgctggacgaggagctgcagcggctgaaggcggaggccacggaggccgcacgccagcgcagccaggtggaggaggagctcttctcggtgcgcgtgcagatggaggagctgagcaagctcaaggcacgcatcgaggctgagaaccgcgcactcatcttgcgtgacaaggacaatacgcagcgcttcctgcaggaggaggctgagaagatgaagcaggtggcggaggaggccgcgcggctgagtgtggcggcccaagaggctgcgcgactgcggcagctggcagaggaggacctggcacagcagcgggccttggcagagaagatgctcaaggagaagatgcaggcggtgcaggaggccacgcgactcaaggctgaggcggaactgctgcagcagcagaaggagcttgcgcaggagcaggcgcggcggctgcaggaggacaaggagcagatggcgcagcagctggcggaggagacgcagggcttccagcggacgctggaggccgagcggcagcggcagctggagatgagcgctgaggctgagcgcctcaagctgcgtgtggccgagatgagccgagcccaggcccgcgctgaggaggacgcccagcgcttccggaagcaggcggaggagatcggtgagaagctgcaccgcacggagctcgccacccaggagaaggtgaccctggtgcagacactggagatccagcgacagcagagtgaccatgatgccgagcgcctgcgggaggccatcgctgagctggagcgtgagaaggagaagctccaacaggaggccaaactgctgcagctcaagtctgagg

SEQ ID NO: 5375 - DNA, 1298 bp, Homo sapiens
cggttagagtctctatcattcctgtgactcttcagccaatcctttcaatttactgatcaatcgttggtcccaatctggttaaatgaggaggcgtctgcttcaggtggtaaaagccctttggggacccatttctcttccagcccccagccccttttctagtgacctcttggctctggggccttggatgccagggtgaggtgtggagagggctcaggcaggctgtctgagggacccagtggagtccagcccagcctgaccccacagggcctccggagtgtcagtgggtggtagagagcagtgttagttttgcgatgagagctgagctccaagaggaggaggttgtccttgaaaagccccttccctgtgaggtgctaggaattaaaatgtcgatggcaaaggcaagaggctgtcttgtcagtggaggtagaagatgaggaaggctcaggttgggtggatgcttttggtggaagtttgtgactggaggggtgtggtcctggaggccacatggagctgctggtgggtggctggaggggcgagaggcagctctccctgcagtgttcagtgccccatgcctggaggggcagttgtcaccaacccagtgtttccttgcagccccccctcctctgcacctctcctctcagccacagcaccggcagcgattctggcgtctccgacagcgaggagagtgtgttctcaggcctggaagattccggcagtgacagcagtgaggatgatgacgaaggcgacgaggagggagaggacggagcccttgatgacgagggccacagtgggattaaaaagaccactgaggagcaggtgcaggtgggtgagcgaggagccccctcgagggctgtcccccatgtgcaggtggccttgggctttctgagactgccactgtactgccttctccaccgtccctcagaaccccaaggccggcgtccctccttcactgcacctggggcacgcttgggctctaggacgctggtttccatccccagttgcgtgccgttcccaggaactctgaaaatccacatgcctaggcccttccccgtcagacgatgctcgggcaaccctcctggcaacaggttgggtttccttgaggtggggattttactgcttggaatccagtggcaggacccagctgaggagggagctgagcagcatggcagggctcaagcaggcggcatgggggccccaacggaacccagctgggcctgaccccacagggcttcaggggcctgagcagccgacgggtagagggtttaacattgtacctgttgcagcgatggtgggggagg

SEQ ID NO: 5376 - DNA, 1158 bp, Homo sapiens
cgggccctctagggacgcgccccgccgccccgcatcgccacagtcacctccggctcgggctcaggctccagttcgggctcagaccgccgcttctccggccgcacgctcggcgccgccgtgcgccccgcaccccgcgaacccgccatgccccaccgcgcgccggccgccacccgcacagccgcttccgacagcgaccgggccgcgtgcgcaggaggacgcgccccgcccagcccggccccgattggcgggtggagggaagggggtgggaccaacacgcgcaggcgcgcggctgggccggggaccagggcggggtcggggcctgcgtgctcgcgccgggggtgacgcgggagggcggcagcggcggcggcgggagcgcgcccgttgcaagatggcggcggccatgctgggccccggggctgtgtgtgcgcagcgggcggcggcgcggcccggaaggctggcgcggcgacggcgttagcccggccctcggcccctctttgcggccgctccctccgcctattccctccttgctcgagatggatctgcccgtgggccccggcgcggcggggcccagcaacgtcccggccttcctgaccaagctgtggaccctcgtgagcgacccggacaccgacgcgctcatctgctggagcccggtgagggcagcgcgcgggcgcggggcccgtggggaccgggagggagcagggccgcggcggacggcgcgggagggctgcggggaggggccctgccgcacttcagcttacgcgcggtgagcctgccctgcccccgccagagaagggcggcgggtcccgagcctgctcagacccagagccttaagttgggaaagcggctacgagacccacactcggttcaacccctgccccagcgaagtttccctgggatggggagaatggggcgtctcttgtattgggcttctgctaactgttgggcggttgcggaagtgtccgcgcttagggcaagcacccggcttcgccagcggacgctatgccccagaggacatcggcgtccccaggggacagcctacggggtgctgggtcggcaactattaggagaaagtcaggacttggcacgtgaagtggagggcgttgctgtagtggaacaggaaaggcagtggaaacagtaagacgtcatgaagcttcaggt

SEQ ID NO: 5377 - DNA, 1159 bp, Homo sapiens
ctgggggcgcgctgctggcgctgctgcccaccttctcgtggccgcaactctttctgctcctggctgccacctactggctggccgcggccctggcctgggctgcaccagccctgcggcggctcccacagcagcccccttccgagcagcgtccccacaccgcgcaccttctgcgggacgtgctagccgtgccggggaccgtgtggacggcaggctttgtgctcacctacaagctgggtgagtgaggcctcgagccaggcaacagcagttggggcttccgggacagctccaggtgtgtccccaggggcttgcaacccattacagggccacgctctttctggggtatgacctgcaagacttggccctgacatccggggctctgcagctgggccttgtgtcttgtccgcccccagctctagccccatccctgagcgctctctcgggctgccccacttctcccccagtatctgcagctctggaacactgaggagagcagggcaggactgagggcccaggtggggagaagggaggtgggggcagatatggaacctcccgtgctcatgccccccccaccacccaaggtgagcagggtgccagcagcctgtttcctcttctcctgctggaccacggcgtttctgctcccgagttgggactgtggaatggtgtgggtgctgtggtctgctccatcgctggctcctccctgggtgggaccttgctggccaagcactggtgagccctccccagtgtaccctgcccacccacttgtacctgagctgcccccaatccactatactgacccatttcccacccccatcccaggaaactgctgcctctgttgaggtcggtgctgcgcttccgcctcgggggcctagcctgtcagactgccttggtcttccacctggacaccctgggggccagcatggacgctggcacaatcttgagaggtgaggggctggccttgaggaggaagagaggggccaggagcctggggcactgctgacttctgccctcccagggtcagccttgctgagcctatgtctgcagcacttcttgggaggcctggtcaccacagtcaccttcactgggatgatgcgctgcagccagctggcccccagggccctgcaggtgagtagatgtagcagggacacaagagagaccacgg

SEQ ID NO: 5378 - DNA, 1171 bp, Homo sapiens
aatcttgtaaccatccctcccatcctttttgttatagttgttatgtgtaatacatctacataacattttaaactcagaaagacaatgtgataatttcagttttaaacagttatatagtttataaaaaaggaaaaggaaaaaggccaaataaatagtattttagctgtttctgacatgtaaggactttagaagtcatcactgtgtcctaacaagtaaaaagctgaacaaactgaaaaatcaacaaatcttagctccatcagagaggtgtgaggtcagaggacaaatcactgctctcaaaattggagaggtatggccgggtgcggtggctcacacctgtaatcccagcactttgggaggccgaggcaggtggatcagttgaggccaggagttcaagaccagcctggccaacatggtgaaaccctgtctctattaaaaacacaaaattagctgggcgtggtggtgggttcctgtaatcccagctactcgggaggctgaggcaggagaatcgctgaaactcaggaggtaaaggttgcagtgagccaagattgcactactgcactccagcctgagtgacagagcgagactctaaaaaaaaaaaaagaaaaaaaaaaaactctggagagataaacaggcagatacaaagaatcacaaccacatcttgtgagcaataatctcccagggaaccggtggccagatgggtaagcctaaaatgtaactggcaaattgctagaggctcagtgtggacaactctgaaaaaaaactccagggggacccggtcatgggaggaccccatacttttgtgagctttacctccaggagctctattaggtactgacagtgaatatcagagaaaaatctccttgtgcttctggcaggaggaagtgaaaagggaccactttggaatataccattctgttcttaacaagacctgccctcaggagaaacaattttaccagggcctaacctgctggtgtttttatcagaacttaaccttcctgggggaagggaaatacctaacactagctacttctggatattctgtcccacctaatggcaggtgggggaagctgaaaagcacttgggaagttcatagtccagggacacaagctcagcaagactgagccctgctcatagtatcatagaacactttcccaccccaacacctgaaaac

SEQ ID NO: 5379 - DNA, 1175 bp, Homo sapiens
catcttgaaggctggccgggcgtaccacaaatataaggcaaagaggaactgctggccacgagtacggggtgtggccatgaatgtaagtaacccagaaatgcagggttgggtattgaagttacagtggccacactgttgggtaggcaagtcccatccacaggtgtccctgcaggagggggatctacggtgggaggagcagcaggtggtggtttgtagtcacgggactgttgatcctgctccagcactcctgaaggaggtgggctcaccctccttcaccgtttctccgcaagaaacggaggctgggaggggcagtgggggcctgagctggaaagagtcagcctgactggggttgtctagcggcacatgctgtggagaggggcttcgcggaattgggcccctgacgggtgggaccccgaggccgggggcgggggtggtggggaagaggtttctaaagccatctttctctgcctgcagcctgtggagcatccttttggaggtggcaaccaccagcacatcggcaagccctccaccatccgcagagatgcccctgctggccgcaaagtgggtctcattgctgcccgccggactggacgtctccggggaaccaagactgtgcaggagaaagagaactagtgctgagggcctcaataaagtttgtgtttatgccacctggctgtgcccacccccatggtttcaaagggaggggtccctgctgggaggatttctgtgggatccccctggttggtactgggagggagttagactactgaagtagaccaccagtgagtggtagaagcttgaagggaaagtccacaactagaaacggggtgcaggtaccctgggcaagacccttgcttccccacagaggggaccaagaatgtggcatccaggacctgacacttatgtgggtgactcagtcccatggcctgcagtgcttggatgtgaacactcatttcacgtatcaggaaacagaataggacacaatcgttgagcctggtgttctggaccataccctcactctgtcagctccctgctaactttctcagcacctgaggcagtcctttgcccagggtcttttagcgacaccctttccctccatactggctacagccctgctgatgtcagtgtgtttaagtcactgccagggatacctggcttgcaggtgtctgccttgc

SEQ ID NO: 5380 - DNA, 1094 bp, Homo sapiens
tgccctcccggagaccccggtgaaagccgagcactcctgcaccctccttccgagcccacgcacaccaggacaccttcagccgcgtctcctggtgcgcctgcgcgggggccctggaggaggagaagtaggcggggccggcggccgctggtgactacaagccccggcgtgcaccgcgctaggctggccgtggcgcgcccggaaggtgtcgcggccctgggccccgccccggaagataaggccgctcgctgacgccgtgtttcctctttcggccgcgctggtgaacaggtaggtcatccttgcggccttgcggcatgggcagtatccgccgccatcctcttccgtgaggcgcgctgagacccggaccggccctcctgagaggatgccggtgcgggcgcccgcggagagggtagggagtggtgggcgcggcggcctcgggggcggggtcccggaaagccgggctggcgggggtacccgggccgcccggccgcgctaatcgtgagtcgcccccaggacccgtcgccatgggccgtgtgatccgtggacagaggaagggcgccgggtctgtgttccgcgcgcacgtgaagcaccgtaaaggcgctgcgcgcctgcgcgccgtggatttcgctgagcggcacggctacatcaagggcatcgtcaaggtgcggaacgctggccggggcgggaggggaagggacgcccggccggaacgccgcactcacgccgcctctgcccacaggacatcatccacgacccgggccgcggcgcgcccctcgccaaggtggtcttccgggatccgtatcggtttaagaagcggacggagctgttcattgccgccgagggcattcacacgggccagtttgtgtattgcggcaagaagggttagcatcgcggcggggaaggaaggtcggggtggggaggggtctgggtgttgcctgaggagttaacgtcctaagccgatatgggaacctcgcaggcagaagcttcaggtggggacatccgcgtggccagaccagtggccaccggtgggtgccgagagagttgtaccgggaggctggatgttgaatgctgtgctcgcaacttcgcgggttgcctag

SEQ ID NO: 5381 - DNA, 1200 bp, Homo sapiens
cctctgcccccagtgtgggctcccgtagcacagctgggtattagcttggtaatggggaaaggatggtattcaactgggaatctttggcttctaggaacaaaacaaacttggggaggatgttatcaggatactgaagtcctccccaaaatccaggatcttcagagaaaacctaagaatcaaaaatagaaaagcacaggaagttgaaggactctgtctctgtgtgttgtccctgcttctctcagctccatcctcacctttctgcactccagctctgttgtgtcgtccacagcatgcaacacacagatccagctccatctggagcccgcctgtcagctcctcagccccaattttaaaaccctaggggagaagcatcttctcagcataggtctcacatctttatgtggtccagtgagccatggtgggggaggtaggtgggtgcagggaggcagtatgggaggtccacctctgaccctgtggcccagtcagaagaccccaaagagaggagtagcttgcatagatggaacaaaagcattctccctatgttattccgttcacatgttgctgtgggttcattaaccccacacttagaaagtaatcatctttggctctaagaaaatctggaggttggacctgaaaaacctcaggccagacagtgaatcagtcctggattgtgctgaattttctaatatgactccaccccatgaggcttcatgactgtcagcatctgctgtctccagtgatgctgtgtccgaaattggtgggttcttggtctcacagacttcaagaatgaagccacagacccttgcggtgagtgttacagttcttaaagatggtgtgtccgaagtttgttccttctgatgttcgtacgtgttcagagtttcttcattctggtaggttcgtggtctcactggcttcaggagtgaagctgcagaccttcgcggtgagtgtaacagctcttaaggcggcgcgtctggagttgttcgttcctccggtctggagttgttcattcctcccggtgggttcgtggtctcgctggcctcaggagtgaagctgcagaccttcctggtgttacagctcataaaggcagcgcggacccgaagagtgagcagcagcaagatttattgcaaagagtgaaagaacaaagcttccacactgtgggaggggacctgagcaggttgccactgctggctcaggcatctg

SEQ ID NO: 5382 - DNA, 1234 bp, Homo sapiens
acaatttaaaaaataacattacccattgttagagggggtgtggaggagtgggtattgtcatgtgccactgggtcaaacattgtgtagggcaaattaacaatatcagatcctcacattttctgtacatttgaccttgaccttatcccaggcaaatacttgatggtatagtgaaggatatctttctcagcattacatatataatcaaaaataagaggtgacttaagtgcttcaagggaatttattaaaatggattattgatcagtcattaaaaatgaaagcatacaagactattaaatggtacagaatttctatcagaataagtgggaaaaacaagttacaagtaatatcatatgatttacttttagtgaaacttacatgcacttacacatttgtgtattatgtttatgtgtcatgcatacatataaaagtggaaggcggttcaacaaagtgctaattatcctcatgatttttattttttctttgatttttatgaacttacagtaaagaacaaagtactactttgaaggaagaaaaattattttttaataattcagcataaattacataggttatccaaagatagtaatatggtatttgatctgaacctagacttctgttctgttgatttgacacattttggtgtctttccttttatgttaaataagtaactatcatttacctacagcagaagaagaatataacttagcatttgagacttgataacatagagctgttgaatagttctgtaagatttgttagggaaccaaaaccaggcatgtgaggatggtgctggaagagaaaaggcgggaagggtttgcagtcaactgtcagttatcttcagctttcaggctcgctgcacatggacaggtgaggaccaagggaagaagagcaagcttgggtatttggttgagctgttaagttcagggttagaaaatgaccagcacaaaccttttggcttgagagccaaagttcttggcaggaagtctctgcttgtttccgtttgccttcctcccagtttctcctcaatgccttgcagtcagcatcctgtatctgccattttgaaaactgcccttaggggtcatgagtgacccccttccttattgttaaacccagtgacattttgtccttatctgcagcatttgatgtgttactcaactctctttgggcttgtgtgcctctccacccttgtggttattctcctgcctctgtaaccactcagtgtcttcttccatgt

SEQ ID NO: 5383 - DNA, 1218 bp, Homo sapiens
gtctttgtatagtgttttaaaaacttctcacttgatagcagcatagaagtctgagtttagaaagaaaatgcatcctattctttcatcaagccttaagtggcctgaattcaaagtttttagagaaatcaatgaaatattattgaagtgccaagtccaggttaaagacagagtttttatgtaggatgtacaattatttaatattaggtctaagagattcacatttttttcttacaatatgctattacaaaaagtaagaaagcagtgatttttaccctttaccttacccaaactgtccataattcagttgtttctttgcaaagctgtactttgccattagatacctggatatttccaaaaagagcatttgtgtatcaaaaattacagaggaaactacttcagttccccaccttagtttaggtctatcaatgcatccgaagtgctgcttttttttttatgatcacagagaaggaaaaagtgcatttattcatctgggaggtgtataatcagtcactctctccatcagcccccaaaagcagttcaaacagcatctatttaaattgaagaccaattaaataattatcaaaagcatcaagaagacagcaaggctaagactcaaaggagcacatggagtccggtagaaaaacatagttgctgttgtgaatttttccctcaccatttattagaccatgtgctgccagtgacctccgcatatcaaacagggccttgggcagcttcttttgagtgtatggacctccctgagcacaaaaatgtttcctagtgttttgcagatttagaaggagatgtattttttgtttgtttgtttgtttgtttccagctaagctgccaggccatttggctttgcagaaatgagccctttggttcaggactgagtgaagcctgcactctggccactacgcatgaggagttttctcctttgaactctgcccagcatacccacttggccagcccgatgtatctgtaatcttcagaacgctcaagaagagtgctaaattcagatccttgttttccatggataatttgcttcttctctgactccttttcattgtttctgcctctttccaagaggcaaacccaggagaatgtaaaccagcaccttctgaaaataaacccaaactggccacctcgaagccatgcacctggctggtgatcttcctaagggctgcccccgagggctggccattgtcttgctgctgtccc

SEQ ID NO: 5384 - DNA, 1220 bp, Homo sapiens
taaatcaaggatgtactttatcggcaaagcttaatcacagttaaataatatcctagttaagttgaccaggttccactctagagcaatttctggaaatgataggataagcccattttgcaagattactgattggcagttaatggagctctcacacttttattttagagggtagttaaagaaggctacctgtagtagcttttactgagggcttgccacgtgtgagcacctgctaagtatttagaaaatattgcatggtcttataaatgtgtattactcaatttacccagtgaggtcacatagttagttagttgtggggttgggattcaagcccagatttacctgacttctaagactatctctaaaccagcatacatataccattctttccagtcattgcttagggaagagatctcattttccttctaaatatactcagatttgtagaagttaagtgaatttctcaagaacggaaatctagtaagttgcagacttataataagacagacagttcaggcttctgacttccagtcctgaacacttcccccatgtgattatcttatttatctctaagtcaggagaatgttaattactttaagactaagacggaaatcccccatgaacctggaaactcaaatagcagaatggatgaggctctgcagggtctcagcaactcagcaacacagacttcccctcaccaaggctgatacggccattgctactgctgagctgctgagcgccagcctgcccataacagaagtgaacactaagcttcctgaagtggccgtattccccaaggggaccaagtggcaggtttattatgtaggatctttttcatcaaagagagaaaagcaactctcttaaaggaatagagaaatattccagatgtagatttgccttttccatcattcttccatttatagttattttattcatgaatatgatatcctacacaatcctactactgattatagaactaattatatggtgaagggatgtgggctttcaccacagaattcagaaatctcatgcgtttcatcatacagaagcagctcactccatagaacaagaaatagaacagcctgctaaaggctcagccatgatgtcagctgggagacaataaatacccatcaatatttggcactatttctctcacactcagaatacgtggttcctggaatcaaggagtctagttgagagtagcccctttttacaccaaataa

SEQ ID NO: 5385 - DNA, 1163 bp, Homo sapiens
taggttttttaaaaagaaaaatattgtatatttaattcctattatttgtatttcctcttattgggaattaatgatgtatgtcataatcaatgtattagtgtaaataattttcagtcctggtatgcacgtctttacttttttgatgagggtaaaggtgcttttaattgttttaagaatttttgtaaacattcatttaattatgaattttaaaaatggaaatctttgttcttgtaggtcactcttttgtggaacaaaagtaaaatactggcagctgatataggtggtacaagctgagacttgcccagctgggctttaaaagtgtagcagcgctcttaagtagcagtgaatgaacagaatgaatatatgaacggactgccctttattccatagcaaccagacgcaatactggcaactatgctattatctgattttttattttcttaatctgagtttttggaaggttatgttgtttactttttaatagtatgggactgtggcaggaattgtaattaccaagattttgtctaattatttctctctctctcctctctgtgtctctctttctgtgtgtgtgtgtgtgtgtgtctgtgttttacaattagaagtaaatcagtgagctcagacttgaattagtttcggtattgtgctaaagatgagcagtttgagccctaaccctgttaattatttgaaacagtcaatttaagagaaaccaagaatatggcaattgaacttcccaatgtaacctgatgctctctgcagcctcatttgtggtaacaaatatgaaaggatacatttatataaaacaggagtatgtttcctgtgggggaaaaccgcttgtcatttgcttttaacaaggtgtaaatccccacagataaaccttcttgtaaaactgttccctttggatttagcctcaccttcaacaaaaagggagatgtaataaacgaaagtatgatgaaatattagttagctcttgcattttttgcctagaagttcctcttttttattctttatcattttttaaaatttaatgccgctgtttcagatgaattgagagagtcagaatataatgcattacattcattttactttctgttaatgtttttagggggagagatctaaataatatacttttagattgaactatatttctgatatatcaacat

SEQ ID NO: 5386 - DNA, 1172 bp, Homo sapiens
atgtccctgtatcaatattaaattaaaagacctactattaatggcactgaatgccataaagtacttgccttttcttggcatcatgtttggtgaatgaggtatatgagaaatatcatttcaggggccctagaggatgctggttgctggtgtgatgatttaagcacatcatttgtaattcccctctgtggtcagcctagtctgagaatgtgctgttgggagactagggtgcttattaggatctcttttctgtgccctgccatgactctggcaactcagatggctcagagaggggtttactttattactgattattaaattacattcacagtttattattgttacaggggcttgacagtagtgagtcagcttttggagcgaagtgtgggctcttagcaagatggcatttcgagcactcttggatgcccttgtcaggctttccccttggaactcactgccttcattacctttgtgacattttagtttttttcctgctgaatgtggctctttttcttctggtttaaggaacaaccttatattatcagcctggcctcctgtatggtggatctgtggaacatgactgtagcgtccttcgtggcattgggtattacctggagagtcttctttgcttggctccatttatgaagcacccgttaaaaatagttctacgaggagtgaccaatgatcaggttgacccttcagtgagtattgagaacaaaccgtggtgtggtttttgttttgtctcttgtcacaacccaacttgtgagaaaaaagttccttataaggcacagttttattacaaatgtatattgcttttgttatttactttgagatttagaggttaatcactccaggaggcagatgaaccaaaacttaggatcatcaaattcaggactattgttaacagttaccaaggtgccttttgttgttacctaagaaccttcaaaacagatgctctccgtctcatcatagttgacatgaactatagttctgctggctgtatatgtgagagtggagtttttgtaagatcctgtggtagctgaggctggagggcagctgaccaaaattttgggcaggagatcatagctccttggcattgttacagcgtaatcttgacttacccaggcttcaatcataaactcaagggctttcttcttctgagaagagtttgcaga

SEQ ID NO: 5387 - DNA, 1198 bp, Homo sapiens
ggccatattggctctctgatctaaatgatctggatataatttatgttcaggggctcccaacctggatgtccctgagaattttcagtatttccaaaatctagtagaagtagtttaagcatctgtattttgttgaattatatcaatccaatgtggtaaaccgtttagcatctctgccttttacattcatgttttaaacaggggaaatgacttcatttttatttaataatgttttggtagatccgttatttgcatgggaggagaaaaaggggtttctgattattaagaaatgggctcagatgatggactaggtcagctctatattttaaggataaagaagtgacctgttcagggttaaagagatgagtggcagagccacttgggtaatcgacttggactttgacacatgctgcacaggtactctctaggagccaacataaggtgctgttggtcttgaagggaatgacagattgaatatggaagagctatgccttgtaaggaagcatctgctggtgtaaaccttcctgggcagggtgtcagggtaatccattgctttgctgcatcctcgcctcatctttctcactctctgtgtagattgtgcgacggggaatgcctcccggaggaggaggcgaagtggttttctcatgtcctgtgaggaaggtcttgaagcccattcaactcacagatccaggaaaaatcaaacgtattagaggaatggcgtatcctttccatttatttggatttcttttttttttgttgttgttgcctcactaagataagaatgactaacagctttacttcttcccgaggttatttacattttagactacaactttgaaaagtcttaacagtgaaattgtaattgctggctgagttaggatgttctgttatctgcctcaccatgactagattgattgagtcattctttttttttttttttttttaattttccggttaacatttaggcaaatggctctgatgtatgtgatcctctctcaagggctttggtttgggggccatgaatatactgcagttcctccctcagaagacgtcatcattcggtgaaggaaccaaatatgaaaacacacagttctgatataacatgcaaaatgatatgtgcagtggggtgggggcctggagtagacagtggtcaattttgtctggaggacctagggaggctggagtaatcataatgaatgat

SEQ ID NO: 5388 - DNA, 1159 bp, Homo sapiens
atatatatatttaaatattataaatatatataatatatattttaaatatatatatatatttattttattttattttattttttgagacagtctcgctctgtcgccctggctagagtgcaagagcgtgatcttggctcaccgcaacctctgcctcctgggttcaagtgattctcctgtcttagcatcctgagtagctcggattgcaggcatgcaccaccatgcccggctaatttttgtatttttagtagaacggagtttcactgtgttggtcagtctggtctcaaactcctgacctcgtgatccatccacctcggcctcccaaagtgctgtgattacaggtgtgagccactgggcccggcccagttttaaaaatagatttaagaagattcagattttgtatctcttcctatgtcattttggcaagttgcattttttccaggaattggtttctttcttatacaccttcaaacttactggcataaagtttataataccctttttatttcacattgtgaaacaaaaatatgcatacaaagtagtacataatccagatattcatagttttaacgttgtagtagaaacacccatctcttcacaactggatcagtaaatagaacattactggtctccagtcacaaactgcctctgctacttcctagtcacaactcttattccctccttgactcacttagtaactggtcaacattgtgagattcatccatgtcatttaccagtagttgtaatcattttttaaattggtttataaataacgttccattgtctgaatatagcataatttatccactttgctgttgacatacttttgccttatttcttggtttctaaaaaaggagacattctcttgtataattggaatatctttatcacatgagataattaatgataaatccctaataggatctaatacccaatttatatgcaaattaacccagttgccaccagctaaatttcttctatagctcctttgttccaaacagaatcgatcaagattcattaataatatttggttattatttctctttagttaccttttaactacaatagtccttatgccacttattttcatgacattgactttttttgagtctgagtcgattctttatagaatatcctgcatcctagatttgccttattgttt

SEQ ID NO: 5389 - DNA, 1241 bp, Homo sapiens
gtgatgatggagggagaaactaggtgatgaactaaatgatctgttctctgctgtttatgaatgagatactcatttcaggaattatcatgctgccctttccatggagacatatctgccaggctatcaatataacatgttacactaaattctgaatcaatgaggccactttagaataatttagagttaaaaccgaaaaaaaaatccacttttccaaaatgaatgaatttggcattaatgtcccttttgaatatttatgctaaaatgatatcattatgtacagtgctatttgattaccactcaagctttgcagaatggtgtcatgctaaggacaattgttataagtgataaaattgcttctgctgaaacatcgcctatgtgatatggtatttgagcaatagcaggggtgttctcctttgcttgggattctccttactattcccaaaataagtaatggaacatatttcaagatatatcttattcaaaatgttctcacttccagagcttgaaaacaaaaatctgtatgttctctcagagtcagaagtctgtaatgcgccgggcgcggtggcgcgtgcctgtggtcccagctactcgggaggctgaggctggaggatcgcttgagtccaggagttctgggctgtagtgcgctatgccgatcgggtgtccgcactaagttcggcatcaatatggtgacctcccgggagcgggggaccaccaggttgcctaaggaggggtgaaccggcccaggtcggaaacggagcaggtcaaaactcccgtgctgatcagtagaagtctgtaatgctactggtgtcccctaattttcttatagccacagttcctttcgcctgagctcattacagagacaaatatccattagtgacaggtaacttttcattctaatgcgcctgtagtactgatgtctgggcctctgagatattctattttgcacctgaaattagtttctgtgttacagctctgaatttgtgataagaaaacagatactgtaatttagataaactccactaaatggcttgactgaaataaagcccaaatgaaggtataaatgactgtcaagttctctggggtacagttagagaacaaaatagctgatggattgttatttatctgtgcatgtgagtttgggggatttaattaaagatgttctattatattttcaaagtctttctgaagctgtaaatcaaaagctgaagaaacagagaatgttgccattgatcaaaaaacca

SEQ ID NO: 5390 - DNA, 1199 bp, Homo sapiens
aaactgtttgtgtaagttgcttctatagaatcaggaagtaggtaaaataacccatatatcttctaaggttgtaggcattcagaaaaacggatgagattagagatgtaaaaagttgaaagtcttatataagaaaaaaatgtggtcagagctagacttagagtagaaattaaccatggccctaatctacatcaagcatttggaaaagctagagagaaactagagccatttctttctttacccaagtcctgacaaagaaataatttgcatctgtccctccccttaaccatagagagaattagattccattgataatggtgactcattggtatgtctactaattcagctttgaattttgtttctcttccacacatacaccctgccagtttattagccttctgaagacagcaaagatgacagtaaaacttaccatccatgctgagaatccagattcccaggctgttccttcagcagctggtgcagccagtggagaaaaaaagaacagctcccagtctctgatggtcccacagtctggctccccagaaccggagtccatccgaagtaaggcctctggactcatgagagtcctgcacatatggaacacctgaactcagcagagggtttctgcttgggagccagctgcctacctgtggctcactgtttggaaggttgtagtcagggagccctatggtgagggcaggatataaagagaggacttctggaaaaagagtactggactgttaggcaggcaatctatgtgctgtacattaagcagctgtggcatcttaggaaacctacccactcaaagcctcagcttcttcatctctaaaacaagggaatagtattctttgctctccaaaaatatattgctaagggcaccttgattccaggcctctaactaatgaattagaaatatcatttcgtagattctttttttaagctgggaaagtaatttaacttctctaagcctcagctttcttttctgtagaatggatatgcaattatcctatttcataggtgggatcagtactgcctgccactgtaagaaactctttagtcattgccatgatctacagatctgagttctatgctttaggtgtaatagtgggtcctgtcataatggaaatggatttaggttacgtgaaccatagggtgacactttaatgtgtcattacacttccagtctagtatatggaggtaca

SEQ ID NO: 5391 - DNA, 1162 bp, Homo sapiens
aacagaacacctttaaaatatatgtatgtgtacatatgtgtgtgtagatatatagagagagagatacggagagacagacagacagagagagagacagagagagagatgctttcccaagaggaaatgcatatgtaccttgatttaagcaaaactgataacagaaaattgaacttaatgaaagaaaaaagtctggatatggttactcactttacatagagtaagatttttaaaactaattttgcttagtagttaattttacaaaaatgaagagaaacaccctttaagtgtactcgtaatttaaaacacctttgaaatgtaattgtccaaatgtaatgctgctatgtatattatttgggttccagatttttccctttaaaattctcaaaacactcagtgtccttacaactgcagctaaaatggttaatcattctggcaagaaggtgacagtgtgtatattggaaaggcagacattcacatttgaaaatattttgcattattgttagctaaaatcaacctctccttgaatgtagatacaatatatggttttgcagtcaattctgaatggaaaaaaagaatcaagtctgaaatttatgtgaaatgtggcttcagatcatttgaacgatatgtagaaatctagatgaacatatcattagaggtgaaagcaaaatttgaaagcctaatgagatgaagcaacattatctctctctaatctgccaacaatattccctagattgtgttgccactgtattgattctgagtaatttggcttgtttatgcgtgatttaaatgcatgtggctgaatgcagtaatttttcaagttattgagtagtagagaattcaccactattcactgtctcccagagatgaacatataaaagaaaaaaaattctacttcatatatgtaagaataaagcaactaaatgatacaaaagtaaaaacttccaccagaatcagagatattccgacaagtgaattgtgagtctaacacgggaggacaaagctaggctcttgcaaggacagagcacacgtggatcatgctgtatgagctcactttgtgtccctggaattagtgtttttttgtgtgtgatctaactggcaagtttaatgaatagccaaaatctatgttattcttgaggctcctaaaattatgtgtgaaccccaa

SEQ ID NO: 5392 - DNA, 1214 bp, Homo sapiens
ttttaagtgtcttgctgaattctaagtttttccaggctaatgaataagtaatgtggatgtggaatcagatttttgcttgagtctggtggtgactcaatataatacacacagaaaagtatcagttcttctgtttcaagcaagcatactatctctggtggccttcctatttttgaagttgctgttaggatactttaatccttaacatgaatcagtataaaagaaagcatgtgggtggttgtgtttgggtgtcctttccatccacttggtgcttttattttctgtggttgttttattccacagcttagcaacagcagatttccaggagaagtcttagttcttcatctctctctccttcctctggtctggttggttggtaacagtgagagtaaatgaaatgctttttgtttttctgtcttcccaccacagtgtctttggtttacttttaggaccctcattttcaatctctgagccagaagacctgcctttaaatcacagcatttcaattcctccctcctatctaggcattcctttatgtttctacagtactctgcatgcatccctgttataaaatgtatcacattgttttggaattttccaaagttgagctctctttctaaataaactgtacttcttgaggccatggaccatatttttatcatttatacatttctgttacgtaacacaatgcttggcaatggtggttgggtgactggatggaagaatgaatgaagtaggcttgaagagagctgtacttatgatcctattatatatgatttctcttcattttgtccacgttaatgatttctagatatcttggtcacttgaactttagtaatatgaatcatgctgtgtattcaaactttttagcagagaaataataaaattccttttgtaaaccaaagattgtacaaccatctgtgttttgttttgttttgggtttttcttttctttctttctttttttttttttttttccccaaaataggttcaaaaaacaaacaaggctaacttgcacctaagattgaggagttttgatgcagtagagtagtaaactcctgtattttccagcttgctattgtaaattaaaatacctatttttgaaattttaaaatatttatacattgatttcaatagaagtataaaagagggagaggtagttcttttaagataataaggaagatgtgttatggctcaattcttgattattattgcgac

SEQ ID NO: 5393 - DNA, 1151 bp, Homo sapiens
tccctcttccctgctaccatttctaaaatcttttcccaccccatgtgattctgatgtgtccacatccaaagcccccactccttcccctgttgttctgtcttttttttttttttttttttttttttttttgctaaaactgttatgaacgatgactctcttctttttggttcacaagtcataggtatgcaggcctacattgctgctattcttctttcccatgaaaaagcctgtgttacactaggagcaaataaggttaatatgcaaagtaatgtggagacagagcttgctgatagagagagaaagaactgatgctattatttaagtccctagatccactcaaggtagtagggttgttgtcagggttaaatgagttaataatgggagtgctgcagccactgccgctgattccagatctcattgccacacgccccgacgactgcctgatgtgcattcctgattccttttggttccaagtccaatgtggcaactctcaaggatcagctgcttcataatcttctaaaggaagaacagaccgcccagaataagattacagttgttggggttggtgctgttggcatggcctgtgccatcaatatcttaatgaaggacttggcagatgaacttgatcttgttgatgtcatcgaagacaaattgaagggagagatgatggatctccaacatggcagccttttccttagaacaccaaagattgtctctggcaaagactataatggaactgcaaactccaaactggtaattatcatggctgggacatgtcagcaagaggaagaaagccgtctcaatttggtccagcgtaacgtgaacatctttaagttcatcattcttaatgttgtaaaatacagcccgaactgcaagttgcttattgtttcaaatccagtggatatcttgacctacgtggcttggaagataagtggttttcccaaaaaccatgttattggaagtggttgcaatctggattcagcccaattccgttacctgatgggggaaaggctgggagttcacccattaagctgtcatgggtgggtccttggggaacatggagattccagtgcacctgtatggagtggaaagaatgttgctggtgtctccctgaagactccgcacccagatttagagactgataaacataa

SEQ ID NO: 5394 - DNA, 1297 bp, Homo sapiens
ttttttttggatacagagtttcattctgtcacccagactggagtgcagtggcatgatcttagctcactgcaacctccacctcccgggttcaagcgattctcctgcctcactcagcctcctgagtagctgggattacagacgtgcaccaccacgcctggctaatttttgtatttttagtagagatggggtttcaccatggtggccaggctggtctcaaactcctggcctcaagtgatctgctcacctctgcctcccaaagtgctgggattacaggcatccgccaccatacccagctaattttttgtatatttagtaaagacagggtttcactatgttggtcagccaggtcttgaactcctcaccttgtgatccgccttccttagcctcccaaagaatgcgtcatttttttaaagcagtgtgaacgatggggattggattggggcagtgagaccagttcactgtaaaattcattcagaattttagtactaactttactggacttggcatggatttgagtagtcagtaaagaagacaaggtctttgtttccattgaacttacatttttttttagacaaaaaataaatatttaaaataagagggtttaaatggggagttaatgagttggcaacagactaggctacaaaaggcctttctaaggagttggcatgagactggaaggacaaggatcttatagattttttaagtggtgtagacgagagatgggatttaagagcactttaagaggttaagttgatggttgatgagaagtggatggtaaagggggcgggggagggaactagaatctaaggtggctctaaggtctttacttgaataagctagttattgggagtgcagaggatgttggtttggaatcataggcatgagtaaggggaaggtgaagcacctgtgggaactggagtgaagagatatatatattgttctggcaccaaagagggagaagatgtaagttacagatgcagtctctggcatgaagatagggtaatagatgaggtcaaaggagaacggtttattgagaggatgcagaaaccagaatcctgaaggaatataatggagagggggaaaggttgctctgtgaaattatggctgagaatgaactgtcaagagaaaatctaagagggtatcaagctaaacaagggaagggggaatgtccagaatgaagaagtggtcagtaatgtcctgatttagagagggtaccagtaagatacttgccacataggctgctctaggatactttcaggtgaactccatttagttgaatggtaaggacagaaactag

SEQ ID NO: 5395 - DNA, 1209 bp, Homo sapiens
ctgttagctttaaaggcaaatcagagctaatttaacagggttattaggcagtagacattaattcaagggggaaatcgtaacgtaataggaaactttaaaatctttgaactttggaaagagtctttaagtctctatttttaaggtagcgtttacagatgctataggtttattttttactggaattgatatttccttaaccaaaaaggaaagtagaaattctctgagcaataagaatgattgatggatgaaaatacataaggaaagttttaataagtgatctgatattcctatacagtaaaataagtgctttttataaggactagttggtacctaatttttggttttatgatatcagatatgcaaactgtgtatattgtggagaaggtgagaagaggaagtctagctagttccctccatgtgtttatatggtccctgaagctctgctgcctctggtgggtatgtgggcagagaactgatgtgaagcaaatttttcaaaaattgcagctgaatgttgacgtatgttactgccaagtgcatgggatcactcaggaggctaccgttaatttcccgaagaatgttcctatgtacctataatttaatggccttagaaatactatataatctggttgattttggacttgaagtttggtgtctgtcataattttggtagtcttgtttacctgggatgaggagaaacaaaactattgctattctgattagaattatgtattcctaagagtggctgcaatggcaatatttggtttaaagttgcttagctactgtataaactttcacacaatgtctttaatagctctattgagatggaatttacatacaaagaagttcacctgcttaaagtgattttcaatagattttagtatatttagtagattttagtatattgactatcataaccttttgatgatcactttcccctctccaaccgtaaacaaccactagtctactgtctgtatagacttaccagttctggacattttatttgaatggtgtcatacaatatttcataataagtttttaaaaaaatacaactttggatccagaattggtttggccttcatcataattagagttaggttcaagtgtattctatatataacaatataatttttaagaagtgataagtttctgattccatgggatactttaaagaaactcttcagtaaatttaatagaggacaaaagtatctt

SEQ ID NO: 5396 - DNA, 1187 bp, Homo sapiens
catgttgtagtttgctccctaatgctcacaagtccgtgccagacggaaattcgcagaggccgctgcagtcccgcagaggccactcaggggagggacgcgggcggaacagtcgcgctcagtcctcccaggccgccccaggccccaggtcccctggtgcctcgtgccggctcctggctcgcctcccttctgctctgcccagcccaccccgccgcccccctgctcacacatgcggcctctcccccgcgccccagcctctggagtcgcttcggggccatctagtcatacgctgtccatcagatgtgtttacttttttcctgacagccgacacatctggagcacatattcaggttattccagtgccactagacacattccacaagatcatttcagcggttgttatggcgatcttcctccctccagtgattttcaagttgcatgacagaaatagctggagctaaccagggggacaaaagtcaacgggatcaggaagggcttctttcacagaatgaactaattagtgaccctgctttcttcacagggcaatgagcatatggtttaataaagtgagtctgtgacactttttttttctctgtaggcaaagctgtcactggctgaaaactttcctgtttttactggtgggaccgtagtctgctgtctttcaacagagtttacttcacaagtagaaaatgtttgctcctgagagttaagcttcagaacgtattcttggcttcatactacctaactatagcaggtcctgtaacttaaagagacagtattaattttatattcatttcatgggaagggtttatgcttactcaagactaagcattttcagttagggttttgtaagtattatgaattgatacctggaagttcaggtaaatataatgtgttgtttgctgtggtttttctataaaatataatcagtatttctcactggattagttacaaatttatttgaacctgtgatttttttttgggcacagttatagaatattttggtattaaaagatttgattaagctactccatttttatcacattttaagtagcatgcagatgtctggttatgtctgtcaatttttttcctgaggtactttttacattttgtgtaggattttggatgactttatagtgtgaacatatcattgcagacatggaaatttagacctgagatcatttagtgtt

SEQ ID NO: 5397 - DNA, 1225 bp, Homo sapiens
agcaattggatatttctacgcaaaaaatataggaacctatacctagactttacactttatacaaaaattaatttgaggtggctcacatataaatgtagaatattaaatcataaaactttcagaaagaaatataagagaaaatcttgaagtcttagagctgagtgaagagtttttagacatgataccaaaagcatgatccataaaagaaaacaacagtaaattagacttcattaaaattaagaacttttgctcctcaaaagacactatatagaagaggaaaagacaagccacagagtgagaggaatatttaaaaaccatgtgtctgacaaaagtctcatagcttgaatatgtaaagaacactcaaaacttaacaggaagaaattaaacaatccagttacaaaataggcagaagatatgagcaaacattttaccaaaaaaggatatacggatggcaaataagcacatataaagattttcaacttcactattaggaaacagctaaagtaaaaattagtgaaaataccaagtgctgaccaagggacagggaaactggatctctcatatattgttcatgtgaatataaaattctatattacagcactctgaaaaagtttgtcagtttcttaaaaactaaacttaccatacaacccagctatcacacccttagacacatcccacagacatgaaaatatatgtttaccaaaaaaacttgtacatgaatgatcatagaacctttgtttgtaatagctgaaaactgggaacaaccaaaattctcttcaatagctgaacagctaaacaaactgtggtacatctgtaacacaggaaacttctcagcaataaaaaggagctaactattgacgtatacaatgtcctagctttctgacctgaaatttctcatcttggattgtgaactaggctttctttcttgccttctgcattctgtgttgctatttaagtggaatttcaaggtcacaagggattgtcagttctacattttgctggccactttgttggtcacttttgtatggtctctgaatttctgctttcacttcatttttgacctctgacatttcccttgtattttttgccatgttagaaatacactttaagtgtgtttgtttcatagcatgagagttttcttgagtttgtattcagtaatagtactggaaacagaagcccacttctttgtaatttaattttagctactgttaatttgataccaaat

SEQ ID NO: 5398 - DNA, 1156 bp, Homo sapiens
tgtatcttctataggtattttcttcgtgatcaccatggagcttacataaaatatattgtttataacaatcttttaagctcataacaacataacttcaatcacatacaaaatattcatacgtttacttctcacatgtaatttggtgaaacaaattacatctttttatattatgtattcattatcatatttttagttatgttttttaatacctattattgtaatttctatgccagaataaaaagtgattacacaccactgtttacctttaccagtgacctttatactttcacatgcttttaagtattgctgtttagcatctttttgtttcaacttgaagaactcagtttagtatttcttctaagaaaggtctagtggtgatgaagtccctctacttttgtttgtctgggaaagtctctttcactttcatttttgaagacagttttgccagacataatattcttggttggcacgtttttatcttttaaaggtggtgtacacttctttaagtttatttcttaaggatgttttgtatatttacagagttgtgcaattatcaccacacactaattgtagagtacttctaaagaacctcatgcccatttacagaaactcctttcccatccctggctctagtcaaccactgaatccaatttctgtctatggattttgccttttctggacattttatataagtagaatcatactgtatatggtcttttattattagcttcttccactcagcaatatgctttcaaggttcatccatattgtaacatatgttagtattttattcctttttattaatgaatgataatccactgcatggatacaccacagttttttctccattcataagttgatggacccataggttgtttcccctttgggctactatgaataatgcttctatcaattaatgtacaagttttttatgtgaacttatgttttcagttcttttttttttttttgagacggagtctcgctccgtcgcccaggctggagttcagtggtgtgatctcggctcacttcaagctccgtctcccaggttcacgccattctcctgcctcagcctctcgaatagctgggattacaggcgcctgccactacgcccggctcattttttttttttttttttgtattttattttagtagagaa

SEQ ID NO: 5399 - DNA, 1196 bp, Homo sapiens
cttaaattgaagctatgccacaggatagaaaatgaattacaacttaaatacatgttggaagtgtaacactgtttttcaaggtttaaaaaaattcctaatgccttttagccttctttaatatttttaggtaaggaaagtatgtttggattttttcctctttgtaggtatatgagattgaaatgtgaagtatttggacaacaaacgtcaagcaatgggaagccattttgatttcttgagtaatcttgtaagcattaagtgaatgacaaagtagtagtgtaacttatttcttatgttataacttcagtcaattaatataaggatagtttttgttgtatgttcactaaatggttaatataatagccattgaatatactaatctttcatcttagagaactatacaacttttattgtttcttaatggaacattctggctaaccagaaaaagtgagaaaagtagtaccttgggatgtgtagtcaagatgacaaattttaagactggaaaagctctaaacaggcttaatgattcttcaggtagaatgatcctgagaagtgatgtttgatggaataaagtgcatgtgatgattaagtgaagactggggcagaatgatttaaaaaaaggaaaaagatggaagatgagtagacacttgcaaggaacactgtcaaactataaatccattcagtgggttgtataacatttatatttagtctaatttagactttgataatttaatgctacttttatattttaacaaaaatataaattaaaattttcattagtctgttttgttgttgggtttttttgtgaggtactccctgttgggggaaaggaacaaggaacaaccatcagaatcccccagtccctacagaatagcctcacagtaacttgagaaaactgaacttggggttaaataacttgtcacacttgcagtctcctgcctcactccttcaggtgccctgcctagaaaaagacttgtgtctagcatccaagtgaacacatactattgccctctgtgaaccaggaggaatggaacaggcaatggaagggtgatagtacctacaataccctttgtagaccccatctcactaccatcaaaatcttgtccactagcccccaaaaaactggcaaggaaagaaggtggaggggaaatttatggaagtagatggcttaatagttatttcttttatcttgggctgcc

SEQ ID NO: 5400 - DNA, 1189 bp, Homo sapiens
gtgaaactgtaacatgtttgctatagagtaaaatttagcatatgagaaattgattttggatatgaagtatcaagagaatcttaaaaataagtctgctgggccaggtgtggtggctcacacctgtaatcctaggactttgggaggccaaggtgggcggatcacctgaggtcgggagtttgagaccagcctgactcacatggagaaagcccatctctactaaaaagacaaaattactcaggtgttgtggcgcatgcctgtaattccagctactcaggaggctgaggcaggagaatcgcttgaacctgggaggcggaggtcgtggtgagccaagatcgcgccattgcactctagcctgggcaacaagagcgaaactccgtctcaaaaaaaaaaaaaataaaataaaggatctgctacaaagaaactgtgatttggaacctgtgacattgtaataatgcagttctagttaattgaatctgtttttaacctgtgttcaagttgtggagtattcattaagtcacttaactctttcaaatcaaaatattgttgactcagtatgtggtaagtaaagtcttcataattgggaggctgatacacaaattgggctgaaatactgctctacttgtcaccatgcctccctagaataaactgccttttgatgaccgggacgaattgagtgaaatcgtaacggacagatacggggcagacagattttagaatagactcgtaaagggaatggaattcttttctccttataacttggatttgttgtcttttttccttttagccctgcctctttcttgtcgcagtcagtttcatcatcagatagaaacagtgttacagtacttgaaaaggtatattttaaaataagtctcaattaattctggaccatactaaattataaaatattatttatttttgttgataccacagttaaatttaatttctaatttcacattttctactatttgtacattttgtaccatatctacttatattccttattgctaagtgggaatattggaattagttaattctgccagtgacatacaatttcacaatagtattaacaaccttttataggttcatgataaccagtgaactgctaatgaagacagcttcaggatcagccatgattattaagggtttaacattacatatctgtcttcttcaggacacaaagatgggaact

SEQ ID NO: 5401 - DNA, 1189 bp, Homo sapiens; identical to SEQ ID NO: 5400

SEQ ID NO: 5402 - DNA, 1213 bp, Homo sapiens
ctggtgaatacggaattgaagtaactcttggggacaatatataatgaattatgattcatattgcattaccttgaaatatgaagtgccatttgaatgtcccagggcttattaatattgaagattttcaacccctgaactgcttttctgcctctgtggaaaactactttgggattcttcagtatttgtagtagtttgatagaaataatgaggaaccatattcattctaggcattgtttatatttgaagttactgagtttgaggaatggcaaattaaatttgcctaacccccaaaacaaatgaaatatctcaattataaaagcaacatggccgggcacggtggctcaggcctgtaatcccagcactttgggaggctgagcaaggtgggtggatcacttgaggccaggagttcgagaccagcctggccaacacggtgagaccctgtctttactaaaaatacaaaaattagccaggcgcaccactgtagtcccagctactcaggctgaggcaggagaatcgcttgaactgaggcagaggctacagtgagtggagatcacgccactgcaactccagcttgggtgacagagtgagaccgtctcaaaaaaaaaaaaaaaaaaaaaagagagcaacatatttgtgtaagtttgtatatgtgtagggctgtgtaggtatgtgtatatacagccatattctaagtgtatatttattaaaatagattgcatgttgcaatacggttttctgaaaggggtctcattgactattaaataaatgactactactaaacttgtctgtagtcattaatcttaaaattacctgaaaatctgatgacagctgccttccctaactttaatgtattaggttggcacaaaattaattgtagtttttgccactattaatggcaaaaaccgcaattatttttgtaccaacataatacacctttcatattatgtattatcttgcttaatgggttttatcttgattatccagttacttccatcctcttcccaatgttaatttgcaatagttttaaaatgggaacaaatgaatcaatcatcagatagttaaaatgaaattaaatcagctgcctaataatttatggaattcattggaatgtgcttaaaatgctaaagtgtatgtcattgaacatgaaatcttttttcaggcacatacattgttggtattgatgactttttaaaacctgtgggataaacttgca

SEQ ID NO: 5403 - DNA, 1217 bp, Homo sapiens
tacccctgaattggcaggaattgtcaaaggaaatagagatgcaagcttacatcaaatttaaaagtatggcaggatgattatgtagataatgtgttaagtggttttcacagacaaattaactatgcacagttatatattaacataatgccactgtattttagtaaaactggaaggtagtaaaagttagcctggttatttttcaggacttggtttcccttatatttttataatatttaaccaatcttctagatttctgtggaggggcaaaaagcattttagaatagttctgatttgattttaaaggcctcattataggttttcatagatgctgttaagcttacgtttatttctgatgtttttaaagtagatgtggattctaacaaaacaaatattgaaatgattgagtcctttgaatttttaggtaagaaacctaggaccaaagcacccaagattcagcgtcttgttactccacgtgtcctgcagcacaaacggcggcgtattgctctgaagaagcagcgtaccaagaaaaataaagaagaggctgcagaatatgctaaacttttggccaagagaatgaaggttagtctaagatgatttgagggggtgggaggagttcgacctggctttggatttgcgtctttaacccagaaaggccttaactgtttgctgttttgttttgtttaggaggctaaggagaagcgccaggaacaaattgcgaagagacgcagactttcctctctgcgagcttctacttctaagtctgaatccagtcagaaataagattttttgagtaacaaataaataagatcagactctgatctctgttgacttttcattgctgatagaaaactacataaatgaagagagggaaagttaggtcatagaaaatggggatatgtatatatggtattccaatggtggataaagtcagacctattgtgtgtggtagtggaagacaaggtcagtgtacaggggttcctttcaggggatgggtggcacaggaagggattctgagcataagacacctgcctcttcagaatggcatggaacttaggggaaatgatgaggactattaatcttttttatatagtttatttttgaggaatatagctctttaaagcactatacacaatttaatacatgaaaattgaccttgtgaagatgaacatgtcttttttaaaaggtaacttttaaggcatagttttagtggataccta

SEQ ID NO: 5404 - DNA, 2537 bp, Homo sapiens
gactaccaccactggcacaacctcagacccacacccaaccgactttacctcccaggccctgattaatctcgcccggaagtaccgcccacccatgctcacttccgctatcccgtacttctgctcatctcgcgagaactgaaagcgcctatgtgacctgcgctaagcggaagttggccctcttttccgtggcgcctcggaggcgttcagctgcttcaagatgaaggtaggtgatggtggcgagtgttagactgggtttggggaacgtgaatcgagtcccagaacgcggcattgcctcagttccagcactccaggatcctggctttaggtggagaagggtctcaagtaggagaaggctcgcctttctggggcatggagctttttggccgaacggatggcaggcgattgcggctggagccgcggcgggccgggagcgccatggtggcgtccccgcgcccagccgggacggatgcggcgtgttgcccagtttgcggcaggcctgtggtgcggctcttgaccccggctttcttgcttcgggagggtgaacggctgcggagtgccctcgcccccagagtcattccgcggggcttgaggggaaaacgtcctgctgagtgcggcgcttcttgactgctactctgctttcacgtgcttttagtgagtacagtcggcatcttatatttcctgcttgtgtggaggcaacatgaaaggctttttgcagtggaattaactttgtagatggctctacaattacctgtatagatagtttcgtaaactatttccccccttttaatccttagctgaacatctccttcccagccactggctgccagaaactcattgaagtggacgatgaacgcaaacttcgtactttctatgagaagcgtatggccacagaagttgctgctgacgctctgggtgaagaatggaaggtaaaagttgacaaattgttgcaggtatttaagtcagagacggtaaacgccattggtaactggtatttggaatggggttcagactccgggttctggcttctgacctttggtaagttgcttccgaatgccactttataaagttagaggtattaccttggagggggggacgtagagtaagccataaaatatacgtaaagtttacatcaacataattcttgccctgcatcatgcatttggcaatatgtcacatagctgtcctcataatccccaaagtgccaaaaagggttgtatctgatttgtttgttgctgtttgatattttatcttcttagtgctgttatctctaataaaacatcggttagaaatgcgacttgaaagacatttgataattgaacttgacaagttgggaatatagacaaaactcactgaacagagaaaacgtgcttaagttcaaattggttttcataattatactttctcatataggtgtgttcacagaggtcacaatcctgtactgtataattttggaatagaaatagtaaatgtgtcattcattgtatgctcttgcagggttatgtggtccgaatcagtggtgggaacgacaaacaaggtttccccatgaagcagggtgtcttgacccatggccgtgtccgcctgctactgagtaaggggcattcctgttacagaccaaggagaactggagaaagaaagagaaaatcagttcgtggttgcattgtggatgcaaatctgagcgttctcaacttggttattgtaaaaaaaggtgagggttacttgtgttcaattttcgttgaaattgatttaaagccagttgtccaaatgcttattcatttgcagtatccagacttacagaccaatggatttgtttctctaccatcaattcaacattaaacattctgatttaggattcttaaggaagttgttgaattaaaatctcttcaactgtttcttctaaggagagaaggatattcctggactgactgatactacagtgcctcgccgcctgggccccaaaagagctagcagaatccgcaaacttttcaatctctctaaagaagatgatgtccgccagtatgttgtaagaaagcccttaaataaagaaggtaggagggattatgcaattagggcttgcttaattttggtaatttgtctatcattttgtgtgcatatcagaagataaatatgtgcctttggaaggccttagcactattcacttggagtttttacagaaaatatttgggggtggccagcatacccagttggtgttaatccttgcttattatatccagtgccttgtagagtgcagtaatttcgttgaaaatctgcttgtgaatctttgatgtatacattatccaaaaataacctgactttaaggtcattgctatctggtttaggagtcacatgtttgagaattctgggactattagcaccacacactttgtaattttatatcagatgttctaaattattaatattttttaagagatgaggtcacactgttgcccaggctggtcttgaacccttgagctcaagtgatgctcccactttggcttcccaaagtgctgggattatgggcgtgagccaccacacccagc

SEQ ID NO: 5405 - DNA, 1211 bp, Homo sapiens
tagttcatttttagcctgcagaatcgcctcttctatttgaccaccttgaagttggtcttctgattttttatttttatttaattaattaattaattaatttttgagacagagtctcactctgttgcccaggctgaagtgcagtagcatgatctcggctcactgcaacctccacctcctgggttcaagcgattctcctgcctcagcctcccaagtagccaggactacaggcatgcaccaccatgcccggctaatttttgtatttttagtagagacagggtttcggcatgttggccaggctggtctcaaactcctgacctcaggtgatccgcctgccttggcctcccaatgtgctgggattacaggagtgagccactgcgcccggctggtcttctaattttttaacatctggttctgctttaaccatagccagtgtctcatttgtaatctgttctgtatactttctatatgctacatttttagggatttgctcaagaacataaaaaaatctttgtatacaatattcttagcctctcctgtggactctcgcatacagccaatcccacaaggccagtggtctctcttcagcacacccgtcatgactctggctaattgagaaaaaaaaaaaaagatttgtgtgtgtgtgtgtgtgtgtgtgtgtgtgtgtgtgtgtgcgtgcgcgtgtgtgtgtagagataagggctccatatgttgcccaggctggtcttgaattcctggccttgagtgatcctcctgcctcagcctcccaaagcatttgtccattttaaaatcgggttttttaatatatattcaggagactaaactcttattagatacgtgatgtgcaaatattttctcccattctgtagacttttcgctttcttaataatgttacagtttttaattttaaagcccaatttatataatttaaaaattgttgtagatcatgcttttggtttcatttaaaaatacgttgccaaatccagtgtcataaagtttacccctatgttttaaaatctaatcttaaagacttaccctatgttatggtcttagtttttatatttaggttattgatccgttttgagtttattcttaaataattgtgtgaggttgggactccagcttaattattttgcagatagatgtccagttgttccagcactatttgttgaagagactattcatccctcatcgaatggtcttgacactcttgt

SEQ ID NO: 5406 - DNA, 1187 bp, Homo sapiens
aaatgtttgttcatgtcttccacttatttttctatttacttattagaggtcttttaatatcctggagataggagttcattgttgtttctatttactattgacatattttcctagttttctcagttagtggcttttttactttatggtatcttttgataaacaaattcttaatgtgatcagatttttaaaatagttagttctttttaatgtcccatttagtatattctcctataccaaggtcatatagatattctcctgaattttctgaaaagttttagaagttttgtctaacattgaaatattttcaaatatctggaattgattttatgtatgtatgaggtaagagtctaatttaaatgttttcctatataggaaaccagctccagcatgttttattgcgttgtctatgcttttatcaatgatccgccatgtcaagcatcagcttttaaaatatttatgagtctgtttggaagggtgtacatttctgttccattgatcagtttgttgatctctgtagcaatactacaatgttgtaattactatcatttcataaagaggttggctatataatgtaacaagttctagtagatcatttttttcttcatatacattttagactcagtgtaagttctctgaaaaactgttgagatttgaattgaaattacattgaatctgtggttgaagaatattctcatctatgaacctagtttctcaatgagtttatttaaatgttatttaatgtctttaaagtatctgtgtagttttatgctttatttattcctagctactttatattttgttttgctattattaatattaaatgtttcctgtttgttcctgatgtgtaaatatgcagtctaccttaggatattgatatgacttctaacatcttactaaacttattaattctttacagatccttttgtatttctgtgtggacaattaaatgtgaataatgacacatacctgtcttatttccaattttcctatccttttccccccagtgcattttgcagtcctgagttagtaggaataccagtaaaaactgattacaaagggactgattctaataatttgctatttagaaggttgtctccatgggactttggtagctactctttttcaagttaaggaatttatctcctagtcatgtttgtaaggaattttgtttgttttcattttttgaa

SEQ ID NO: 5407 - DNA, 1201 bp, Homo sapiens
gttagctattattattactactaatattattagtaggaactatttgagttagtcgttgttgttgttataaaccatgctgggttggtaacagagattgttaccaacaattgttggtgtttctttgtagagaaagcaaagcctgatgtcatttttatctttgtgtccagtgttttggctcacacaaattatagctacttggcttttctcattctgatgttgccaaggaatcttataatttaatcagtgatttgagtggcctgtgccttgtcaaatgaaggcactattcctaatgcctcattttattattattgttatttttgttaatatctttgaggcagggcgtgatggctaatgcctgtaaccccagcactttggcaggcccgggtgtgtggattgcttgagcccaggagttcgggacccacctgggcaacatggtgaaaccccctctctacaaaaaatactaaaattagccgggtatggagatgcatggctgtagtcctagctacttgggaggcaaaagtgggaggatcagctgagccgggggaggtcgaggatgcagtgatggtgccactgcactctagcctggctgacacagtgagaccctgtttggaaaaaaaaaaaaaatctttgagcaaaatatgtgttttggtaagtttgagaatattcaaattcccaacaaatattgcccatcagtctttcaaaggcattcaggtgagtagtttattctttttgcagctccttgctgcctttttatcagcctgctgcccagagcccgcagaagagattacacctgggacaggggatgacttttcttcaatcttactcttaacagggccattccaaatggattttagaacaatttcacataattagggtaagcaggttttacccttggtgtttccaataattaattattacaattaaaatccatttactgtatgtactccaatgggatgtcaaatgtaatctgtatttagcacccccctggaaaacttaaaatattttcatttaccattgttcagactccaaatgctgatggcttttcagagaacaaaaatgtcttccttgcggaggaggttaatctcagcctgtaccagttagatactacgagagccatcataaacgcaatgtcagagaactggagaagatagagccaactgatgagatagatgctttttcctgttcctgttagacatatgct

SEQ ID NO: 5408 - DNA, 1195 bp, Homo sapiens
catcatcttctgaaagacatgggactgagcatgttgtgtgttatctcttggttataaccaaccactcccaaatctctcagctcttgtctagagtcttcatagtgatatagtgctagaaaggctctcttgagggtttatgtagtccagtcttctgctgcttgactgatgagtgattaatatcctctagcaaaaatctatcttacttttaaaggtctatatgtttgagttcctatatccactctacttttgttaaacctgttttagtcactattatagattagtgccattctttacagttaatgaaaatcaatattgttcacaatttctttttcagacctgttttgacaaagaagtactatcagatgtttatcttattgttactacttaatgtgtctgcacatttttattaaatgctttttaaaataaagattctcaattattttctacctgtaaaagatgtcttacaaccacccagtatttatttaaatgtatttttctgtggtttattttttattgatatataattcacataacataaaccttttatttttaaacacctacttcctcctctaaaagcaaagcttactagcattttcacaggtcctccctcaggctatggggccaggatttggtagctggtgctgagagaaaacgcttgattgcatccttgccctgggactgtgccagtggcagctgtcactcaatgggacaatttctcctgctgctctaaccttaggcaaacaaacaaacaaacaaataaacaaacaaacttaagagcctaaacctggacataacagttcaagtaacctaggattgcttttctgtttcattgtttactcttacatgtctctgttatgttgttgcttttactcaacttgaggttcatggtaatttccaaattatattcatttacataagttttatttttctctccggaagatgacagcaatactatttacctgtattttgcaacttcaggcactgtgctaggtgttttatagatattataacctaagcaggaaagtagtcatttcttaaattttacaaacgagtaaagagaggcttagaaaaattgcataatggctgatagctggcatggctatcctgaagtcctggccctttaaattttatggtgtttgtcattagtctaaaaaccttggccatggttgttaatgaatttcttcttcatgggaag

SEQ ID NO: 5409 - DNA, 1177 bp, Homo sapiens
aaaagaatggtaagataatagtgtgtattcagttaaattgaaaagataaaacataaaatataagaataaatatgcttgcatgatatatacagaaacataattccttaataatcttaatattggaagagacttttaaaacttattcattctacaaaaaatgacatgataagtgattaagcttttgaacattacttaattctaccttcctcaattacttgacatttttacttatgatgtttattatttaaatagtccattggaaagaagtttattgacagaagtgctaaaaaggtaattacttcctccacttataaggaatttgcaggcatgtaagcaacatcacaaaaaaaggtaaacagtataatcttactcttctaagattcaaattatatttatatactaacattataattaaagaagtattctacagtcttgaagtttaacctttaagagtcaaataaggtcaaggaaagaaatgtatctaaactagcaaaggtcccaaccagacaatctttctatagtgatatatcactctagccttattccaatccagcttgagcatctgatctgtagtgattccttgaataacaacagctagcatttattgaagactaactataacattctgttaagcactttgtagaaaatcatgattatcaccacatttcaaacggaaaactgaagcttgtactgaatttcggactgtatcaaagcaatctaacactaaaacccatgtacttgccacttagccccacaaagacagggatgacatctcatagacctttgtgtccctcgttcccagcacactgtaaatgcttttagagtataaattatgtctaatttccttgtctcttcaaattctataagcaaatggatcttataataatgttgcaattatttgattctatgaaaaagtattaaaagactactatctgccaataaagttactccaaaatatattctgatcaagttaacttagaatcagaaaaattagcccatccaataaaggttactaggatgccaaaaacataaacatcatcagaatctgaggtataaatttcctagtatgtagaaaataaggtcagcaatacaggaggttcaagtatggaaagacacaggaaatactgcagactagaataagataaagtcaaatatcacatcacttgaggggtttgat

SEQ ID NO: 5410 - DNA, 1207 bp, Homo sapiens
gtggtcagtattggtgaatgttacatgtgagcttgagaagaatttgtgttctgctgccgttgcataaaatagcctgtagatgtcagttatatccagttgattgatggtgtttttgagttcaactgtgtctttactgcttttctgcttgttggatctgtccatttctgagagagaagtgttgaagtctctggctatacgagtggattaatctgtttcttcttgcagttctatcaggttttgccttatatattttgatgctttgttattaggtgcatgcactctaaggattgttatgtcttcttcgagaattgacccatttattatataatgtccctctttattcttgacagctttccttgttgtcaagtctgctctgtctgaaattaatataggtcttcctgctttcttttgattaatgttagcatagtgtctttctctatccatttacgttttatctgtatgtgtctttacattaaagtagatttcttgtagacaacatgtagttgggtcttggtttttgatctactttgacaatcttaatttgcttccaaaatgattattgatatattttgattaatatcttctatatttgttactgttttttttttctgtttgttgctcatgttctttattctgcttttgtattctttttttgtccttacggtttcaactgaacattttgtatgattttttctcttttgttagcatatcagttatgtttctctttttactttttaaatgattgccacacagtatgcaatatatatttacaactatgtctacttgcaaacaacactataccacttcacaggtagtgcaaatactttataataacaaataatcctaatttttttctctcattccttgtatcattgctgtcattcatttcacttatacataagcatatataatcaaatacatgactactattattatttttaacaagctgttatctgttagatcaattaagaataggaaaataaaagttttatttcatgttcacttatccctcctctgatgccttcctttctttatctagatctgagcttctgatctctataatttgcttactccctaaaaaaactttaaacatttcctgcaagggaaatgtacgggtaacagattttctcaaattttgcttgtctgagcaaggctttatttctcctttatttttgaaggatcattttgtggggtacagaattctagg

SEQ ID NO: 5411 - DNA, 1198 bp, Homo sapiens
gctatattaagagaaagaaggagaggataaaaatgagtaagaaaagctgctgtgtgtcaagttgtaaggtatgcaggctgaagtggtttgctagaagccagttcaacataccggtgcttcagaaaagccaaagattgttctattctgctgggcttattgacataactgtcttagttatgtctttacaacaaatcaataattttaaattggccaaagatgacacagaagagatcctaggaaatgtaatgttaatagatgaaataaaaatttaggaagaaacaacttactaagcttggatttttaagttatgaaaaggcataatgacccatactacattgataagaagaattcagaaacagctctagagtcagaaggaaggaaagaaactgttggcctaacacaacaaacagacctgcatttacaagactctgtgaaggaacacaagttgctttttgacttcacctgccctcctatattagctctttctcttcttctggttaataccaaagttctctgttgaaatttttttccttttgaacagggagagtccggtagtgaaaggcaatgcgctgttagctctaagcagccttgctgtcgtcgtatctagacatgaagccagcctctcctcagactctgacgggctcctggaggttagttggggtgatttaaacaattggctttgattatgtctttttaagcctggctttaggtagcctggccctgggcttacaaggttagattctgtgattatggcaccaagttatagtacttgatgggcctttatactgtgagcctcagtgtcttcctaactttgctgcttttctgttttcctttctccatcacagttaagtggtcatttctatttgaaggtgccaattttatgccataggggttatctttttgtgattacatcaatggtaaccaatcttacaaggttaactaggcttactgaaagtgaacaatgccgtcaaaatgataaataagcagtgtttattgactgaaaaaaatgtactttgcattttaattgtatatgtcaatgacaaagtgcctattcatttttgcaaggcagttatttcttaattaaacatgtggtgagctggccactgttcatttctaatgtactttcttggataattcatatctgtctaaataaaaaggcatggatttattcttgttttaagtctcattatctggtagc

SEQ ID NO: 5412 - DNA, 1158 bp, Homo sapiens
ttatgatgatgttctaagctgtgaatactattcaccaacccttgaccagtggaccccaattgccgccatgttaagaggccaaagtgatgttggagttgccgtctttgaaaataaaatctatgttgttggtggatattcttggaataatcgttgtatggtagaaattgtccagaaatatgacccagaaaaagatgagtggcataaagtttttgatcttccagagtcacttggtggcattcgagcctgtacactcacagtttttccacctgaagaaaaccctgggtcaccttctagagaatcacctctttcagcaccttcagatcattcttaggtctaaggtgtaacacctttgcagtacgtcatgggtgatctaatacttccccttcagttgtatcttcttacagtgattggtacagttattagatataaaggtaactgatgttattcgtcttgtatggcttttagtatgtttatcaagtggctaacaaatgcattctgaaaatgtatttaacatagctgttttaacaaatgaaaaaaagacgtagaaaaatgtttagatgtctttttgtgatgttatataaaattgtagatgactgtggtaaatgtgtaattatgtccattatgcttcaaagttgagttttcatctttgactccaaaatgtcagagggaggccgctctaaactaaaaataacgaaaggttgccaagtattaatactagttacctccctcttttcgtagtttttgtcatgtctgtcaacttactcgattgtgtggttgcattcagaatatttgaagtttcttacgtagacagaaataataaaaatattaactaggaaaaaacagtatagcaccaagccagtatttggtatctctctctagagcgagcaagagagggagagaggaggaaaaaatacacataatacaaacatacatgcatgcacacatacatacatatgtatacacacacataatttgaaaactgattggcacttcaacgatgctgaaattgtttttaaattgaagtttctttcttccacaaagcagccgtttctattcaaatggaaattcagtaccagagaataaatgtctatgtagtcatactgaatttagatagataagggctacagcatactaaatcgacaaccaaatttgtcatgt

SEQ ID NO: 5413 - DNA, 1282 bp, Homo sapiens
atgcattgaatctataaattaccttgggcagtaaggccattttcacaatattgattctcctatccatgagcatggaatgttcttccatttgtttgtgtcctcttttatttcgttgagcagtggtttgtagttctcttttgtaagttggattcctaggtattttattctctttgaagcaattgtgaatgggagttcactcatgatttggctctctgtctgttattggtgtataagaatgcttgtgatttttgcacattgattttgtatcctgagactttgctgaagtcgcttgtcagcttaaggagattttgggctgagacgatggggttttctaaatatacaatcatgtcatctgcaaacagggacaatttgacttcctcttttcctaattgaataccctttatttctttctcctgcctgattgccctgaccagaacttccaacaccatgttgaataggagtggtaagagagggcatccctgtcttgtgccagttttcaaagggaatgcttccagtttttgcccattcagtgtgatattggctgtgggtttgtcataaataggtctttgtgcctgtagtcccagctactcaggaggctgaggctggaggatcgcttgagtccaggagttctgggctgtagtgtgctatgcgtatcgggtgtccgcactaagtttggcatcaatatggtgacctcctgggagcggggaccaccaggttgcctaaggaggggtgaactggcccaggtcggaaacggagcaggtcgaaactcccatgctgatcacatgctttttctttcaaaattgggatccttcaggttgagccagccagagaagatagcgaggtgtaaatctctccaaaaaagaaaccttacaaattaaaaaaaaaaaacaaaaacaaatagcaaagcagaagttattaagttatatatctatatataaaaaatatttttaaaaggtaaatcatttgtctcatgacctagaatgaaactagcacaataattacaaataattttgtttgtctatatacaaaattttagattggtgccattttatgaacaatactgcacttttatagttattttgtgcaattttatagtaatagatatttctaggttctctggtgttcttgtacgtgttgatttcttgttctacaaactacgtatttgtaaaagtggggtagagattttaatttgtatgtatatataaaagtctctattctccacccctcggcattcctgaacctgcctctctgaggataaagcaattcattttctcccaccctt

SEQ ID NO: 5414 - DNA, 1099 bp, Homo sapiens
tgaatatcactgcctcctttcttcctttcagaatatggcccagttttctgttttattaccaagacattaaagtagcatggctgcccaggagaaaagaagacattctaattccagtcattttgggaattcctgcttaacttgaaaaaaatatgggaaagacatgcagctttcatgcccttgcctatcaaagagtatgttgtaagaaagacaagacattgtgtgtattagagactcctgaatgatttagacaacttcaaaatacagaagaaaagcaaatgactagtaaacatgtgggaaaaaatattacattttaagggggaaaaaaaaacccaccattctcttctccccctattaaatttgcaacaataaagggtggagggtaatctctactttcctatactgccaaagaatgtgaggaagaaatgggactctttggttatttattgatgcgactgtaaattggtacagtatttctggagggcaatttggtaaaatgcatcaaaagacttaaaaatacggacgtactttgtgctgggaactctacatctagcaatttctctttaaaaccatatcagagatgcatacaaagaattatatataaagaagggtgtttaataatgatagttataataataaataattgaaacaatctgaatcccttgcaattggaggtaaattatgtcttagttataattagattgtgaatcagccaactgaaaatcctttttgcatatttcaatgtcctaaaaagacacggttgctctatatatgaagtgaaaaaaggatatggtagcattttatagtactagttttgctttaaaatgctatgtaaatatacaaaaaaactagaaagaaatatatataaccttgttattgtatttgggggagggatactgggataatttttattttctttgaatctttctgtgtcttcacatttttctacagtgaatttaatcaaatagtaaagttgttgtaaaaataaaagtggatttagaaagatccagttcttgaaaacactgtttctggtaatgaagcagaatttaagttggtaatattaaggtgaatgtcatttaagggagttacatctttattctgc

SEQ ID NO: 5415 - DNA, 1227 bp, Homo sapiens
tgtgcagttgtcaaaaagaatagatatctgtttatgcaccagtatggaacaatgttcatgacaaaaggggaaatcaaaaatacatagagtaaaataagtttgtggtgatgtatagataggatgtttatacttcatatttccagaaaggttctggaaagaaacttattgatggcttctgagggatgaatcaagagacttaaactgtctacttcatacctttctatagtggttgaatttttcaccacaggcaactgttcctttaattgatatattttaaggaatggatactagaggagacctagcttcatagcagtttatgtaacatgagataaaatatatgattcttggcattaacttctgataggttgtgcttggggcactatatccagttctgggcacaatgctttcaggaggatgactatctaaaaagcaccaagagaagagtgaagggactgaaaaaaccatgccacatatgtaatacttaaatgggttaagtatatctaactacttaggagaaagccttcaatgagaactttgtttaggggctgtcattctcttacagacatgtgcctccctcactgttctgtaagcttttgtaaaggcaggagttgtttttttaactcatcagtttaggagcctcttttccttgtatttagcacaaactcaacaaatatttgtgtaaataaaaatctgattacgtttctttcctacttaaaacccttcatcagctctcccaaacacctccccatgttcactttcagcaggtgactttagttccctcttcacagacagaactgaagcatcagcagaacactttcaagacccccctctgctgctctctcccaaactgttttccctcctgttaccatctgtgatagtgcttctcaaacgggagcacgcatcgtcatcacctggagggcttattaaaacaggttgcatggcaccaccccagagtttccgattcaggatatctggagcatggcctgataatttgcatttccaacaagttcccagatgatgctggtcccactttgagaactactgtcatagatgtttctccctgatcattgtcttatgcaccagaccccatacctcacacctagtaaggacatcagtctagtaactacccatttcataatcatttttctccttattattgaatcactttttcagcacacaaatatactttatttctcccattaaaattcttgaccccaattctatgtg

SEQ ID NO: 5416 - DNA, 1153 bp, Homo sapiens
ttctgtatcccgggttcttgccttgatgtactggaagaatcacacgtggacttggagaattagtgcaaggttttattaagtagaagtagctctcagcagatgggggagccagaaaggagaatggttttccccttgggtcaggccactcggcagcctgggcggcctgggctgtcctccgactgccctggccaaactccaaggcgttctgctggtcagtggcctgccagtgtgctggtgcctgctgatgtgctcctctcaacatccagctgcctgtgtgttcctctgctgatgtggtcctctccacgttcagccgcctgtgtatctgcctgcgagggtgtcaggcacaggattagaggtatggcaggccagggtggtcttgggaaatgcaacatttgcgcaggaaaacaaaaatgcctgtcctcgcccaggtcattggggtggagccctagccagggaccacgacctcctcctctacccagcatttcccttccccacttccgtatcatttaaagggaccatgctcttcccttcccagcactcccatatcaatagtatcatcaaaaaccacttctctgctggtcgtactctgttgaacacagacactgtataagtcactttctaccaccaatccagacaggcctcagtcattgttgaacagcatgaacaaattatcatgactcactaaaaagaaaaatatatcagccagtatgaaacagagaaaacagggcaaaaagagatttatctgactcatgagattgttttagttgttgttgctgattagtaaggttttttaacaccaaatttttcagcatataattgtctcgatctacttagaacatcattaaagtcaacataatttgtccagggattgtaattttatggtggaaaatgtccaaaattgcttatagctattatcattaagtttttacctactcattattccttagtgaatatgaaatgggagaagtgttctcttatccttctcacagggtatgtgacggggtgtggctcacttctttggtatcccgctgctcaaacctctagggggagcatttttggggctccaactccatggcagtgtctagagttgtttacagctcctaaagccccagtgggcgtgtgttacagtgtgctcttttagttttgccatctg

SEQ ID NO: 5417 - DNA, 1199 bp, Homo sapiens
tcatactgcagtacatttttttcttttagttctgttctatgctttaaataaaaatacaattaggtccatatggcaatataattttgactccttttaaaactgtagcttatatcataagtctatttgatgttgttttgaagttgtcatgtacattttgtcatacaagtttttaatgactgtttttatggggttgtgccccaagttacttattcattcccatgttatcagatattttgttctttagctttttttttttttttttttacattataactaatgaggcaatgtgtcttgagtattttgaattaactctctagaatcgattcttggggaggttatttactttgaagtgatggacagagtgtaggagatttatgagtgaactcttgtctgatttggaaatatagagttgtttaggctaggtattaccaacccaaagttgacacttgagtcacctaagttcttctctactccagagacttggccctgcctggcctgatcccaggaaaagagattttagggattacagaaatgggaacaagttgtgggtctgagcacagcatgcaaattaattcaacacagcccctgggacaggcccatgatcagtgagctgaaactcccccttcaagtgctttcatgattagactccagcctaggaagcttgtctattagttgtgtaatcttgaaaaaatctctgacacttttccctctgactcagtttccccatctggcacccaatcttttacagtgttatgaaaaatagggaaaatgtagaaaggaagaacatggcacccaatccttaatggacactcagtgaaagctggctatcatcatcatttttggggttgttgtgttctacaaatgtattttcccaggagttttttttactctgtctcctctttccttcatatacccccagcctgtggctggggtcttgcttcaaccaccatgcacctttctgaaacccaagttttactccctgataaaggtattgacctcttgttggtctcatcctccagacctacctatacttaagaaaatgacatctctttaaactggtccccagttcacttgttttccctaacattttaattcacaagattaatcacttcccttacaggccagtcttactgcagagttgatttttataattttgggcctgttggtctggttgtacttttctctttctgctggtctgc

SEQ ID NO: 5418 - DNA, 1129 bp, Homo sapiens
gggctagagacagcggccgagaggacgagccgggcagccccagggccctgagggcccgacttgagaagctggaagccatgtaccgccgggccctgctgcagctgcacctcgagcagcggggaccacgtccgagcggggacaaggaggagcagcctctacaggaacccgactccggcctccgctcccgggactcggagccctctgggccctggctgtagccgaggccgcagccggtgagaggcggagcctcgagcgggcccctcctcctccgttcccagctacccccgacctcgcgcacgccctggcccgctccctgcccgcggataccttggactacggtgccttcccgcccccaccagtggacacttccgggtggcgcttggccatccgcttggtggaggtcgagtgggtgcaagggccctcaggacctcccacatgtacagttcccctgcctcttgccccggctagtttccctggagagaggcctagccaacaacgaagggacggattttaaaacagcgagaactgggtgccaagaaacacttcatattccctgaacttttctggatgttgtgcgaacctgttgtatttttttttttcctgtattttggttctgagggatgagtaatgtgtttttagttggttgagtttatccattcttcaatcccctaaagccttcagctattctttcatatgtggccaacattttaagtacagtgtttgcttttataagtcggtgttacttggatgtcctataaaatacccactttttataaagatgatatttataacctaggaactcatgcctgtcttggctgcagtccctgtacatctaatatatactgatttgtttgcccccagagaatttttaaggtatctgcctatatcgtgatcttttgaaatggtaaataaatctggtgcattaaaaattatctgaaaggttgcggcgagtattatttgaagtgtgttacatttttatatttttaaaaagatacctttatgaatatactaatttaaatctggttttagttgtccttagtaaactatcatgttcttttagcttcatgtaacagtgatcttttaaaataatctaaagattaggtagtctaaaagttattttaatctttaa

SEQ ID NO: 5419 - DNA, 1123 bp, Homo sapiens
caattacacaaagaattgccactacactagtaattgttgtcttgaaacagtaactaagcaaataatacgtgaaataatgatttgtcatattcagccacctacaggtacactttgaatgaattgtgtacattgattttttaaaacctgagaagggggttcaatgagtgcaactcaaaagaacactggatgccctcgagaggggcccgtcagtgacagcagagaccagcatgaagctgaaaaccccataatgatcaccatgacagtagaggccacgagcatcagacggaacttgatagaaccacccaaaccagggaccaggatcccttccactggcatctcagcagtcccatgaagggaccttcctgtccctcgtctctgtcccagagcatgcgagccagcatcgcaaagccaggccagacctctcctcctcccttccaagcagcctggatcagagcttgtctgtgctgagggcaagaggaaattagcttgtatttagatctatgaacagggctggaagctgtagtgccatagcaggggagagaggtggaagtagatgtggtagctaaagcagcttctattccaaaccatggagcggcaaggctagactgaagtcccagtaaaggagcaggaccctgactgcagtctgagcatggtaaagacatttctgaaacaaccttgtgatgggacctgcagtttggcatctgtggtttggccagtggtgttcctcttcatatggaagggcagtatagaaaactgacctagcccgccagggttcaatcctggctagttacacattcttggacaggtttctcaacctctctgagcctcaggttcctcatgaggagatggagactataataatatcaaactcagaggactgttgcaaaaattaatttagtcaaaatgcttagaattgtgcctggcacgcagcaacactgtgttacgaatgactattatcattgttacctagagtggtggctttcataactaaaaacatatgatggtttctagagtggacctagacaaagatgacaaacttctcaaatcaacagaatacaaataggtctctgcaggagaaaaaaaaaaacactcaaatcactaaagcaataaatgatcagtttgc

SEQ ID NO: 5420 - DNA, 1121 bp, Homo sapiens
aggaagtgaaaatagatgagtttgtttagtctttatctgggagtcttacctctttatgtacacttatcttcttcaactagactgcaaactctttgatttagctgagtcagggatataattctttttatccctctcagcaggtaatttattgctttccacatagtaaatcataatctgctggttgaacttgttaagtaaggcagtgatgctaagtgattgatacatgtcacaaactggtaatcattttaatcccagtgcaattattaatgtactgtgttcattgatatatataattatatataacattatatattatataatattactctagccatttatatatttctgtattaggtggggtttttttgtttatttgttttagcttatcagttatcattagtgttagtatattttatgcgtggctcaagacaattcttcttcttcagtgtggcccagggaaggcaaaagatttgacacccctgttctagctatgtagaaacacatgctgtactatactactgggctctaagtcaatgcttcataatgtgaaaaagtcctcagtatatttaggtcttcttaataataaatttcattatcttaattgcatgtatgtttcgtttaaccagggatttcttagggtaacagtcactaatgtgtagaagtgaagatggagattgagaaaaaacccagtcatgattatttattgccctttcttttttccttgttctctatgttaacgtattcttatcaaagaaacactaaacaaacttctctttatctcatgtaattctctatagtagttcatatgaattatgtaaggttcaattttaaaacaatagattcttaagatagtatatactctaaagtttgtctagacactaaatgaaaatgagtgctttgacagtttatgtcctaggctaagtcagggtacgaatatgtatctattaattatcttgtctttccagtccaaacaggagctttacagaaatgcactgtatgagtggccattccaattttgtatcttgtgtatgcatcataccctcaagtgacatctaccctcatggcctaattgccaccggtggaaatgaccacaatatatgcattttctcactggacagtcc

SEQ ID NO: 5421 - DNA, 1173 bp, Homo sapiens
tgaattatacatgatacatacctaacaggtgtgcttatgtttattttctgaatattcatattttagctgaattctgtgcttttcagggcattaaagaatatatcttttcatatttctagatattaatgcctgcgaaacatgccttctaattatatgctgccttgatacttgttatggaatttggttattcttattgtcacataacatcacttctgccaatctttatttcattcaaagttccatttagtagacttagaattgtgaattttgtttacttgaaatagaggaagttaaaaaaatacactgagaacattttattaggtctttattcccaccttcttatttccatttattctattctacttaacagtgaatgagttcagtgtaatttcacttgcagtttttctgactgaggcatattctgacaggatcctgttttttgaatgtgtgttttaattgggcttccatgtggtgatagatgcaggactccctgcgagtccctttctggcttctataattctcagcacagatggtttttattacactacttcttcctcccacccttcaccaccccgacaataaatactgatacagccccctaaggtattcattcatgtcttaggcctccaaacagaccagacagcatctcatgattggggagagtgacagtgggaggacaggatcattacaagacagttgagcagacctagccaccacccttgggagtttgaaacagatagtgtgagacaaaaatgaatcagttttcactgtagctgaatttcaattctagtgctccttgaggtttatttcaggttttgttttgttttgaattccccagtgcagcgaatgagatggaaaagaatatataaattaacttcgaaagactctcagggatatatgcatttcaggaggatggatggagaaaatggaagaagctttggactgtcaggggaattcatttatctaatggtcaatggggaaacatttaccctgagaaaagttgtgagacctgactttaggtactttgcatcctacatgctgtgtctctctttattcccagccatatgtatgattctattagggccctcctagtttaattgtctggaagatgtaatgatttcatgagacacctcaatattttattgattcaacaattatttatttatcactctt

SEQ ID NO: 5422 - DNA, 1216 bp, Homo sapiens
tatatatagtatatatatgctatatatagtgtatatatagtgtgtatatatacactatgcgtatatatagtgtgtatatatatattatatacatatatatatatatatactatatatagtgtgtgtctatatgtgtgtatatatgtatgtatatatgtacatatacatatatacacatatatacatatatatgtgtgtatatatatgcatacatatatatttgtatatatacacacatatgtgtgtatatatatactatacatatatgtgtatatatactgtatatgtatatagtatatatacatatatgtgtatatatactatacatatatatgtatatatacatatatactatacatatatgtgtatatatactatatatacacatatgtgtgtgtatatatataacatatatatatacacagacactatatattagggaaataacagtgtgtcaatatgtagatgctcagttgctagatttgaagttgaaaggataaggaataatgtgcaatggactcattttaatttaatttaattttctagtcttgacatgtgactcttgggagttgcttccaaagcagaaaatcagttcaaagggatctgtggacttggatatgctccatggggatgaaaggcatgtgaaggaagaaaagacatgatcataacagacagatgagaactgacataactgcccatgagtctcatgtgcagcttaaatgaaatgacgtgccataaattaaaccctgtgattcctgtaaaaaatctgacatattaagtctgactgaattgaaaaaaaatggatcaaagaaggcatatttctatggcagagagggatgcatgaacttcaggtttttattcttaaattgtgctgttataatattgataataaagatatctgtttccttattagcctaccaaggcctgtaggcctgtgattggagtcttaggggccaaaaatgggtcagagagttgagcataatgggcaagtctgtagtaatttgcatcattgctcaacagccatctacccctctgattgagagaattatagttccccatctcatcagcattcactttagccatgtagcttgttggggctactgaaatatatgtggcctgatattgccacttgtaggaataagctttgagagccatcatctgggtatagccttgttcttttccctctgccatgggaacagtggtgcataagatgggg

SEQ ID NO: 5423 - DNA, 1178 bp, Homo sapiens
tggcttccctagggctggaggacccacttccaagctgggtcactcatatactggctgttactggctgggagctctgctgggacctctccttcatgtggctaagttgggcttcttacagcatggcagctggatcctttgaacaggagcacccccagaggataggccacaatgtgtaagcagttattaaggttctgcttgtattgtacttggtagtgtcccattggcaaaagccagtcactcagccaagtccagtcaatgtggaaggggactatggaagggtaggaattctgaaaggggagaatcaattaggtctactaaagtaattggctaccacagagagaaaggctaagtatacattttctaaaaaattttgcgttctttttttttctttaatcatgtatgctatatcctctctctctaaaatatccaagaagtcatacaggtgaaaagtaaggtctcttgtgaatcaaagccctttggagggtggttaaaatttttgttacaggcctcataatttaggagcaatattattctatgaaagcagaagttttactgtggttaaacgtatggtgaagacagttgttgaaatagtattattttcacatagacagctggagctttgcttgtgaaaagaatgacaaagtaggagtgtctcggggttgtctgaatggtgtaaatgtgtagacattcaaatttgttgtcaagagggaccaaaccatgctcaggaaaatgccactggacgtccagtctgaagtgcagtaagaaagacaagtgggagaaagagcagcaatgcaatattggaaagactagcagtaaggagactgcaggttcaggagagtgggctcagcactgaggctgtgaaaggtgagcgtgtcctgcagctgtcctcagtagactgaaagctccttaaggggaagggctgtgtctggcttgttgactcaacatggaccccactgcgtgacacagagaaggcactcttaagtgtttgatgaatggatacatttaaagaaacgcagaattggaaaccattccctctctttaagattctggtgccataaaataattagagtaaccttttaaaaaatatggcacttcgggcgggcgcggtggctcatgcctgtaatcccagcactttgggaggccgaggcgggtggatcacaaggtcaggagttcgagac

SEQ ID NO: 5424 - DNA, 1279 bp, Homo sapiens
ctgggcaacggcgcgggggcgcacgggtcgggaggagctgcgccgaaaggccttgtgggtgttggtgctagcgcggcttcccggcgctcgtggaatcttctggagcccttttctccactcagcgagcctgagagtgcggaagtctccggctggtggggcatggcccaggagcactgcaagtcctagggttcccaaacctgtggggtggccgcctgggcccgcgagggcgggaagggctcgagtacagtgacccagcgggagctgtgtgtgaacgggaaagctcttggaacagtcttgcccccccccccccccctcttacgggcgcctcttctctttttgggaacgtggcgagcaaaaaatgcttgagccaggtgggtctagtccccagaccaatagcataggccttgggtcttgctgtttttcacgcgtggtccaaggcggcataattaatcaaattgtgaagttgttaaggctttttgtgcaagtccaggcccctagacacatgttatctgccctggacctcgctgattcgtgcagattgagctcagtgtgtctgggactgagctaaacagtgagacgtttggaccgtctttgatgtacagagggccgtggactcctctggtcaggttttcacccagtttggctacagagtagccgcaagagtgtctgactaaaacaatttgtttaattatttgacctcacttttaaatcctacgggtcagggaacctggatgtacaatctgcaacgtaagacctcggacttgaaaatggtaccacgggggcttaatgggaattggggtccgcttctttatccagggacacagcaggtatgtcagtatctagcaccaagaaagatggagtttgccacgctcggtggctcacgtgtgtaatcccagcactttgggacgccagcgtgggctgattgcgtgagctcagaagtttgataccagcccaagcaacatggtgaaaccccgtctcgatttaaaacaaaaacagaactggagatgcagagttgaaaagccccagttagactttagtgagaagccaaacaagtcaacagactgccagagaaaccatgaggtagaagtcagtaggggagagcctcctatattaacctgatagatcagagagaatttctttgggaaagtggcaattgagctgagttttgaaaatgggaggagagcagtggacaaagcacaggggaaggctatactaaggtgtggaagaatatgatgtttttaggaaattgcaactaattggatatagccatagctaaggg

SEQ ID NO: 5425 - DNA, 1565 bp, Homo sapiens
ttaggctgttgcaggatgggttttggtattaaaaagtcagtttgctggatagaacaatggttgttaaagtgcagttttatttaatacaatcatttttaataaagcctgacttctggtcataatccttgaactctagttcagagtgtgctatgcactgtgcctttttagagcctgttctaacctgagattggcagattcacctaaatattacgtgtttacatgtgtttttctggggaaaatgggtccatgatactctaagggagctaatgatgaaatcagattgaacagtgaaagtttcttttgaaggtaaactttcctgagaatggctttctctctcctgataaactgtctttgctggaaaaactcctacccgagaggaaggaagtggaagagactgatgagatggaccaagtagaactggtggactttgatccaaatcaggaaagacggcgccactacaatggagaagcatatgaggatgatgaacatcatcccagaggtggtgttcagtgtcagacctcttaatgggccagtgaataacactcactgctggcatttaatgtgcagtagtgaatgagtgaaggactgtaatcataatatgctcactacttgctcttgtttttgttttaataaactatagtagtgttttaaaaagttaaatgaagaataaacgcaaatataaaagctctgattttgccctgtatgtatgatgacttcagtgtgcaagatgaagtttaatacctgtaaaaactacaaagaagttcccctagcatttctaggccaaaccttgtaattgacttcagctatgtacgtggacaagcttagactgaaatgctaggtatatgtattggcttcagtgtatgacccttcattgttaagctatgaaagtaaaactctgtatttaactggcaatgaggaaaaaaaaattttgtagagaagtgttggtctgtatagttctttatattaagtgggattcattgtaatgcctctgcatttattctgttgcctcagctgttacttgaagatggcgtaatatataatttatcctgtggtatcagtgataaaaatgatacctttctgtaggaggggtttatcataatatgctgcttcttgaaggcttgcacttccagaattgtgtttccttctgctgtgccattcatatatatatacatatatatatataatcttgaccagtcctggtcatttgctcccctccttgtctgtggaccatgataagcccaagtagtgacttcagagctgggtaacagaaattaaagtgaaaagacctttacgtggagaatttgcatgcgtaatataggaaggtgttctttaggtatgttacaggattactttaaaccatttgactttcgctccaaagttatgttggtagtatagcaaattatgatgaatagctttaattgtatgtttaaaagtctcatatgttcacatgcttaaatctgggtatcagaatttaagcaattcttgaaatgtattgtctccttaatatactaattacaaagcatctccaatgtgtgtcactacaggcttttttttcccagatcatc

SEQ ID NO: 5426 - DNA, 1173 bp, Homo sapiens
acctttttacaagtgttttatgtaaaacctgacataaagtatgaaacctgtgcttcttgggttgaagtgaggatgggaaatccagatgtcaactcctccaccactactaccagcttagcttgtctatctcctgtaacatcaccagaggacccgcaggagcctcacagtgaatggtgttcagccacggccttatggaccagatagtgttctcttaatttagaggttgcttcactctgatgctgttcttggaatgtgctgcagaggcactatgagatattaatagtttaacaaggcttttttaatttcttcctatggtaaagctcttaggcgggtcttagagctgctgtatgaactatactcatttctgcataggtctgatcagtactctatttggcctcccagattacaggcatgagcgactgtgccaggcccgcattttgtattttcttatagattatttgtgacattttaagaacccatacatgttactaacgttttgtttttgaaattttctcttcaagtatgctattgcggcagcacctcccgagatgtgttatgtggaaccgatgtaggaaagtctgatggatttggggatttcagctgtttaaagatatgtggcaagtaaggttttacgttttcttcagttgaactaaagctgcactttatgcaacaattatgtaatagtgtgttttcttaacagggacttgaaatgcggtaaccatacatgttcgcaagtgtgccaccctcagccctgccagcaatgcccacggctcccccagctggtgcgctgttgcccctgtggccaaactcctctcagccaattgctagaacttggaagtagtagtcggaaaacatgcatggaccctgtgccttcatgtggaaaagtgtgcggcaagcctctgccttgtggttccttaggtaactagtaagcgtaaagttggctttaaaaatattattgtaaatggttggcagcagtgagtgtttaagcaatgtagaagtaagtgctagttacaatatcagaggtttctaaatattatgatcatatttatgtaggtacgttttctttcctcctcaacatatacttgtgaaaacccatacatttgcccaaatgatctctctgattcaggtattttattgttaactctggacaactgtggtgagttactgttccat

SEQ ID NO: 5427 - DNA, 1102 bp, Homo sapiens
ttatctattcttattctggcagttatccctgtgcttcacacatgcaaacaacaaagcatgacattccgcccactaagtcaatacctgttctgattcttaagtcgccgacctattggcccttacatgaatcggaggacagccagttgacgaggtgattctggctataattgatccactgctttaaactcccttgatattaacagtgtatttcccctcctaaaaagtcaaagtttacttcaaaattgtacccagtgggttgaaagcatttggtgtagtacagggtatctgtcagatgctttcaggcaggtactgaagtttggagagctgagtcataagtaatattgattatttaaggccaattataaatctgtcttaaaaaaagacttaccgtaaaccatttctgtgtcaacctcccttcaggaaacaagtttcagccactaaggccgaagcagaaaaggatggagtgaaggtccccacaaccctggcggaatactgcatcaaaactaaagtgccttccaatgacaacagctcagatttgctttacgacgacttgtatgatgacgacattgatgatgaagatgaggaggaggaagatgccgactgttatgatgatgatgattctgggaatgaggagtcgtgacgtgctccttcagtgcccctgtactgccctgccatctcaggccaaagggaggggagcaagtggggacctggccatggcccctcagcaaaaacctattcacagcgggtggggaaacacacacagctcctgctgactccccttatggatctcagtttgctcctttttatggacctttaatggagagagagtaaccctccacagaatgtctgaattcttgcattctttacccttccatcactatattgattctttttttaaaaaatatgaacccaaactcccgcctcacttcgtctctacagaatgttcacagcaaaacacgtttggtctgtttttagattcttgaagaattcaatagtctttcaagatgtttaatgtgtttaaagctgggaacctgttgggagttcacaagtgctgcatatactgggtagcaaaagaaaatggaaaaaaacccacaaaacaaac

SEQ ID NO: 5428 - DNA, 1100 bp, Homo sapiens
ccttgtcttcacaaattcgcaacacaacaatcagatggcaccagggactggcagctccactgccgtcaactcctgttctcctcagagcctggtaactcacttttatttcagtgtgggattttaagaaatatacccattagcaaatgtattctagaatatgatacatgctttataattactttctaaatataaaaatatctacagtaaggccgggcatgatggctcatgcctgtaatcccagcactttgggagctggggcatgaggattacttgaacccaggagtttgaaaccagactgggcaaaactctgtctctacgaaaaaagcaaactaacaaaaattagctgagtgtggtgttgtgtgcctgtagtctcagttacttgggaggctgaggttggagggtcacttgtgcccaggagtttgaggttgcagtgagccatgatcatgcctctgtactccaggctgggtgacagagcgagaccctgtctctaaaacaaaacatcaaaaaattctacagtagatcttagtccagaaaacaatgatgtggtaatttccaagcacatatctgatgattccatgtggaatttaactacctgagtttcctggacaaagataaaaatttttttatggtttgtcaaattctttgaactgatgatcactcttgagattgaaagtacccctttcttctgaatgatgttttccttgtgttttgtttcatattatgtctctatagttagtatattcaatttcttgttttccaattaaatgcgaaagtttatcagaattgacttgctataaaatcatgtaaaaacagtctgagtctgcctaggcgcttacattttttgcttttttttccccctaagaccgtaaaataagctacattttcttaaaatgccaaatgattaacagaggcccttatagtttggatgtgtttttattgaaacagtgtcatttagtactgtatgactgacttccaatgtgtgttaagctcccatccagaaggaacttcagaaactgttagtgaaggctgtgaagataggcttatggaagtataagcttagatcatagcttatacaagaatgttgctttagaatggtgaac

SEQ ID NO: 5429 - DNA, 1100 bp, Homo sapiens; identical to SEQ ID NO: 5428

SEQ ID NO: 5430 - DNA, 1174 bp, Homo sapiens
gccctggtttgagtgtttcactgtgttgtttaccattagtctcatcattttcctgatttgaagtcattcttgtaggcctttcaatctaaaattaccttcacttgcagccgggcgccatggcttatacttgtaatcccaacactttgggaggtcaaggtgggtgcatcacttgaggccaggaattggagattatcctgggcaacatggcaaaaccctgtttctactaaaaatacaaaaattagctcggtgtggtggcgcatgctggtgcgtgcctggaggcccagctactcaggaggctgaggcgagatgatcgcttgaacccaggaggcacagattgcagtgagccgagatcacgtcactgcactccttcctgggcaacagcgccagaccctgtctcaaaaaaaaaaaaaaaaaaattgcattcacttgaaaattacttgtcatggtcacttgtatatttcattttctttagaatagctgttatgcgaagtgtaagagactactgatgactacaaatgatcaggaagtcagtgttttgggtttagtagtatgtagaataagattaaatttttcaactttccatacagctttctgaaacaaaggtcttcactgcctcatctgctccagcagagaatcacatcttacctgggcaaaggtaaatactttttgccatcttatatttgttattcaaagcattacagaaatcttttgcctcaggaaaagtattttcatttttgggtctctttctattttttccctttttatccaaggctaacttttattttaccactacttggtaaatctgacagagcttcaatcattttctaattgatgtatccactgatgaatttgttagcagttgttgcagacatcatgttaaactttttttttttttttttctattttgagacgtagttttgctcttgttgcccaggctagagtgcagtggcgctatctcggctcactgcaacctccgcctctcgggttcaagtgattctcctgcctcaagcctcccaggtagctgggattacaggcatgcgcccccacgcccagctaattttgtatttttagtagagacagtttttccatgttggtcaggctggtctcgaattcccaacctcaggtgatccgcccacctcagcctccgaaagtgctgggattacagatgtgagcc

SEQ ID NO: 5431 - DNA, 1200 bp, Homo sapiens
tactgactccagaacttaaagcagcagacttgatatgagcaagagtaatgttgaactttgctggagacctattaggaagccatgtagtagagctaatattttattaaaaggatgcttctctaaatttgataattcagtaatccacctgaaatagggtccaagacagatttgccttaaaatgaaatttgttgttttgaagactatatcggaagaaatcaaaccattgttaaatgtctatatttgtgctacatccatacttttcttactcatggcagaattgcttggatgtgacctatattgaagcaaaatccatttgaaacactgatttgaggttatgtagatagtgactactagtcaagttgcatttgtaaacattatttcaaagagaaggggagaaaagaaatattactgattttaccgagaatagattaagaacgtcatgtttcttgggttgtaaactaaattgctagtgaggcgtatgtatcttttttccccgcatagtacacaaaaaggaatcatttggactgagactgtatttgactttgtggtataaactttgattgctgttgtttcccaacaggggcttggaagaattctgtggaagagtggacaacagaagactggactgaagatgtaagtgtttgctgtcagatgagacctttctttttttttttttttgaaatggaatttcacttttgttgcccaggctggaatgcaatggcgtgatcttggctcattgcaacctctgcctcccagattcaagcagttcttctgcctcagcctcccaaatagctgggattacagatgtgcgccaccatgcctggctaattttgtattttttttttagtagagacgatgtttcaccattttggtcagggtggtctcaaactcctgacctcaggtgatacacccgcctcaacctcccaaagtgctgggattataggcgtgagacactgcgcctggccgatacctgtctttctttcggtgtttggtggggactttggtgcttggaagaaagagcctgagacatcttatctcatcttggcttcttttctggcatgtatcgtagccagggtttttgagggttggcttttttagcagatgcttcttaaaaggaacttagattttcagatttttaagaatatttgtttttgtgcttaaaaatgaccaattgtcaagatgattgggagattggaaaaa

SEQ ID NO: 5432 - DNA, 1082 bp, Homo sapiens
ttgttgataagagagttatgagtccaggactcagccttataggctcagaaacccaactgttgacagtataataaccacaaatctattcctgatatgagggaccctcaaattaaccaaactagaaagacttgtgtatactcagaaggctaatttataaattttctaaaaactggtacctgttgaacagattagaatactctctttgatgagtgagaagggagcttggtaaacatgggcgtgagaatgagaataattgaagtgatttgagtgtccaagagccatcaaggataagattcataacttgatttgcagtgacctgtaagagtatggatttcaattacatttcactatccttgggcagtaacgcagcatatacatagctttgacagtgaccatcttctctgtgatgaatactttcattcttttcatatgtttaaaccctcaattttacattggtccacagaactggcatcaaatactcacaacatagctcaggatctgtcaaacaaaagttcttatggactcaaaggtatgaatacttaattttttaatttttaaaattaagaatcttataaattgcttgcaatatctttcattttttatcaaagctagctaataaaaatttatcagataaatgtttgtaaactatacctatttatttggtaatcagatttgcagtttgctaatggaaatgttttattgattgactttcaaggtgccacagaattttcatcattattttccatgttcctaagtggccttaacatacattcgttagaggactaacaccaagttaaattgaacataaaacattcatctccaatatattgttttaagctgaaaataaggattgttgaagtttttccgttatattttgtggtgtaggtctaatgaccaaattaaaattttaatattccaaaatatgattaggacctgagcctttgccttctgtatttaatgtctggaattttttatagtctgtgtgggtatggctagttcctgcaacaacgtggcacttgcttctcacatgggagtttcccctgtaatttcctgacttaccactctatcatgttgcatctctg

SEQ ID NO: 5433 - DNA, 1187 bp, Homo sapiens
tgagctagagtctcactctgttgcccaggctgcagtgcagtggcttgatctcggctaacggcaactgtgcctcctgggttcaagtgattctcctgcctcagcctccagagtagctgggactacacttgtacatcaccacacccggctaattttagtagttttagtagagaggggtttcaccatgttggccaggttagtcagttttgaattcctgacctcaggtgatctgcccacctcagcttcccaaactgcccggattataggtgtgagcccctgggcctgaccgtgaacctcaatttaaaaaaaaaaaaaatacattgtgagatttacggaaaagttgcaatgggaatatgaataattactgaatacccttttttcagattccccagattttaacatttctgtcacatctactttatcctgttctcttcctttccctacagtttattcccagaaacgtttgacaagtagttgtgaataaggttcttcttcacttaatacctcagtgttttttaaaaaacaaggatctttttacataattacagtacaattataaaaaatcagaacatctacagaccatacttatattttttcaatggtcctcataatgcctttttttttttttgagacagttttactttgatgcccaggctgtagtgcagtggtgcgatctcagctcactgcaacctccgcctcctgggttcaagtgattctcctgcctcagcctcccgagtagctgggattataggcatgcgccaccatgcctggcaaatttttatattttcagtagaaacgaggtttcgccatgttggccaggctgctctcgaactcctgaccttaggtgatccgcctgccttgacctcccaaagtgctgggattacaagcatgagccactgggcccagctgtaatgtcctttttagctaattagattgtggaatatacattgtattcagatgtcaactctcttgtgaatttatgtgaaaattccacaaaattatgtgaacattccacaattatgaagtgattataagaatatttgaaaattatgatataaaatgtcttagaaaaggtatacttcctgatcaactgaaaaaaatatgtaaagttaatgcaaaactgttgaacattaatgagtacaggcttagtagactgttaatgtttatctttggtggtgggcataaataat

SEQ ID NO: 5434 - DNA, 1171 bp, Homo sapiens
gcctcggcctcgtgaattgctgggattacaggcgtgagccaccgcacccggccacacaattgtttctttaagatttattatttacagctgacttttgcttttaggcatagcctgtttcttgacacattttaaattgggctattggcaggtaaaatcttggctgggtgcaatgttgttttggggttcaaatagcaactgcaagtagtaagaggcagatagcacttcatgtacagtgactacatgtagtgataaaatggttgctggttaaaattggtggtacttgagatttttgtttagaattgctaagctcgtaaaccatagacttagattgcagtagtcgaattggtttaacagataccagcaaaatgtaaaatcctcaagggctacttcttgagaatttgtattccagagagcttttatcttttattgtaagtgtccttgttttctctgaagtacatgcttatcttttactatgattgttttgcttaccatccctactttcttgcagattttctattttgtacatacattattttgtatatactgtatatgatgacttcagtgagcagtgaccattgtcgaggtgctcgggaaaaaccacagatttcagcagcacaatcaacgcaaccacagaaacaagtggtacaggtaagtttttgtggaactctttttttttttttccttttttttcttttattattatacttgaagttttagggtatgtggaactcttgtttgccttgtttagaattaaggaaattaagggagagcatatgatttaatgttttcctttgtaggaaactttaggattttggaccctttgtttaaacagtaggtgatggccgggtgcggtggctcacgcctgtaatcccagcactttgggaggccgaggtgggtggatcacttgaggtcaggagtttgagactagcctggccaacattgtgaaaccctgcctctattaagaaaatacaaaaattagctgggcgtggtggtgtgcgcctgtaatcctagcttctcgggaggctaaggcaggagaatcgcttgaactcaggaggcagaggttgcagtgagcccagatcacgccactgccctccagcctgggtgacaaagcgagactccttcctaaaaaaaaaaataaaataaataaaaaataaaaagtaggtaatgaaga

SEQ ID NO: 5435 - DNA, 1221 bp, Homo sapiens
acggaaagcggactaagctggcttgaaggactaataccattggatgccgcccgccatgtggcggagcgtggtgcctgctgggaggtgtagtcctggcggggggtggggttccgctcccacgttcctgggctcgctctgcgccctgccccctgcgcgggaaaacgccaacggctagcagcgagagcctcggcaaggcggaaggtgcgcccacttttagtctttttcagtgcggttttacttttgccctcccaagccccttctgggtgaaaagactagaatctactgaacgcctactccaagtcagccgtttatttctgttatatcatataatcaactccttgagtccaggattttccctatttaaggatttaaaaaaagaaccttagagttgtttgttgaccgaagagacccaggttttctgtctttagaaaattaatgacctcctctcaataggatctgacctgttgtcaactccaagaattacgaataaataagatgatggtttataattgtagcatggtgttttaaagtattttccatttactggcctgtttggatgtgagggcgttctggctatcttgtcaccccatagatcgccagggctgattcggctgatctggctgtctaggcgggtggccccttcctcccgcacctctccatgtgcgtccctcccgaagctgcatattcggtcgaaaaggaggagcatcccccatagaagaggacaagtcaaggatataggagtagctgcacgcccgtgttaacaagctctcaaggtcctctaaacaagctctcaaggtctacttactggcctgttttatcccaagctagttacatacaaggactttgcagtcccggcatgccttatctcaattggagctttcctctgtaataacacttcaccggcttgtgaaaattaaatgagattatgtaaaatgcctgcttgacacataataaaccctcagtaagtatcagtaatcattttcacactctacccatcgggcccaaaaggtctaagtaaggtagaaaggggaaattagcttatactgaactttgtacagggcactatgctaattactaatttgctagttattaagtaaaacaattgacatcttaaacagccctatctagttcaaataaagcctttgttattcatctgaattaaagaatgctgccgggcgtggtggctcacacctgtaatctcagcactttgggagccggagg

SEQ ID NO: 5436 - DNA, 1220 bp, Homo sapiens
tggaggaattacttttcagacattgacttcttccccaatgctgtttacacccactgctacgactcgtctggaacgaaactctttgtggcaggaggtcccctcccttcagggctccatggaaactatgctgggctctggagttaatgacaactccccaaatgcagagatttacactaacttccattctcagtttccttgtttcttttgattttttttttcctaattgtgtgaggctcttgtgttttagtgggaacaccaaagtttgcctatagtttaggcacttaataggaagaagctctgtacagaaatctgaaagttgttttgctttttgttttcccctttggtaatcaaaattttactatcttttattatttctggcttttcaaccaaacattgttgctaatccctatttttctttaagtgacacacattctcctgtctctggcttcttcaggctgaaatgacatagctcacccttacttcactcttgagaggtagggctcctttataattacatggttgctctcagactttctgtgaaagtttgggagctgtgtgtgtctgtgtgtgtgtgagagagagatcttgtctgcgtgtgtgtgtgtgatcttgtgtgcctgtaggtactgtgtgtcactgaaattacctggagtgaggattacttgtaattaaaatatttataaaagaaacaactttattcacagagtccagctttgggactagtctgtatcttgttttttaagtctaacaacactgataataggaagtaaaaacagaaaggaaaagaaattaccactgggaaaatctttttagttagattgtaggcttcctggggcctcccatgccaggactgcaaagtgatccagccctacctgtcttcccacctgtgtgtcccccgtgtgggaagttggtgtcacttccccttcccaccctcacatctgcttagccagtagccacacccctaaaacatcagactcaccatccaggtgcagctccagaggctacaaaaggcttcatgggacttgaatccccatcctagcttctctctccttcccctcaagacctgatctggttttaaggggcctggagctgggagtctcaagtctgctaagattcacatccatagcccccatggctttgaggagaatcctctctgccattcttccaatctccccagtgggttttgctattattttctaaattgggttaagtctaagaag

SEQ ID NO: 5437 - DNA, 1162 bp, Homo sapiens
aagtcacagaaaaattagctgggattggtggttcatgcctgtagtcccaggtacacgagaggctgaggtaggaggatcacctgagctcaggaagtcgaggctgcagtgagctgagatcatgcccctgcactccagcctgggcaacagagcaagatcctacctcaaaagaaataatctcgggcgggtgctgtgggtcatgcctgtaatcctggcacttggggaggcccaggcaggtggatcacctgaggtcaggatttcaagaccagtctggccaacacggtgaaaccccgtctctactaaaaagacaaaaattagctgggcgtggtggcaggtgcctgtaatcccagctactcaggaggctgaggcaggagaattgcttgaacctgggaggcggtggtggcagtaagcctagatcatgccactgcactccagcctggctgacagaacgcatctctgtctcaaaaaaagaaaaacaaacaaacaaacacattcagttctcacacttgaattaggtaggtaggttgtgttatgcgtgctttttatgtattgaggaaacaggatcacagaggttgtgtaacttaactaaggttacaactaggtagactgaatttgaactgaaatctgtccaacctcaatgcctatgctgcattcttttatgccattttgcccctcttaggtggtcacaggaccattccaattcctataaggtataagcactagttttaaagtaataccattgtgaactgcttgttctcattgaaataatagtgtaactggaatgataaatagttcattaaaattttagtcacattatgtcatcagaattctaggaggaaatgaatacctgattattttgtacttcacaaaataaactggataaactggataaatgactgaaagtttcttttttatattgctgagtcagattggatccggttcattaagggccaaaatttgtatttggcagtaatcctcatgtgttctcagaatgcttgattggtcattatcagttgcttaatgcttaccaaacacttccagtgttttgagtcactgaattggctcatggtaattgttaatcttgtggttactgagtcaagagccagcagtgtgtgttttggctgcttcacttcctcctcaacacttgatattgtcagattttaaa

SEQ ID NO: 5438 - DNA, 1202 bp, Homo sapiens
tttggcatttttagtagagatggggtttcaccatgttgcacaggctggtctcaatctcctggactcaagcaatcctctcaccttgacctcccgaagtgctgggattacaggcatgagccaccatgtccggccataatattctttttttttttttttttttttttgagacggagttttgctcttgtcgcccacgctggagtgcaatggctcgatctgggttcactgcaacctctgcttcccaggttcatgtgattctcctgcctcaacctcctgagtggctgggattacaggctcctgccaccatgcccacctaatttttgtatttttagtagagacggggtttcaccatgttgtccaagctagtctcgaattcctgacctcaagtgatccaccagccttggcctcccaaagtgctgggattagaggcatgatgcactgcgtcccgctcagttttttaaagcatacaattcattgtttctcagtcttttggctaagatcaaatgtagtatcttttttttttttaagaccagtggttcagaatagaaagtgtagtatcttttctcagcagtttaacatgttctattcaaggacaacctattaaatggatttttggaacagggagatggagtaggagcttgctctgtccgctccatgcattgacttggtagtgcaagacctccaggaatggtgcatcctccctgagggattttttttttaagtatacaattcagtgattttttaaaagtatattcatgaagttatgcaaccattgtcactatctaattgcagaaaactttcatcaccccaaaatgaaactccattagcagttactccctatttctcctgcccccagtgcctggcaaccactaatttctatctctgtggatttgccaattctgtccgtatcatataaacagaattatacaatatgcaaccttttgtctggcttctttcacttagtttattttcagagttcattcatgttgcagcatgtatcaggacttcattcctttttgtggctgaataatattacattgtatggatacctcattttatttatccattcatcagttgatagacatttgggttgtttccacttttggtcattatgaataatgttgctgtgaacattcatgtacaaaggtttttgtgtggacaagtgtgttccattttcttgggtgtatgcctaggagtgaaatcgc

SEQ ID NO: 5439 - DNA, 1369 bp, Homo sapiens
agacagggacatacaccatgcagatcctgagttcctgctgtatgagcagggatatccatgcttatgtatccaaacacagagacccatgggaacaaatgagacacatatagatactgagacctgtgtgtacagtaggaccatgcactcacacccatctggagagggagcccccggtataccaagggagccagttgtgttcagacacacacatcacagcttgactcactaactgaggcctttccatagctccacagcttcccacctcctccccaccaaaccggggttctagagttaaggatgggggagggtattatactgcctcagtctgactcctcaacccagcagcaatttgaggggatgagggggaagaggagctgccttttggaggcccccttcacctgcagctatgatgcccttccccttctcccctgtcctcaccatatgccttatccccattctactcccctgctatgcaagtgcccctgtggcttgtccccaaccccctcagcaacaaagctcagctggggaacgagagtaatttgaagaatgcttgaagtcagcgtcttccattccagaaagacccccattcttcctttgggggtatgatgtggaagctggtttcagcccaggacccaccactgaggagaggatctagacaggtgggcctaattccaaggggcccttcctggcctggagaaggccttttacacacacacaacacatacacacacacacacacacacacatatcacagttttcacacagcccctgctgcattctctgtccatctgtctgtttctattaataaagatttgttgatctgttccatctttttgtgtgtctgagcagccggaaaaagcctctgacccctggggacctcaggaagatctctctcttgctgtgtgattcatggtagattttttttttttttttttaagagatggggtctcctctgttgcccaggctggagtgcagtggcacagtgacatgatcatagctccctgcagccttgaactcatggtcccaaacaattttcctgccttagccttatgagtagctgggaccttatgagtagcaaatgccaccatgcctggttagctttttaaattttttttagaaatggggtcttgctatgttgccccggctgatctccagctcctggcctcaagtgatccttcctcagtctccagagtagctgagataacagaaacaagccaccatgcctgacaagacagtggcttttgactagtagggactatatacttgagtgtgccttagaatcacctaagacactctttgagtcagtaactcagactactgagctccattgccagagatcaacatgttcaataagatttcttccaacaca

SEQ ID NO: 5440 - DNA, 1164 bp, Homo sapiens
gctgaccatcatccccatgttaccaccttttcctatgcatctcacaggccccattcttgggaatctcccctgcccactctcagccctacctctcagtctgcatagagatggctattctgctggctccgattctcatgactctcccctccattcaggggcctagtcttgcattcctgttctcttgggttttcttaccagtgacacctcagccttctgaggacttatttcttggtaggagctgctgcttttctgggcatgttccatgtgttgactccctacatactccaggactagcttaggtcccaacccaatagttcccagccttctgaggacccatgactcctctttccagggtttgaacatcctcatccctgtgttagaccggatccgatatgtgcagagtctcaaggaaattgtcatcaacgtgcctgagcagtcggctgtgactctcggtgaggggttcagggtgacatgggtgctctgaggctattaggatgtggttgctgtagatccagagcttagtagaaagaactggttgggacctagaggcctgactttccccgttttctctcctggttctacagacaatgtaactctgcaaatcgatggagtcctttacctgcgcatcatggacccttacaaggtacctgtcccctactttatccagccttttgagttgccctcttcactaaaatcttgtgcccaagcttcttacactatccgtgtccatctcaggcaagctacggtgtggaggaccctgagtatgccgtcacccagctagctcaaacaaccatgagatcagagctcggcaaactctctctggacaaagtcttccgggtaagcagatctgagccagagttagggtttgaagacacaaacctgacactcttaatcttttctgaaggtcaagatcagtcccaggcccttctcagtgtaggcccttgataggtaggttgaggctgtggggcttacacctctttttccaggaacgggagtccctgaatgccagcattgtggatgccatcaaccaagctgctgactgctggggtatccgctgcctccgttatgagatcaaggatatccatgtgccaccccgggtgaaagagtctatgcagatgcaggtgggggccaaggaggggtgggaaaagggcctcagggtgctcc

SEQ ID NO: 5441 - DNA, 1359 bp, Homo sapiens
atctgaggtaggcattcgggtaaggccctgcgagggaggaataggcactggggtaagccctgcaaggaagtagtaggggtgtggcagggtagaagagggtaagaaaagcagcctagccaggcttacctcctgtgaatacagctggaccttgaagctgcagacagtctgaaggagctgcaggtgaaactgaatacggttctggatgagctcagcatggtgtttggaaacaggtcagtgaccccacaatacaaggccctcagagccagatgtggtccctagccaatcccagagcccttgccccacacctctccatatagctgcaggtgtgtggatcttccctgtactcctgctgactgtccctgctggaaatgcaccatgagcatatgggaatgggaccaaatagctggtgccgctccagggacagtgtgtgtttggggagggaaaggctacactgcgggcacatgtgtagtttccaggtacggattgatgagtgtgttcgacaaatggccgacatcctgggccaggttcggggcacagggaatgcatctccagacgccagggcctcagcggctcaggatgcagatagcgtactccggcctctcatggacttcctggatggcaagtgagtacagcattcaggactatcctgtggggatgagcaaagcagatgctatcgggcaagggagccccttggggagaggggttctcaaactctcaccctggtctcacctgttgcctggacttgcagcctcaccctctttgccactgtgtgtgagaagacggttctgaagcgtgtactgaaggagctctggcgcgtggtgatgaacacaatggagaggatgattgttctgcccccactcactgaccagacggtaaggacacctccttccacttcctcctgctgtctcccttcccctcactccctgcttcctgatggagttggggtcctctgcttttgactgattccctctctgcccagggcacccagctgatcttcactgctgccaaggagctgagccatctttccaaactcaaggtactctgggtgtggggtcctcctggcaggtgtggtccttctgaagtcatggagagagggtggctgcggggaaggaaattggagctttggagactgaagaggaaaaggaggagatgaatatgcactgggggctggcaggtgggtgcaagactttcatgactgctgtgagctgtcctgatgctgctgatttctctgaacaggatcacatggtacgagaggaaacacggaatctcactccaaagcagtgtgcagtccttgacctcgccctggacaccatcaaggtggaggccccccctttttcagacagtcttaaccaccacact

SEQ ID NO: 5442 - DNA, 1077 bp, Homo sapiens
tcagatgaatccccaaggaaccctggatgctccggctcaggggaccagcactgccgctgcagtagcacatccagtcagtccgaggcagctgaccagtccatgggctatgtgagcgactcctcctgcaacagttcagatggtgtgctggtcaccttcagcaccctctacaacaagatgcatggcaccccccgtgccaatctcaactctgccccacagtcctgcagcgactcttccttctgcagccactcagaccctggcgccttctatctggatctgcagccctccccatttgagtctaagatgtcttatgagtcccatcaccctgaaagtggaggaagggaagggggctatggttgccctcatgcctcttctcctgagcttgatgccaactgcaactcctaccgcccacactgtgagccgtgcccagcagtggctgacctcacagcctgcttccaaagccaggcccgtcttgttgtggccacacaaaattactataaacttgtcacctgtgacctatcttcccaatcatccccaagccctgctggctcttccatcactagctgctctgaggaacacaccaagataagtcccccaccaggccctggcccagacccaggccccagccagccctctgagtattacctattccagaagccagaagtccagccagaggaacaagaagcagtgagttcctccacccaagcagcagctgctgtgggccccactgtgcttgagggacaagtatacacgaatacttcaccccccaacctcagcactggacgtcagcgctcccgcagctatgatcgcagcctgcagcgcagccctcctgtccgcctgggctcgctggaacgtatgttgagttgcccagtgcgcttgagtgagggccctgcagccatggccgggcctggctccccacccaggagggtcacctcctttgccgagctggccaagggccggaagaaaactggaggctctggctcgcccccacttcgtgtgagtgttggggactcctcccaggagttctcacccatccaagaagcccagcaagatcggggggccccactggatgagggcact

SEQ ID NO: 5443 - DNA, 1386 bp, Homo sapiens
ggctgcgttccctgcggagggaggatacaggcgagtcagccgagctggggcctgggacccgtgcgcagtcccagccctcctccagcagccctagctggtacctgggtgtgcccggaggtcgggattggcgcggtctcctaggaccccggacagcgcagacacaagcagcagccccaccacacccaagagcgaaactgcgcccgccattgccggcccacgggtggagggatcgggcgggcggtgccgaagcggtccggcattggccggccgccccaacgcgcacgcgcacgcgagcaggccggccggctccggggaggccacgcccactccccgtagggcggggccagaccatatttgcataagatagtgtcattctagctttcctgtatttgttcatttcgtgtctattagctattctgctagccacaatgcctctgaaagcctatagtcttagaaagttatgcccgaaaacggtttttttaatctcacgccaccaactttctcaccctaatcataaaacacaatttctttagggctataaaatactactctgtgaagctgaggacgtggttcgtgctgaaggcctgtatcctaggctacacactgaggactctgttcctcccctttccgcctaggggaaagtccccggacctcgggcagagagtgccacgtgcatacgcacgtagacattccccgcttcccactccaaagtccgccaagaagcgtatcccgctgagcggcgtggcgcgggggcgtcatccgtcagctccctctagttacgcaggcagtgcgtgtccgcgcaccaaccacacggggctcattctcagcgcggctgttttttgttcccgagaccacggctcactgcagcctcgacctccccgggctcacgcgatgcctcacctcaggctcccaagtagttgggaccgcaggcgcacgccatcatgcctggctaatttttgtattttttgtagagacggattttcacctgttgcccaggctggtctcgaacgcctggtgtcaagcgatcagtccacctcgccctcccaaagtgctgggattacaggcgtgacaccgcgcccggtcaacgcggctgcttttcatgcgcgggcagctttacgctgttcttggccttgctatgaagtccttgtgctcattactccaaatatggagcattcctgaaacagcctcctcttctacctccctctccctttggcaaacgccatagtagccaccattcactgtgtagctggtacacaacatatggactctgcttgggctagaatcctgcctcctgtactcaagagcggtgaccttgtgaaacttagttctctctccgtgccttcctttccactctgaggaatgaagataagcacttacttcaagagc

SEQ ID NO: 5444 - DNA, 2201 bp, Homo sapiens
cagttattctctgaagccttctaccaaatcccctctgcctgagcccaagctctttctattcagactgaccacctagcctctccccaaatcctgtaagtcccaggaaggagacctggacttcacttcctataccccctatgactgcatcccaagtcctgagagcctctctgtcacttctaggcgctagatggggccttcacagaggagaaccgtgcccagtgccgagcagcaacagcccctctgctggaggctgtggacaatctgagtgcctttgcgtccaaccctgagttctccagcattcctgcccagatcagccctgaggtgaggcgatgtgaagggggaactgatgggccagcttatcacctcatcttccagggactcctgagacttaccttcctgcctcccctctccccagggtcgggctgccatggagcccattgtgatctctgccaagacaatgttagagagtgccgggggactcatccagacagcccgggccctcgcagtcaatccccgggaccccccgagctggtcggtgctggccggccactcccgtactgtctcagactccatcaagaagctaattacaagcatgaggtattgagggatggggaaccagtgtggctggggggcatacattgtggcagaatggaggatgggcacttgagtgcaatgagatgggatggtgttgggaggatacaggggaaggataggctggccttgcagtaggggatgttcttggtgttggagcccatgatgtgtctgcagggacaaggctccagggcagctggagtgtgaaacggccattgcagctctgaacagttgtctacgggacctagaccaggcttccctcgctgcagtcagccagcagcttgctccccgtgagggaatctctcaagaggtgagagggagagggttatatggaaagatgtgtctaggaagagaaatatcagactcaaagaagctgggggatcaaggagtggcttcttagggacatcaaaggctgggatgtgcgaaggagggttagggtatttggtatggacagaagagcagttctttgtagccagagggtcctattgcaggtcaccatcagggctaatgtccacttcctccccaggccttgcacactcagatgctcactgcagtccaagagatctcccatctcattgagccgctggccaatgctgcccgggctgaagcctcccagctgggacacaaggtacctatggagactcatgggaagtcccagggagtagggtgagagagaggggacctgacccctagtccaaccccttgcctcaggtgtcccagatggcgcagtactttgagccgctcaccctggctgcagtgggtgctgcctccaagaccctgagccacccgcagcagatggcactcctggaccagactaaaacattggcagagtctgccctgcagttgctatacactgccaaggaggctggtggtaacccaaaggtattgagggttgggagggaggagctgttactagcaggaggctggagaaacaggaacaacagagctcctctcctctccccacagcaagcagctcacacccaggaagccctggaggaggctgtgcagatgatgaccgaggccgtagaggacctgacaacaaccctcaacgaggcagccagtgctgctggggtcgtgggtggcatggtggactccatcacccaggccatcaaccaggttagagtcttggggtgcctttggacactgaggctaccctgggccagagcctccaagcacagtggcagagaccctaacagtctttccctttccctatcctcccccctcagctagatgaaggaccaatgggtgaaccagaaggttccttcgtggattaccaaacaactatggtgcggacagccaaggccattgcagtgaccgttcaggagatggtgagtttgggcgagtcccagaggactgccctcggagagctgactttggatataacttcactcgttccattatcaccaggttaccaagtcaaacaccagcccagaggagctgggccctcttgctaaccagctgaccagtgactatggccgtctggcctcggaggccaagcctgcagcggtggctgctgaaaatgaagaggtaaacgtggaggcaactctgccctgccccctgccccttgttcctgatgtgtcagtgtctagggctgtcccacccccaccctc

SEQ ID NO: 5445 - DNA, 1175 bp, Homo sapiens
gcaccaccacgcctggctaatttttgtatttttagtagagatggggtttcgccatgttgcccaggctggtcttgaactcctgacctcaggtgatccacctgcctcagcctcccaacgtgctaggattataggtgggagccatcgcacccagcccaaaacatttatttaaattgccacctgtccccaagtaccttctcaggttccttctcctcaccttctcctttctcaagcccaattcttcccccttcatccttagatggagaagtgtacccaggacctgggcaacagcaccaaagccgtgagctcagccatcgcccagctactgggagaggttgcccagggcaatgagaattatgcaggtatgtgggcagagagccaggcatggggcatattgtgagggaggtaggaaaatgggagctggatgagggatgggactgacagacgaaaccactggaatcagggcctggcaatgaaagcaccttcccttccctctttctcctcatctcccaaggtattgcagctcgggatgtggcaggtgggctgcggtcactggcccaggccgctaggggagtcgctgcactgacgtcagatcctgcagtgcaggccattgtacttgatacggccagtgatgtgctggacaaggccagcagcctcattgaggaggcgaaaaaggcagctggccatccaggggaccctgagagccagcagcggcttgcccaggtcagatactgggaaagggccactccctctcccccaggttccttcataaggcccaccctgattgaggccaaagcttctgagcctcgtccacactcacagagtgatgtcttcttgggtctgctcttgacagcccctctgtggattccacccttatgttctcttagtcttttttttttttttttttttgagacagagttttgctcttactgcccaggctggagtgcaatggcgcaatttcggctcagtgcagtctccgcctcctgggttcaagtgattctcctgcctcagactccctagtagctgggactacaggcatgcgccaccacacccagctaatttttgaattttgttttagtagagacagggcttcaccatgttggccaggatggtctcgatctcttgacctcgtgatctgcccccctcggcctcccatagtgctgggattacaggcgtga

SEQ ID NO: 5446 - DNA, 1166 bp, Homo sapiens
ccaagtcccctcctctcccacagatgatgaaccatggctccgcgtcaatgcatatttaatccatgatactgctgattggaaggacctgaacctgaagtttgtgctgcaggtttatcgggactattacctcacgggtgatcaaaacttcctgaaggacatgtggcctgtgtgtctagtaagggatgcacatgcagtggccagtgtgccaggggtatggttggtgtctgggaagagcctagctggttgttgcctttcctcggtacctaggtcttcaacatcttggtccctctctaggctgtgatggaatctgaaatgaagtttgacaaggaccatgatggactcattgaaaatggaggctatgcagaccagacctatgatggatgggtgaccacaggccccaggttagcgggtaggggtttccaggaggcctgaggtgagaaactgggcaacaagggattgtagggctcaagaaagaatgactcattgtctattacacggcatgggagcagctggagctgccagtctgacccccaaacccatgtccctgatcagtgcttactgtggagggctgtggctggcagctgtggctgtgatggtccagatggctgctctgtgtggggcacaggacatccaggataagttttcttctatcctcagccggggccaagaagcctatgagagactgctgtggaatggtgagttcggggagcctaagtagtcttaaggcagctgagaggacaccaggagccttatttttctcttcctcgactccaggccgctattacaactatgacagcagctctcggcctcagtctcgtagtgttatgtctgaccagtgtgctggacagtggttcctgaaggcctgtggcctaggagaaggagacactgaggtgagagaggaggaggagcagccagagagaaaaatgggttttccctggaggtgggaagtaagtatatgagaccatgttcctgcccttgcccctccaggtgtttcctacccaacatgtggtccgtgctctccaaactatctttgagctgaacgtccaggcctttgcaggaggggccatgggggctgtgaatgggatgcagccccatggtgtccctgataaatccagtgtgcagtctgatgaagtctgggtgggtgtggtctacgggctggcagctac

SEQ ID NO: 5447 - DNA, 1192 bp, Homo sapiens
taggcgggtgggagggaggcgactgaagactcagtactgcccagggggaggacatcgctctgggccctagaccccagcccctgtgcgacgggttcttctccctgggcacccccgcggagttcccaaactggcctccgctccccctttcctcaaagttccacgtcccagcccaagatcaccgccgctagtcacctcgcatagtcgacactagggatcggcacccctaggcctcatctgcccgcccctcagggacctggctaggtacgcggcggcggcggcggcggcggcgtccgctgggcggtagaggcgggacttcccttcggtcccccaccctccgcggagtcccttccggccggaagcgcccggcaggccagaccggaaagggctcgggtcatcccggcgcccagggtcaccttcccacgggctggcacctgggcgcgggcgctgccccggagccggccggcgggacctggcgcccaatcctgggggacccggtgccgtggcccaggggccgggccgaggtcccgggggcggtgccttgcgggcccgtcccggggcggtgcctggtgggctggccccgcggctcctcccctctctgcgggcccagtcgccctttggccgggcgagctaatcgtcggctcaatgacgacgaggcccgacccttcccgtccaggacctacagagacaaccgaaggagagcccaaggcggcttctttgctgtcgccgcccccactgaagcaagagctccccggctccactgaaacaccagctcatttaagctttccccaacgcccggccctccgggacgatacctaacaacgaccggcgcccgcatctggaataggctggcgagatacttagtatccgagggctcgggacttggcgccatcgaggtcatggggacccaggatccagggaacatgggaaccggcgtcccagcctcggagcagataagctgtgccaaagaggatccacaagtttattgccctgaagagactggcggcaccaaggatgtgcaggttacagactgtaagagtcccgaagacagccgacccccaaaagagacggactgctgcaatccggaggactctgggcagctgatggtttcctatgagggtaaagctatgggctaccaggtgcctccctttggctggcgcatctgtctggctcatgagtttacagagaagaggaa

SEQ ID NO: 5448 - DNA, 1199 bp, Homo sapiens
tttgttcttattaataaaagcagtgtgtagctggctaaggacttgttttattaatgctccacaggagcagagacagacagagagacatagtgagccttgaaccaaacacctgtattccaacattttacacagcggtctgggcaccctgtgcctaggagagccagctacgtgtctacctgagtctgacctgggccaggggctgttatcttgggaaagccagaatgtcattaagaaagggacaaataggcagttgcttgtgtagcaaggcagccaccaggttgctcaaagggggttctgcataaaccaacatattttgttgttgcttccagggcagcagaagaagcctttgtaaatgacattgacgagtcgtccccaggcactgagtgggaacgggtggcccggctgtgtgactttaaccccaagtctagcaagcaggccaaagatgtctcccgcatgcgctcagtcctcatctccctcaagcaggccccgctggtgcactgaagagccaccctgtggaaacactacatctgcaatatcttaatcctactcagtgaagctcttcacagtcattggattaattatgttgagttcttttggaccaaacctttttgtctttagagttgttcattgtttgtgattgcatgtttccttccttcaactgtgttctccctggcattcagagaggagggagaggaggaagaggaaggggagggaagcttcccaagagtagcctcaacctgtgcttctgtgcattattctgagaataaatttctgtttcaaactgtattatgtgaagcttctttattgacctcaagatgtgttgtagtttggagtgaggttggaaggaatttccaggaggaatttccttgaaatttctagggctgaggaggcacagccactgggcacacagccctgccttgaactaagatagcaccgggatctagagtgggatcctgtggacattttcatttgagaagggagtttagtggctgaaggttaaccccctcattatctacctaagacacagctgtgaatcctctcaccaacctagtcgttttctcccagatgggctcttgcttgccagtgtccctcagtttagggtcttggatagtatatttcggcaggagtctgtggggcacgtagactctagtaagaccttgactcctttggatccggccagtaagcctgagtcaggacgg

SEQ ID NO: 5449 - DNA, 1180 bp, Homo sapiens
tgggaggccgagatgggcggatcacctgaggtcaggagttcaagaccagcctggccaacatggtgaaaccccatctctactaaaatacaaaaattagccgggcgtggtggcatgtgcctgtagtcccagctactcgggaggctgaggcaggagaattgcttgaacccgggaggcggaggttgcagtgagccgagatcatgccactgcactccaccctgggtgacagagcgagactccgtctacacacacacacacacacacacacacatccttcctcctctaaccccaaactaagatcacagaaggtgatccagtcagagaacagagggaaatcttaccaggaagggcttaagtacacttttttttaaaacagctttattgtttttaaagcctacaatttgataagccttgacatatgtatacctgtgaaagcatcaccacaatcaagacactggacatatctatcactcccccatctcagatatcccccctaatcctggataccatttgttgaaagatgttattactctagctgaacttacaagagactttagaccagggatctaaattacagtggccttagtgaccttgtccttatcttcttaggacagctgagaagccactgggacttagagcctttaaaaggagattaactgtcccaaaaggatctttgctactgaccagcagacacttcttccttcagtagcctttcatactgtgttgagtaacaccctagggtgtccattaaagttttgagttttacctagagcccagagccatgaatcaggattctgtctacatgattcgtgttttcattggtgtcaaaatacaaaagccaaagttctggctatgaattgttaacttggaagaaatactaactgccaccacttattaagtgcctactgtgtgccaggctctgaactaggtgcttcatatacattatcctaaattatctcaacatatgaggtaggtgttttaatttttattttatagaacttggtgtgtttgactgttaagctatggggctagagagagggtttgatcccaggtccctctgtgcttttgctgctgagccacacaacctctcatttcaaaaacactttcaaaatgctaacatattctaattcactctaggccaccaaaaactttaatactaatatctgatttgtaaatgacttaa

SEQ ID NO: 5450 - DNA, 1090 bp, Homo sapiens
caggaggtagagacggccagattacttgagcccaagagtttgagaccagcctaggcaacatggtgagacctcatctctactgaaaaaggaggataatccaactctcttctacttcacattaatatccttttaatgagcatggtcagatactttggaaagttgtggagataacttcagaaactaaatctgaataaaaacctatgtgtaaacgatcatatagatggctgttagcaaagtggtacttttgtaaactttacagttgacatactatagtatatactacatatatacttatatactacatataatacatagaattatacataatatactatagtatgtcaactatagtatagtatatttgacacgtttaaaatgtacagtttcataggttttaagatacatatatacacaggaagccatcatcacaatcaagatagtgaacataacctaaatctccagaagtccctcatgttcctttgtgatcttgtctcctgccccttcataccgtccatccccagggaaccattgcattctgtcatgagagattagttttgcactttctaaaattttgcataagtggaatcatacagtagggacccttcaggagtggaggagggctggcttatttcagtcagcataattgagattcatccataaagtagcaagtatcaatactttttattatatattgattgtggttatcccacagtttatccattcacttattgatggacatttgaattccagtttttagaaattacaaagctgctaagaacattttagtacaactcttggtatggatagatgctttcttcttgagtaaatacctcggagtggaatggctgaattgtaatggatatgtgtgtttatctttcgaaggaaacaacagttccaggccaggtgcgatggctcatgcctgtcatctcaacactttgggaggctgaggtggttggaccacctgaggtcaggagttcaagaccagcctggccaacatggcaaaactctgtctctactaaaaaatacaggccgggtactgtggctcatgcctgtaatgccagcactttgggaggctggggcaggcaaatca

SEQ ID NO: 5451 - DNA, 1099 bp, Homo sapiens
gtgtatgatttgagttgaaactatttcaggcaggtatttgaggagattttctttatcaaaatgcttcaaatcacaaatcaacaaaattaatttttgttctcaaatatataggatactttattctaagtgagactatataagatatttaatctctaattagtagatttggtcatttcggatgatatgattgttttatttataaaacaaatatttggagattgttttccaatacatcaggttattccttgatatttagcagaagtttttgccatagtgcttaatgaaaacagctcaaactgttaaaatacatttttggtataagtatatttggtatgttctatgctttaattattaatttgtaattttattttaacaaattactttgtgtagtttttttttagaagcagatcagctcagtgtaagaaacttagaatattgttttgtagctttctttgttatttcgttgtccttcctttttatttgtagtttgcaagggtagatgagatttttttttcagtttcacttgtccagatgatatttaatgtagaatgaataaactcagaagagcagcctttacctaaggaagaaggtatgactacttcaaattgtttcatcacttagtttgacttcagagatttttgctctgtgatttgcactgacttcaaaactttttgcatgtatctcaaaagtgggtgagaacatttatagcagcattattcataataaccaaacttggaaataaacgctatatccatcagttgataaattgacatacaaaatgtggtatattcttaaaatggaatattattcagtcataaaaaggaatgaagtacagattcatgctttaacatacctgagctttgaaaacacgttagtgaaagaaatgagacaccaaaggccacaaaatatgtgattccatttacgtgaaatgtccaaatgggcaaatccatacagacaggaagtagattagtagctgacaggaaggagctgggagaatgtgggaatggaaaggtactgtaatggatgtgggatatatggaagatgttctggattatggttgcacaactttgtgaatgtactagaaaatacttgcacattt

SEQ ID NO: 5452 - DNA, 1196 bp, Homo sapiens
agccccacatgagctgtctcgtagggccaagacagcacttttgtatgggggtctgtttcagaggcacagatggctccaaacacgtcttctgcatctgtaaaagataacaggtgtacatttaaagaaaggaattcatacatatttaatgatttagcttaagcaactgggcaaatattcattttcttaaggtggtaatacataattaactgataataaaattaattgggtaaaacagtctaaaaataatgcagtacttattacatgagggaatataactgcattgaaagaggtttaattgttccagagactgatgagtccccaaaagcagcaaagggaagaggtttttccacctttggaataagggctctgagtgggcgcttcctgttcaccctgtgggaatagggtgggaatggagggtggagaggaagatggtttcttgcaatttaacagcttcacaacgggtttagagagcatcccaatgtctactcccaaccctaaccacacatcttcacccctgccaggtcaaaaaatacagaaaagaaagaatctaccacagatacccttttattagatcagaagagagaaagcttgtagacgcctcgtgaactcaccccttccactgcgaagtgccagaccctgggctggacaccgtgggagaggccagctgggcaagtctgtccttcggggaggtctggggtgtttggggaagggagatagggacacacaatcctcacaacaactgcaaaaagaagtgtgagcacgtgggggcagagggagcgtcagtcagacgggaggtgatcgggactggagagagatgtcccagaggaggtggcttgggcaggtgggctttgactggcgtctatgggagaggagcccgtaggaagaagagagagcaggacagctgggattgagttgggctgaagccggaccggggagggtgtggcaagagatgaggctgaaccggtgggctggaggagggggtcccaggaaaagcagctctggtcccaccgtcagccctgccttttattattaatctctcttgtgaattcaggtgggaaaaggcctgctgagagtagtgccagaattcacaggagaaagattctgtaatttctttgagctctgtgactctggacaaagtattcagtattaatgcagttgaccatgacgtcttctgtgtgcgcgactgacagaccaaa

SEQ ID NO: 5453 - DNA, 1177 bp, Homo sapiens
tggatgaaatcaagaagcggtaactgcagcttgggatctggagggggcctagagagaggggtggctatgagagaaagaagagctgttgatttgtttttactgcatatccctcggccattcagggagaatgtgaggtggctgatgatagaatctgtccacatgtgcacaggtcagttacaataaaccccagcagtcagaaacagtgggtaacttctgtgtaggtggcaccctttcacattcattatcttttttgatccccacaacaataccttgaagtagcaaaggcaggtgttattctttctgtttcagatgaggaaattcagaaaggttaagttacttgttcagtccctgaaccctgatcttccatcttcatatccttccaaagtgggagataatctaaataggaatgaggactgcccgtttttgagtgctcatttatagttctgagcttcctggcaggcagatcaaagagggagcaaagtaactccatggaaatgtcccagcagtagacattggtaaatatggttgaggctgatgttaccaccagatgtctgattcgtagtgggatccgagttggctacaccccagatgtcctgacagataccaccgccgaactcgcagtctccctgctacttaccacctgccgccggttgccggaggccatcgaggaagtgaagaagtaagtgaacgcagaccaggtgcggtggctcacggctgtaatcccagcactttgggaggccaaagtgagcggatcatgaggttaggagttcgagaccagtctggccaacatagtgaaaccccgtctctagtaaaaatacaaaaaaaattagctgggtgtggtggtgggtccctgtaatcccagctacttgggaggctgaggcaggagaatcatgtgaacccaggagacagaggttgcagtgagctgagatcacaccattgcactccagcccaggtgacggtgtgagactctgtctcaaaaaaaaaaagaaaaataagtgaacgcctggcaggaacgttggctctgctcagcactggatcctgatcactgtgccagtccagcccacgcatagtccctgaccccaggtgtgccccattgagtgaggactcagctaaaataaagcacaaagcagagctgcaataagggcagaaagggaagtggtgagagaagaggatgagg

SEQ ID NO: 5454 - DNA, 1122 bp, Homo sapiens
tttttttaatttgtgatcaacttcactgttcattcatgtggagtgcttctgaaatgtttaagaatagcttggattttttgttttgtttttgaaacagggtttgctgtgtcacccaggttgaagtgcaatggcacaatcatagcccactggagccttgatctcctgggttcaagcgatcttctggcttcagctgcccaagtagctgggactacaggtgtgcatcatcatgctcatctaattctttgtggaggtggggtctcactttgttccccaggctggtcttgaacccccaggctcaattgatcctccctcctcagcctcccaaagtgctgcgattacaggcatgagcttctgcgcccagccagcttggtattttcctcatttctctggagatacacattatgaaattttatgcatgccactaattctttgtgatagtctgtatgtaaatacatttaaaaatgtgtactggattttaaaggatttctaagcagaaataaactttagcctaggcagacaaatggacacaaatttcaaatctataattttgaaaatctagaaggtaatttacttggtcatcttcaggaatatatctggtggtcacatgttcacatgataagtcatgaataaccaaaactgctcagaagatttaccttctaatagcaactgtaagaacaacactgaaggggttttgaatagtagttaacagcaagtatttcatgagtacttgttttatatcagtaagtgaaaggtatctaattcttgcaacaatcctgtgaggtcgttttatcccatttcgtggagagactctatggcagagacttaaatcctctagctattgtcccattactcacaagtggcaagctgggaagtgtgtctgaattctaagaatgctattttcccgcttaaacctattttaagtgtgtctaaactgaaaacaactaaagtttggcccaattttgagcatttgatggagtacaagaaaagcaatatgaactcaacactagaaatgttttccaaacacaggagtcaaaatggaaaagaaaacataattctaggacactagccatctctacagtgaataatatttatggagttataatataaatgcagtttacagct

SEQ ID NO: 5455 - DNA, 1133 bp, Homo sapiens
gtagctgggactacaggtatgcgccaccacacctggctaatttttgtattttcagtagagaagggtttcaccatgttggccaggctggtcgtgaactcctgacctcaggtgatctgcccacttcggtctaccaaagtgttggcattacggcgtgagcacctggccacgcagctgcaatcttaggcccatcattccactgagttccgaagaatatagccttttcctgaagaaactcctttcttcaatgcttcaggccagttgtgagtctctaagtaagtggacaggatatcaaacactgttagagagtaaacagaaaacacagtgaccacagagggaaaaaaagaacgagtaaatgaaaaggatgttctgtaatatttcgttcaacaaacctattctgcaccatatgtggtactaaggtcttgcggggagaggcaaggacacaggctctgcttgctctcaaggacctcagcctaccctgaaagatacaggcctatgaatggatagggtgcaacagaaaggaacacagtaaaatgggaaacagaagggctctgctgtggcctgggatggggaagggccaagatgctcctgaactgaaccctgaagatcaaacaggaattcagtggtgagaggttaaaagctgggcattctagatgaaggggacaattttttttttttttttttttttttttttttttttttttgaggcggagttgcactcttgttgctcaggctggagtgcaatggcacgatctcagctcaccgcaacctgcacctcccagattcaagcaattctcttgcctcagcctccagattagctgggattacaggcgcctgccactatgccctgctaatttttgtatttttagtagagacggtgtttctccatgttggtcaggctggtctcgacctcccgacctcaggtgatctgcccacctcagcctcccaaagtgctgggattacaggtgtgagccaccgtgcccagcttttttttttgtttttgagacagagtatcactgtcacccaggctggagtgcagtggtgtgatctcggctcactgcaacctccacttcccaggttcaagtggttctcatgcctcagcctctggaataattggtattacaggcgtgcaccac

SEQ ID NO: 5456 - DNA, 1230 bp, Homo sapiens
ttaaggggagtctcaaggatggcagtcgattaagcagcgtcttgcagcggggagaaatgcaaagtgtagttggggttcggtctccgaaaactttgctgtgtgacctggggaagcccctgcccctctctgggtatctctgtttccgctcccaaaccagtgccttaggagcctagatctgagcaacgtggacactgggcttgcggagacccgagggagggagcgctgaagcggtgcgggctgccgggggtagaggggcggggaccgggaaagaccgggcggggcgagggaggagcggccttggccggcgacaggacgtaggcagcgccccaggcgcaggcggagcctcattggccgctgagccccgggctgcgcggaggcgggacctgcggccagccctgggcggccatgtggacagagctgggagggccggaaccagaacccaagcgtgatcctgaaccggagcccgagcctgctgcaggtaactaacgctggtctcccctcggctccctcgggaagccgcagctcctggctccgcgtgggggctttcctctctgggccgcggcgtccgcatctgggggctggcctttccgccgttgcactgtaggactctctccacgtcccctaatcccatcccccgcctctgggtgacgctacaggagccccgaggacacagacgcccccagaccttaccacgttagctcgacctcaacactcctgcccactcggcccacttcaacagagggcccctgaccatagcccagaggcttggacaagcccaaaggttgcgccctttcccccgcagaaggggtgaggtgggcgccgctgcagttcccgcggatagagaaggtccggtccttcccgctgtgggtgaactgtaaaaaattgcctgtattcaggaggatatgcaaagctaggtttgtggaagtctggggtgaggctcctatactttcttgctgtgtgtcctcggtgagtccctgaacctctctgatgcccagccttcttccagaatgggggtcatcatcaaccctgaccacccagggactgcagagaggcttggcaaatttcccgtgagaagacagcctgcaaactgtaaagcatgatgctctgtgagctgtgatcttcctatcagcaagtggaggccccagcaagaaccccatataggccccaagagtaggaacggccttggtgtggctgcaaaggtttgccagccttggcctatgaccacctctc

SEQ ID NO: 5457 - DNA, 1277 bp, Homo sapiens
ttacattttggagtccttgttggaagtgaactttccgcctgtaagcctgccattccatgtctaatatattgggatggcatcaccttctgtactatgcagcagaaggagactggcctgggattctggaaacatgagatccatttgcatattaatccccggctcgctgtgtgaccctgagcaagtctccttcactttctgtgcctcagtgtccttatttgagtaaaaagggaataaaactagatgagtggttttcaaactttaaaacactggaagctctctttgaaaacaaaagatgagaattgaaatggatggcactggaagctgttcttgtctactggggtttggagctgccaggggacctgctcacatccactcctcactcagcccctcccgcccctcccttctccacgcactgtgactgacttccatgtgtgaaggcctgcagttaattctcctgtgtcttgaatggttgggagatgagttggtcagacccttagtgaaatgatgtgggaaggaacaggaatgctgtggctctgaagaaggtagtagaacatcccacacctgctaataagcacattttgcaaactcagttgactcacctcagatttgcctagtgaaaactgaagggctggatgtagacccagagagcagggtggacagagcccatgctggaagtactgagcatcaggactgtatggggctggctttagcatcatcattctgtgcaaagacaaataattaatgtcacactgtctgaaattttcaccaaaaccaaaaaggcgcattaacatgattgttccaacctcatggtttttcaagtgtgagcgcccagagacctcttcagaggctaagagagcatgcgctgccacagctgttagcatttggagacgtaattacaatgcccccactccccgcaccaaacctgggtttttctaccgtttttgtagatgtcatgatgtcacgacccctgcaccctgaaaaaaataaatgtttttaaggacagtctttgtggtgtctttgttgtaggaatgctgtataggtgggtgcaggtcccactggtattcctttatcatccctcatgcctcctgtccttccttctgcatgcccacttcagctacttagtctagatcctccttacctcccacgcctggttgcgatcgcagccccaccgttcaccttgcccgaaatttttaaccagccctaatcatcttacactactgcccttgactatgtgtgtcctgccgtgtacgcattctagtacttaattcacttgctga

SEQ ID NO: 5458 - DNA, 1179 bp, Homo sapiens
agccatctgtggattttccaatggttgaaaagatcttattaagctggagtctgctgctttgaaacgtccaccttttggtcttaaaagtacttcttgggactccacagggcccttcactctccactggcaccatttcctgctggggagagattcgaagtgaaggatcatttcccccaccttccatgtaacacatagttgattgtaacggagcaggcttacgttctctaattctttctctccttttcttcctagggtcttagaaacattgatcatgggatgatggaaaagtcaaataacggatctttgtgcttcatgaagagttggaaaacctgtgtgtgtagatgaccccttttgtgtgtttttaaaaattagatgcaaactagatctgtatgcagatgtagtttttagcagggcaaacagtgagaaacggatttgcatgtggcttttttatacttttgaaatgaattgttccatgagaagtctttttgtaattattctcttccagggagatcacagaacggcatgtttgcaatttcgaaagggctcgtgtcagctgtgactctttacctcatttgtctatgacctattagtggtgctctgtgacttagtgtgtgttgtagaaggagggatgagggtcccagctgtcctctgcctgactgtaacttgctgtgtgacctgaacagatcccttcccctctctgggccctggtcccttcatctgtgagtatggcattttaactggatgttatcaatgtcccttttagccctgccatcctagattaagatggccttttgggaaaataacaggaagtgtggtcttagtgttctttctaaaatggtattccctcagaaacaaattccattgctttaccccaacgtgtggacagctggctgtagctcttctattcctaactttttccctttgaaggagatttagttttaggtgggatgctttaccagactcaggagcgccttggctgggtctttggagaccagagcatccatttgttagcctagcattctcttttttaaaattttattttgagacagggtctcgctctatcacccaggctggagtgcagtggcgtgatcatggctcactgcaacctccactttctgggctcgagtgatcgttccacctcagcctcctgagtagctgggaccacaggcatgccccacc

SEQ ID NO: 5459 - DNA, 1125 bp, Homo sapiens
gttttgcagaatgaaacctttgtttccagaagcactgctgactgtaagtggttgccgtttgtggcagtgagcattttgtccattctgaggttggattggtttctccttttggccttgccctgccctacagaccataaaggagaacagcaagaagcccccagcaaacatccacatatggccctggacatcagccacattctgaggaacatgtcatgttctgggagggctaaggcatcaagtaaggcctgtggggctggaggatccaaggcaaggtggggcaatccagagccatgggggcttcccatgggaattgggaggtcccaaggcagagtcagaggttccacaggaggagtcagagagtcaccaagggctctcctggcccagggagcagtcaacaccatggactgaacacttgctgggctccaacccttgggccaggctgcccatgtggggccaggaggcagctcagagtgggaggcagagagagaagtgtgctcagagggcacctgtatctggatgtaatgtggtcctgagactctggctgggaagtgcttccagggtatcatatgtgttatgcagctacttcctctccccagccttaccctgtaggaattctagtgactatgttgccaccatcttggagctccatgccctcatagtgtaatggcaccagcagatctgcctgtgcacagacttcctgtactacctcactcctgaggggagatgcttctgcgggcctgcgacctggtgctcaactttagacaccatcatcctggagcggcactgcaccctcactagccagggtgttgacgtcctcaaggccaaggccacattcaagactttggacttcattgatgcacttgtgccgagcaaggtgggcatctctgggatcttaattcaggaggtagaatgcagcttgagatcaagtgtctgatcaaagaacttgaacttgatctggagggctctggggagccatggaaggttctggataaaggagggacagtcagccacgttttagagatgactgtggaaggcttcctggaaggagtgaacaacagccaggagaccagggagggagcttgtcgggcaggtctggagatggcaagggagggatcctgcttggat

SEQ ID NO: 5460 - DNA, 1172 bp, Homo sapiens
atctggggtctggaggttggtggccatctgcgtgggggctccaagcccatattttccttccacatttccctagtagaggttttccaagaggatctgcctctgcatcaggcttctgcctggaaacagtgggagttgggggtggggggcaaatccttcaccaatggttaaacaccatctttttgatgctgaccttgtgagttctcatgagatctgcttgtataatagggcatggcacctctttcctctctctgtctttctcctactcctgccacgtgaatcatctcattgccccttgacattctggtatgattgggaggcttcctgagtcctcccagattcagaagccagtatgtttccttacagcctgcagaatcatgaggttctttatgatcatagagaaaattagtactgggaagtggatgtatgaaatgtcttcaaggccttttccctattgtcttgggagtcagtactcagcttcttttcattcaagtatctgagggcttcttgaattttctccctgaaaatggacttgtcttcctttaccacattgccaggctgtgacaaagatagctgataatgtagaagcaggttcagaagggggtggcagacagagatcaggagagtttggagggcttcgaagacaggaaaatgaagaaaagtttggatctttgtaaagaattgttaactacttgtgatcagaaggctgacaggaaaatggccagtgaaaaccagacttggaaggtctcagataaaaatgaggaacttcctgggaacagaagccaaggttacttttattttgctgtagcaaagaacatggctgcatggtgaccctgccctggagatctgtgaaactttaaacttgaggttgatgatgcagtgcatatctggtggaatgaacttctaggaagcaaagctcaagaggtgtcctgtctgcattgaacagcctgtgctctgatgtgtgactgagaaaatgacctctggatgggacttatattaaatgagtcccaactcttatgttaaatgagaaacaggactcaaaagtttggaaaatttgcagcctggccaagtggtcaaaaagaaaagctgattttcagggggaaaattcaggaaggcttcagaaacttgcatgaaaaggagcccagtgctaatagccaagacaatagggaaaagcc

SEQ ID NO: 5461 - DNA, 1165 bp, Homo sapiens
atgccaatatcacactattttcattactgtagccttataagctttggtattagattgtgctaatccttcaaaaatattcttatttttaaggattattttggctattttagactctttgcatttctactgaagttttaaaattagtgtgtaaattcctataaaacaatgcctaataatattttaattgggactgtattgaatctatatttagggataatcacattttaccatgtgaattttctaacccatattcatattacatctttccatttatttaagtcttctttaactttctgcagtgttttgagttttagtgtaccagactcttacatcatttgatagattaattcctaattcttctacatttttcatgatattattaatagtacttttattttaattttttattgttcattgctggtatatggaaatattagtttaatatgttgctttttttcttttttatgttgctaactcacttattatagccagcagtgtttttgtagatttcagtggactttctacatagacatgccgtctataaataaacccaatctacattttcctttcccgtctgtaattcttttgtttatgttttttgtctattttacttggtagaacgtctagtgaaatgttaaaacaaagtgctaagagttaatggactcatcttgttcctgaaatcgggggaaataaactgatttttcttcattaggtatgatgccagctattgtttttacatagatatcttttattaggatattcttgaatttcttctagacagtaataacttagatcttgtttcattgatccaatctgcttttaaattggtatatttagaccatttatatgtaatgtggttatgtgtgcatatatacatatttttttttctttttttttttttttttttttttttttgagacagagtctggctctgttgcccaggctggagtgcaatgcgatgatcttggctcactgcaacctctgcttcctgggttcaagccattctcctgcctcagccttctgagtagctggcattacaggtgcccgccaccatgcctggctaattttttgtatttttagtagagacagggtttcactatgttggccaggctggtctcgaactcctgacctcatgatctgcccacctcagtctcccaaagtgctg

SEQ ID NO: 5462 - DNA, 1117 bp, Homo sapiens
  misc_feature (1)..(263): n is a, c, g, or t
nnnnnnnnnnnnnnnnnnnnnnnnnnnnnnnnnnnnnnnnnnnnnnnnnnnnnnnnnnnnnnnnnnnnnnnnnnnnnnnnnnnnnnnnnnnnnnnnnnnnnnnnnnnnnnnnnnnnnnnnnnnnnnnnnnnnnnnnnnnnnnnnnnnnnnnnnnnnnnnnnnnnnnnnnnnnnnnnnnnnnnnnnnnnnnnnnnnnnnnnnnnnnnnnnnnnnnnnnnnnnnnnnnnnnnnnnnnnnnnnnnnnnnnnnnnnnnnnnnnnnnngaattctgtgtgagggacaaactttcagaccacagcaggagtgttctggaatcctatgtgatggacaaacactcagaagacagctggactattttgcaatcctatgtgagagacaatcattcagaccctcgtagcagtgttctggagtcctgtgtgaggaacaagcattcagaccacagcaggagtattctggaatcccctctgaagaacaaacattcaggctatcgtagcagtgttctggaatcctgtgtgactgacaaacattgagaccccagcagcagtgttctggagtgttatgtgagggacaaacattcagacactagtagcagtgttctggaatcctgtgtgagggacaaacactcagaacccagcagcatttttctgggtccctatatgagggacaaacactcggaacacagcttcagtgttttgcaatcctatgtgagggacaaacattcagaccctcgtagaagtgttctggaatcctatgtgagggacaaactttccgacaattataacagtgttctgcaatcctactttaaggacaaatatgcagaccctcgtagcagtgttctggaatcctatgtgagggacacacattcagacaatcgtagcagttttctggaatcctatgtgagggacaaacattcagaccccaacacaagtgttctgcaatcctacgttaaggacaaatattcagaccctcgtagcagtgttctggaatcctatgtgagggacacacattcagacaatcctagcagttttctggaatcctatgtaagggaaaaacattgaatcaacagcgggagtgttctggaatcctatgttatggacaaacattcagacgctcattg

SEQ ID NO: 5463 - DNA, 1214 bp, Homo sapiens
tcttcccagatgtgaaaatagtttctacgcccacttcccttccaaataacttgaaaatataagaatcatttttccctgagctagtacctggaagagttctctcctaaaggagctagaatttgttctacagatgaaatgtttccatagtattaggtcatatgaaagcttaacctaatcttatgttcaggtatgattgtgttctttatggcaggctagctatcaaagtacacataaattccttttttaaaagctcagcagattccccatccagtgactaaaaacaagttacaaagtgtcaggcattgcgctaagtactgtacacagctaactcatttacttctcataatgacctaatttactcttcataaccacatcaggagagaacttatattgcagattggactttgaggttctcagaggttcctcagtggctacaaaacaggacaaaggggatttgcctcaggtctaggcacaggaatgggcccagacagttgctggtcctggagtctattctgtcctctgggcccagcagtagcttcccatccccactgccccatcttgactctcttgtttatgatgccttcatcctacttgggatgtctgtgtgtgtgtgtgtgtgtgtgtgtgtgtgtgtgttactgtttgtcttagtccattcagtgttgctataacagagtacctgaggctgggtaacttacaaagaaaagaagtttatttggctcacaattctggtggctggagagtttaagaccaggcagctgcatctggtaagggtctcatgctgcttccactcatagtggaaagtggaaagacagcgagtgtgtgcgaagagataacatggtgaaagaggaaaggagagaaaaaccaaggaagccagattctttttaacaatccactgtctaggaaactattccatccttgcaagagtgagaactcattcatcactgcaggaggacattcatctgttcataagagattcaccccccatgacccatgcacctcccaatactgccacattggggattaaatgtcaacatgaattttgtggggatgaaccacattcagaccatagtactgttgcaccgacatctctccattcttggccctgtggggtggcaaggactcagaatgagctggaatacagtgctgccataattagccatcaacagtgaacaagtctccaggttggtctgagcctcagcttctccagctac

SEQ ID NO: 5464 - DNA, 1197 bp, Homo sapiens
tcactagctactaaaggaagtccttcaggctaaaagcaaagtgtactagatagtaactcaaacttgtatgaagaaataaaaagtaccaataaagataactgtgtaggtaaatataaagaacagaataagtatatttttatttctcttatcttctgatttaaaagacaaccaactgcataaagcaataattataaaactgtgtcaatgggcttataacacaaaaaggtgccatattcatgatagaataatggaaggaagaaatgaagcatagtttttgtatgctatgaaattaagttaatatgaactagattatcttaagtcaagttattaattgagggccaggagtggtggctcatgcctgaatcccagcactttgggaggccgaggtgagaggatggcttgagcccaggagtttgagactagcctggacagcatgtgagaccccacttctttctaaaaaaaaaaaaaaaaaaaaaatcaattgttttgatcacctctcagtgttttggctaagatcaagtgtagtatctgttcttataagtttaatatctgatatgtcctctatctgaggatactatattaaatgggtttttggagcagggagatgggataggagcttactctgtccactccaggtattgcagtacctccaggaatggtgcaccctctttggggaataataacattttaaaaaattacttgtaaaaatattttttaaagatgttaattgaaatccctagggcaaccactaagaaaataacttagaaatatatagtaaaataaaacaagaattaaaatggtatattagaaaatatctatttaacatgaaaaacagtaatagaataaaggaacaaaaagaagatgtaatacatacagaaaacaaatgccaaaatgcaaacataaattctaccttattaataattatgttaattgtaaatcgtaattgttaacactctgatcaaatggtagagactggtagaatgaattgaaaaaatgatccaactatatgttgtctccaagagacacactttagattcaaatatacaaataagttgcaactgaaagattggaaaatgatataccattcatgcagttcccaaaaaagaactggagtggctacaataatatcagacaaaatagacatgagatgccacctcccacttgggatgactataataaaaaagagaaagtgagaaa

SEQ ID NO: 5465 - DNA, 1208 bp, Homo sapiens
ttaaattaatatatattatatattgagtatatatttaaatgaagacaatcaatagtcttaaaaatgtttcctgtctattttaaatctttaagcggtgtcagtagagtattaaataattgaggtagttaaaaaggacataaaattgaggagtcaatatggataagattatagaaatgacagggaaaaatacagaagtattgtagattaaatgtcaatattctgctgctgctttaatattctggagaatttggttacagatactgatttgttttaggagatttgttctaagaattttcctttgtaggatacatttggggatggctttgttttggcatggcaagtagctctaatgccactggaatacattcaggactttcaaatttgtctcagtttaatgttttttcagttgttgcacagtactttataactttttttttttttgaatgggtgaaaaatggctttgtgggctgacgtaggtcatggaaaattgaaagccaaagctctaagatatataagtttttcatctcttggtttagaagaaagtctcttagatttgagtagaggatatcagttttcacattagtttactaatttttttttgtatgtgtgttctttagactgagagatttctttgacaagctgtataagccacagaagttttatattctgatgaataagctggcctgtagtggtggaagcgatgatgaagatcttggctagcagagcacatggtctgtttttaccatttctagtttaagtaggctgcactataagtggctgaggatgtagttggctgctgctcacttagtctggcacagatcacagaatctcccttttcaaagttgagacacttgactttgtgctgaaaatgtctttttagctgtttaaattttcattctcttccctttacttcttgattattttttcaaggtctatgtacagacatggagcactcagaatctttctatgaccattacacgagatgagtatccgtccaaccctatggtgctccgaggtattaatcagaaggctgcctttccacagtaccagcctgtcgtcatgctggagaagggttataccatccactggaatgggccggcaccacggactacatttctatacctcgtcaacttcaacaagtatgtttctgttactgttatttcaaatagttgagcaagtagtaatttagtggagaaaaagaataactt

SEQ ID NO: 5466 - DNA, 1140 bp, Homo sapiens
tacatggagctatttgcaattgagataaatgtaaacaagcaaagatgtagcattaaatcttagttgcataaaattatctgtagtagatactgtactactgtaataattttgtagccacttcctgttgcttttgcagtaagctcagatgttaccagtatcttcttaaaataatcactctgcttttgtctgtcaagtaaattgcatatagcagtaaacagatttcatcaaatttaatgcaataccataaaccttaaataacaccatgggtcccatatgacgtgccactggtgatgctgcaggtgctcccaagaagcagagaaaaaagacattacaagaaaaagttgatttgtttgatatgtactgtagatagaggtctgcagttggaggttgccccccaaccccatttcagacagaggattcatcttgtaatcaaattatgtaaacttatagtattgataaatgcagtgcagtagtgtaaatgtattttccctttcctacgactttcttaatattttcttagctttattgtaagaatatagtacgtaatatattaacatacaacatatctgtcagttgtttatgttattggtacggctttcggtcagtagtaggctattagtagttaagtttttggtgaatcaaagttaggtgtgggttttcgactgcacagggggttggtgccccaacccaagtattgttcaagggtcagctgtacgtccagattttgcagggttcaattttactgcaaaatgtcttttagttaatacgtaggagatttagataaaaggtcataaagcaaggaatgtcttttgattaatattttctctttctaatgggtttcaattttgtgattcccacagattttgcttagatgacattctcattaaggtaaaaatggatatagctcatttgtattgaatagcaaaaatgttagttttataacccagtcttgttacgaatgaagcacctcagcacatagaaaacactagagttgaaaagctgaaagtcttttcagaaacttcttacttttagaaataacggggtgagattttttaatattgagatttagaactgatttttacaggtgaggatgtggatagacacaaagcggtaagcaacttgctcagggttacacaatcc

SEQ ID NO: 5467 - DNA, 1155 bp, Homo sapiens
tgcggggaagaaactcagactttctatttttgatattttgtgcattaatacattacaaacatgaagatgtttgtaaagttttgttttagtcattttctttgcagtcacatcattgtaccaccttcattattgtatagagctgcttcaattctgagtcctctggacttcccctgcctatctgtttgttgttgttgttgaagacagtaaaataagtgttttcaaatctatatgtctcctttttgttggataatgtttcttctttttaatggtaaatattcttgttcttcaacatttttctttggttcttttttccttttttaggaaaaacaaaacaacagacttcatccttaggttttctcaagatttaagtgaacacatttacacatatcaatttcttaaagaacacaaaatgtttcctccctagcaaaactatttaagagccaattaaactatgaaatagttataaaattatttttaatatttaaggccttgaaattatattccaaggcaaatctaaatgggtgtagttgtatatgcacgatgtaatttaatgctaaagagtacttacagcttgagggaaaagcataaagttttagttaaatagccttcatactgtggatttttcctcctactaactaatatgtgggaaattaagattacagatgctttgggccccctcaaacagtacattgctacagttcactgtagcaacagatttggtggtgatggggggatagaggtagaagcagatagaaggtaattttaaagttaatttattatgaatcattttcccctaatctgcataaatgaattagaactgattttaataaaaatattctgtgtaaaaagtactcagaaaaacatctaaagctgttggagaagagggactcatataaatagttggattgcgttttgctttttatttctttataaaaatatgtcaaaaacagtttttaattttagaaatcttatacttgaaagaaacctcaattatcagtggctttatgaagtaaagttaaaaacaaacataggaaatgtgaaaatatttgtgtttgttttgtctgactaacttgctgctaaatgctatctttaggtgtgtgaaagttctttgatatgttattgtccttttacatcttgttaaatagccattgcttt

SEQ ID NO: 5468 - DNA, 1256 bp, Homo sapiens
atcttatttaaatctctcataaaccccaagataagggagtagattgttcctgtttgatacaggaggaaactgaggcttatagcagtttggaaaataacttaaagtcacatacagtggcagaagccagatgaggaacttggtcagtcagtttcaaaacctgtgcttaaccactgtgctactttcacacagcacacagaaggaatctaatggcatgctatgattacagccgtttaatacggagacaagactcataatagttcataatagtcactgtgtcagggtggtgcaattttgtttcgttttcctctgttttccaaagctatccttgaggaaactttttcctagtgcaaagcttttcattgggatggtatgtttctttaaatggaaggagactaattttaccatttaaaaagtggtatttatttttaaaaacataaaagaaattccttttcaataataatgagatggggcatcgccgcggagcctcggttggcctcggatagccggtcccccgcctgtccccgccggcgggccgccccgccgtgcgccgggaccggggtccggggcggagtgcccttcctcctgggaaacggggtgcggccggaaaggcggccgccccctcgcccgtcacgcaacgcacgttcgtggggaacctggcgctaaaccattcgtagacgacctgcttctgggtcggggtttcctacttagcagagcagctcgttcgatgcgatctattgaaagtcagccctcgacacaagggtttgttaaaaaaaaaagaaaaaagaaaaaagaaaaaaagaaagggaaaaaaataataataacaaaagcaaataagtaataataataataataataatgagatgggaaatgtggccatgtgtttttcttgtgcttttgcacattctctctaggctttgtctgtggtcatggaataagaaaagccttttggttgccttgtttggaataggtgcggctttacttcattctccacctgagagggtagtttactgcatggggcattttgtttgctgggaaaagaatccatgtatgaatcataccacttaacatttccctgccagcgctgtgtgcatcttttgatgtgacatatttttgtttgtttgttcttttctattttcgttgttcttcttcttaaaaatgacaactaactttgtttaaaaaaaattgtgttaaacaatctcaaagttacagacactttgtaagaacagtacaaagaacatcccttgaaccagttgata

SEQ ID NO: 5469 - DNA, 1177 bp, Homo sapiens
aatgaaccagaaatgccatttgccaaacagttgtaactagaaatttgattctcacggtccattcttttctttgtccttaagatgacattgttagtgttcacgtcccatgttcagtgtccaaaccggcaatgtaaaaagtatcctgtgtggtttaacaggaaatctgtttatgtctctttatttgaaaccagttttactctcagtggttctttaagttcaatgaagtctgccaggaacattggttggtagtattattccgacacctttaatttccaaaatctgaagttcctgctagtttaccaccttcatgatcttcttgaactggtaactgattaggttgaacttatggaagatttgtggacttaactcaaaagtaacctctcagtgttctatagaacatgtatttgtgtaactgaacctaccaggagaaatgtttggaattctatatgtgcaatttttcaacaaatgcaaaaaaaatacagcacatgtattgacaagcttctgtcaagcagcttgagttgaaatttgatttaagaaaataaatcatgattgttcaaagctgctgggacgttagaattaggccatgatactggtctcattttaactacagtggtatttggcactagtgtaaacttccatataaatcactcttttggaacaacaaagggggagggagaaaaatcacggcctgttaaatgagtaccaaagccgcccaacagtaatgagatgttctcatccttgattctcccagcctcaaacaacacagcttactttttttttcccttgctcagaaagtacctgtaatttaacaaacagactgcctgtaggtatagtgcaattacaaatgctctaatcattgtacatacatctctcttgatattgcagcatccatactggctttgtaatcattaattttttggcagattgaatgtgctgtattgatatgtatctatgtaattgtattgtatgtctatagctaattcacgttttgaataatgttattttatttacttttttaagagaggagaatgtaaatttgtcagtttatttctgactagggatattttctttccatttagaaaagaagaaaaaaaaaaaaccttactgtcatacagagcggtactagcgtcgtgctgtataaaatcatttgcacattcctgagtagaggtatactgat

SEQ ID NO: 5470 - DNA, 1185 bp, Homo sapiens
actaaccaaggcacacagcttggtgagcagaatgctgactggttccaggccccaggttgatctccaccacatgtccctttgcacaaggcccaaaatgcacaaccacatagggaggccctgcatagacgtttgccttgacagtggactagttcatagatatttgtagccagttgaccaaatccttattttacctccccacttttcattcccaaggtaaaaaataaagttcatctattaaaaaactaattgtatgtgccccaccttaacagtattcttaaggagctctatttttttaaccacttttctctccctgtaaattatactacccacccttcctttttgatatctgctgtagcaaattgtaaggcagcactctgcccacaggacgtggtctttaaaggagtcatttcctcttccatctcctccaggccattcccatcgtgtttttcgtggcactggcaacaggaaggcacactgaatagcagtgctgaaaaggcactttgttgtttatgttattactgtgggtttgtctctgcctaataattagcgtttccggctttctgaatttatttgccaaaatatttgcaggactttcgtgaacaaataagggatgtgtttcttgacataactgaccactgccttgcaaggctgagcgagagatgtttctagacataatagaccactgccttgcaaggctgagcaaacttctggctgtcggagtttttttagatggatttgctcagggaaagattatcctagtaaggcaaacaccttctaaatcactaatctggcattgatgctatctcagcgaccacagttcaggaagttcgaagtattccagtgttcctttcaggacagggtaggtcattactgaggggtggcgagttcttgggtcccaggggcaaaagtctagtcctgtctgagttccctcccagtgaagttcgtgagcctcagcttcctcatctgtaatgtgagataatcatatttgtcttgtctggctcatagaattgtagttgagggttaaatgaaagaaaatatatgtagaagtgctttgctaactctaaaacattacaaaaatgttatttatattagactctaaggatactgttctctgagggaggattaaccaaggagagagccttgttcactatatttaggttaaaagggacgtgcttcactctctgc

SEQ ID NO: 5471 - DNA, 1189 bp, Homo sapiens
aatataaacattcctgtacctgtctttggtgaacataagtctgcatttctttggagtatgtatctagcatttggaattcctgagtcagaaagtatgcatataatcagttttagtacgtagatactgccaatgagttttccagagtgatcataccagtttacattcccacaagctgtaagagttctagttgctccacatccttgacaacagcatttggtattctttttgttttagttattctcatggctggtattactagttttggtttgtgtttgagactgggtctcagctatgttgcccaggctggtcaagaactcctgggctcaagcagtcctttcaccacagctgggattacaggggtgtaccacctcacccagtagtctttttaatttggctattctgatggctggatagtggtatcacattgttgtttgaatttgcatttctttgataactaagcatcctgagcacttttttatatgtttactggctatttggttatctcttataaaatacattaattttttaccctttttccattggcttgtctgatttctcattgttttgtaggagttccttttatattaaggacatacatctttgttgagtaaatggcttacagatgtctattttgtggctttttgttttcttaatggttctttcagtgaaagttctcaatggtaagatagcccagtttataattttttccccttctaataattgcttttttgtgtccttttaaagtaatctttgcctacttaaggtcatgtagataatttgctggattttcttcgaagttctttattgttttacattttacattcagatctaaaatccatttcaggtggattatagagtatggtataaggtaaaggccaagtttttatgttttttatctggatatctaattaacccaattcatttattgaaatgaccatcctttacccagagcaatacagtgtcacctttgtcacaaatcaagtgaatgtatatgtttgagtttgtttcgggactctccattctgttccattgatctattttgtatatctttgtgccactgctgtgctctattaatgactgagctttgcaatgttttaatattgggcagcagtagaagtcactcagtgttgtttttcttctttgggattgcacaagagctgaatttattcctgtgtacttttaaagaaga

SEQ ID NO: 5472 - DNA, 1227 bp, Homo sapiens
gtttttctttctacattttttttcttcttgttcatcttgagggatagaaaggaagttgctgtttttagagggctgccgtctttccaggaagtgtgctttatgagtcttgatgactgtaattaacacatgtgaagtctttcatagagagttataattatagaatctcagttaagaatgtgctttaaagtccaagcatgcaccccatacttgagtggcgtctgtgacatccccaatttgtcgttaagtctgttcccctctaaattcagtgatgagaacattatcccccaattaattccatcttcagtcatctgtttattagaaatctttcattgagctgaaatctgtcctgtaactagcttcagattctattcctggggaacacggagagactggaacccactggaacacatttgtttctcccagtaattgaagttggcctcatgacacccttggggatggctttcttccttttatgaaccatcgtgagttcttgccatcatttctcataaagcaggaatgaaatcttgttccttaatatcctgattgttctcatcttttaaaaattacctgtaatgaaacccagcacttgatgtgtgccttgatgaagtcagagtagataattctgtctttcctccctgacattcgtgtgactctagaaatctttgtctttttgtctaaataaattatcccaacaattacagcaattttagtgcaaagggcactcaataactttctctaccagtaccagttcatgtttgtttcatttttcttgatacagcattgcactgctagtcctgtttttgatctgtggtcatctgtgatgtgtacatagtcttctgcatttttccttttccctttatcatgtatttgcttggattttttttcaattctgagagtttttactgctattgaatttcatcctaattctgggaacatccttccaagatcagattcatttaaactttattcccaatttctagcatttgtaattctaccctgttcattctctaaaggaaagtagaggaacctgttacaataagatttgtagttagatcagggaaaaacaactatttttgttaatactgtcagtaaagatagggaagtttttagatttcaagacagattgccatagtctgtcattctgtatctccagttgattccaagtctttattactttgttgtttacttacttaatgggcatgaagccaataataggctacccacatt

SEQ ID NO: 5473 - DNA, 1199 bp, Homo sapiens
aacagttctccccttctaccatgtgaagagacagctagaaggtgctatctataaactggagagtgggccctcaagaatctgctggcaccctgaccttggactttccatcccctagaactgagaaataaatttctagttttataagccacccagtttatggtatttgttaaagtagcccaaatggactaagacatgtgctagtggatatagtttccaaagtgggcaactggtggtgcacatttgtggaacattgaggaatatcatggtacagtgatgcagtggcccctcaggaagctaatttctatttttagacatgtgggcataaaaatatgataggagttctgaaataaccaggaattcagatttcttatggtgagctatttcttccgtgatctttccctatacccatatgtcaaatcatgctaagggtgaggaaagaatgatgataaatatatcattgcaaattgagtgaagccaacatttttaaacaacattattattattttttttaagacctgctttgtgtgaggcaaagtgctagattttctgggagaaacagaaaaaggttaaggtgaggttgagaaatatatccaactaacaagaaaaaaaaaagacaagatttgggccctcagaaaacttgcattttggtctttcagatcacttttttaaatctagccatgcatgagttaatttttagaatcctgggttaaggaactcatgggtaaaataatgagatgggtgacaacatgggctgggcatgtagtgaggagaggcctggccatactcaggggtgttgttctcactccaggcccatgcctgacacatagtcccttatgagaaatccagccaaagctaatctctctgagtctcttcatcacaaaatatgtggaatagaaaatatgagatatcatctcacaccagttagaatggcaatcattaaaaagtcaggaaacaacaggtgctggagaggatgtggagaaataggaacacttttacactgttggtgggactgtaaactagttcaaccattgtggaagtcagtgtggcgattcctcagggatctagaactagagataccatttgacccagccatcccattactgggtatatacccaaaggattataaatcatgctgctataaagacacatgcacacgtatgtttattgcggcattattcacgatagcaaagacttggaac

SEQ ID NO: 5474 - DNA, 1216 bp, Homo sapiens
tatgaattataaagtgatccaataattttcttccaaagatgtgcaaagggactatgtagcagtttattacctgttgtgtaattagctccgggggttactcttctagaatctaaggtaggtgtcagtttctctagcttgaggtaaagcgtgtctgtaaactgtggcttacagtgagcttgacatctcaagtcctcaggactttcttgctttgtcccatcaaggaccctttccttagggaagataaattcattgtaaataaatgacttaatcataagtagaagaagggagaaatgtttaatcttggccttttggagtttataaatcaaagacacagtagagatcaagttccttcattaaagtgtagttccaaaaaggaagaatgtggttttggttttaaaaaatttttttatttttaatttttaagagtacatagtaggtgtatgtatttatggggtaaatgaactattttgataccggcatatagcatataataatcacattcgggtaaatggactacccatcaactcaagcatttccctttttttgtgtgggttagaaactttctagttatactcttttagttacttttaaatgtacaataaattattgttgactgtagtcactctgttatgctatcaaacactataccttattcattctgactatatttttgtttacagaagaatatgttttgttcactgctggtaccactagcacctaaaacaatgcctggaatatagtagaagaaatgaatgaatgaatgatggaacagctaaaggagtggtttaattttttcattttattgcatttcatgtagcatcacatattctgagtatcagccacctttatataagctgtcttcgtttctgagtgcttagggagggcctggctttatgctgagcaaaaaaggcctagataggcaatcagagagtgggagttcttatctcagtctgctacaggtccttgagctgctgattggcatttttaaaatttagaattggattcatactttgccagatgatttatttctaagatatctttcaactcttaacatcatatgatgtttaaatgaccagcttaaaaataaaattcatccctacttccattgctcggtactataggcatgccattttagtaagttaagttttaagataatttttataagaggaaatacagccaggtttttttttgtttttgtgtttgtatttttgtagaa

SEQ ID NO: 5475 - DNA, 1197 bp, Homo sapiens
tgttagtctgtctattgtcagtttatttcagagaaacttcagagggcagagggaaacttttcccttcaccctaacatggaacactgccatcaacaaaagcaaaaccaaagaaaaaaaaatttaagctgacaggatgataggaaccagaaagattaccttcaaataaatgacaatttagggcaggcacagtggctcacgcctataatcccaacactttgggaggctgaggcaggtggatcactcgaggtcaggagttcaagaccagcctggccaacatggagaaaccccatctctattaaaaatacaaaaattagctgggcatggtggcatgcacctgtaatcccacctacttgggaggctgagaggagaatcacttgagggtgcagtgagccaagattgtgccactgcactccagcctgggcaacagagcaagactctatctcaaaaaaaaaaaatgagaatttgactgagaactggctttttaactgcaacagtaaaatcaggagacagagggagaaatttcttaaagacattgagagaaaataattatcacctggaattctataccaccaggagtgggacttgtggcttaatttgatgcaacacagcaaaccttacctggcctagacatagacatgattgacagattgaatggcttgtgtgaatgatgttaatataaagacttttcagataaatgaagacagagttttctaaaagcagttgctagttaaaagaaattttaatggatcttcttcagatgaaagaaaaggttttacaaatggagagtctgagataaagaatataaaaagcataaaaagagcattgaaagtgctaactacatggataaattctaatcaaatgctgactacgtagcacagtaaaaatagtaatgtgtcatgagtttaaaaacacaacttttgtttctttttccctttcaagtaatggaagcatgaacatatccactattcagctttgttcctgcagatgaacaatgccatggtttgatgaacaaatgggaagaaacctgggcccctaaatgactgtatgaagacactttgcctcctgacccactcaccacagaactagtatataaaagagaaattgactttcaatatcttcaagtcattgtatttttgacattagagtgtacccacatctaaattacatgccctagcatttaattttgatcactcactt

SEQ ID NO: 5476 - DNA, 1314 bp, Homo sapiens
ctctgccactcgggttcaaatgattctcctgcctcagcctccccagtagttgggattacaggcatccgccaccacacctggcttattgttgtatttttagtagagacggggtttcaccatcttggccaggctggtcttgaactcctgacctcgtgatccacttgccttgggcccccaaagtgttgggattatgggggtgagccactgtgcctggccggaaatctttactttgttagtatctaaatattaccggagtatgtttggtctgacataagaatcccacctctgaagtcatcttctggtgactccattctagatttttaggggagtgggggaagcagggagaggggtgagagggtggcatcctccaccctgtagttagattccttcccctctgcttagcctctctcatcttcttttaattagtgccgtgcttaattacccgctgcacttgcttgtgtatgcatcattgcattccccccaccccccacccagaagcctgacacagctcttactctccaagtaatgatagtaattgctggtagggcagtcctgttcctcatccttctccaagcacatttcttatggcaggtgtctagttcctaattaagtgctaatgagcatgcctagtggaccgtgatgccactgcaagcttcttcagttttatgtctcactattgccaagctcttaaaaggtgacagagcaagaattagtgtctttgggatgacaggaaggtgattttatgcataaagaaattgttattatgatctcaaatggtgaatgagtagtttatactttccaagaatgctatgaatgctgcctgttctgacctcatccccttttccattttgcttctaattagaaccatgctctctttgaaaagaatgaaagtttataaagatggttggctggctcttagacatttttatttatttatttttaaatagagatggaatctccctatgttgcccaggctggtctcaaactcttgggctgcagtgatcttcctgccttggcctccaaagtgttgggattataggattatagtgagccactgtgcctgaccctaaacatttttagaaaagttggagtgcttgaaaattcattgtaaaatttccacagacactgatttctgccttaagatggtgttttctctaacttttgaggctgggaactgtgtttgggattccattaaaaatcagtgggctgggtagaaatgactgaagatctggcatgaagatttaatatgttcagtgcacgcaaagggataataaataaaatgagtaattgagtcccaaggaagtgagcacaaat

SEQ ID NO: 5477 - DNA, 1199 bp, Homo sapiens
ttctctagtaaagaaaggagttcaggacgggctcggtggctgacgcctgtaatcccaacactttgggaggctgaggcaggtggatcacgaagtcaggagatcaagaccatcctggctaacacagtgaaaccccgtctctactaaaaatacaaaaaattggctgggtgtgatggtcggtgcctgcagtcccagctactcgggaggctgaggcaggagaatcgtgtgaacccaggaggcggagcttgcagtgagccaagatggtgccaccattgcaccccagcctgggcgacagagcaagactctgcctcaaaaaaaaaaaaaaaaaagaaaagaaaagaaaggagttcaggattagaatttgccagccttccaagcaaagtgcaggtcccattaatgacggagaagtgtgtgccgtcttcccagcagaatgagacctggggaaaactgggtccttctcatctggtaggataagacatcatattgccaacagacaacatcagcagggcagcagcagtatcaagactacatgaataacctgtttcatcagaccctcccagggagatagcacttgggctcctacaggacccagttacatggggatgactgtgtccctgccctttggaaaatgcccagtcgtgccagggaaaggcttcccaggcaaaggcaacgtgctaatctttttaaaatatgtgactaaaagcaatctacacttttatatttcaagtatattgtcattttaaactgctgtattatcaaattgcctcagacagctttaaatccaagactctggctttcaaactctttggacagcaactcacaaaaaaataagtaaaataatttttatcataaactaatatacacaaacacacaaaactaatacaaaagttttgtgaaactttcctttcctttgttacatgtaatacatctaatattatctacttcagttagttttgttgtttcttaagtgcttttcacaattcccagaattattttatgatccaggacctgaagtttgaaaaacactattctaagattatagattccagctactctatccaggagttgggtatccaaattttttaaagctcattaaaatgcatcatcaaaaagccacatttgctgaagaatcctcaggccccatcaagagcattgtcttggagagtctcaccatgactcatcaaatgaatacccagctttcc

SEQ ID NO: 5478 - DNA, 1158 bp, Homo sapiens
cttcatttagaggagactgttctctcacctgggtcctggcttagagaatcctgaagctttagccttaaagtaggggtggagaaaatgaggagagttttatccatcagctacttccgttatagacttgtctgagatggaattgcaggttattttaaatgagacagatattgtataagcaccagaaatagaacaacggtgtctgttagatttgaggagggaaagtcttcttttagaatatgtagtgttattttgttttactttttatttttatctttttttttttttttcagatgaagtctcgctctgttgcccaggctggagtgcagtggtacaatctcagctcactgcaacctctgcctcttgggttcaagtgattctccagcttcagcctcccaagtagctgggactacaggcacatgccaccatgcccctctaatttttggatttttagtagagatggggtttcaccatgttggccaggctggtctcgaactcctgacctcaagtgatctacctgccttggcctcccaaagtgctgagattacagatgtgagccactgtgcctagttgttttctttcttttttttttttttaaaacgtgtgcattgtgcattgtttcccggtttatcgtactaaaagaagaaactattttgtgttctaataatttatcactgtgcaggtagtttggcttttggtaaaagacaacctctgtttccagtttgtaactgatgtatcattctccttgttttccctgcccttaatttaatgtggttacgcttctgttttctttccttaaattcacttgcagcttttctccccactctctctcttaatgtcacaagttttgcgtgaaccattccctttgcctctcccttgacttctgctctgcctgctacaatctttggggtttacagcccactaagcagtcccactggctatgctggagaaagcaagcatctttttcatgcctataggtggcatgtacagactgcaccctgcagaggagctgggaggcaaagcttatttcttggaagttttcagtcacttgcaaggagcagctatggacacagtgaagcgcagaggtccaaagagaaattctgtcattcaagaaggaatgaaataaaggcttattaagcaactatctgtttatctatatat

SEQ ID NO: 5479 - DNA, 1316 bp, Homo sapiens
ataaataaataggaaaataagaaagaaattcctccacaatctcaccactacatgaataaaactcttttcagtcatccctgtacttaccattgtccacattcttccgtcatttttatttttctgcaatcccaggatagacccagttttgattcctacctttgttcaataacactgtattataaatacatttccatgatggtcacagcctttaaaattgcaattattattgttgcttcaataacaggaaaagataaatgtagaaagtattttttattgaatatttcataaggccaaacagaaatggaaagtgctttcattatagtcaacaagccaaatctctggcttttctcttgcttcattgcctttccctgagaaaccacatcctgcacaaatccaactctgctcttactccacgcctgttcccgtgctgctgaaccaggctggaagaaaaacacagccacacatgcctgtctcactttcacttcctgaccactcaccccaagaaggctcataatgctgcgtagcaatcattctatatttctctaatctatttactctcccttctcttaggcgattctttgcattctttaacctccaaactctgacgctgcctcctccagcctctctctcaggggataactacatattctttcactgagaaatgagagacaatgaaaagagacttcacaaggccccggtgccacctctcatctacctccatttgttctgatatactctactttccctctagttattaagaatgaattgaacatgctgccctttcaggcctgtcctttctcggcactgattctatcctctcaccagctcaaggattttcctccagcaattccctaccatttccactatccccatctcttgaaacagtattcttttcctctttacttgactcttctcattagactacaaatgtgctgttaccacttgcctacacacacacacatgcgcatgcacacacacacacacacacacacacctcaaaaaacttcaccatctatctattgctccatttcttgtcttccttgtcaagcaaaattctgtgagtctagtggttctcaaagtgtggtataagtaccagcagcattagcatcatctgggagcttgtaagaaatacatattcttgggccttactccaaatttactgaatcaaaaattctgggtgtgggcccagcaatctgtgctttaacaagcctgcaggtgattgtgatctatactgaatgttgggaaccactgtttacgtatagttgttgactccaatttctcttctctcattctctttgaaacacactccagccaag

SEQ ID NO: 5480 - DNA, 1212 bp, Homo sapiens
agcttactatggttttgggggggaaactggcccctttcatagttcactttgattacatggcacttggcacaagtggctctattttggtttgttgtggtctgctggggcatagtgcaggaggctggtccaaaacagtggcctcctggccgggcgcggtggctcacgcttgtaatcccagcactttgggaagctgaggtgggcggatcacgaggtcaggagatcaagaccatcctggctaacacggtgaaaccccgtctctactaaaaaatacaaaaaaaaattagcggggcgtggtggcgggcgcctgtagtcccagctactcgggaggctgaggcaggagaatgggtgtgaacccgggaggcggagcttgcagtgaaccaagatcatgccactgcactccagcctgggcgacaaagcaagactccgtctcaaaaaaattaaaaaaacaaaacaaaacagtggcctcccataaactttgtttaatggcagttaataaagtaattaatgtaattcatgtgtatttcaatgccttttttttttctttttttggaaatatttttcgtagacgttggaacttgccaggaatccagcaatgatgcaggagatgatgaggaaccaggaccgagctttgagcaacctagaaagcatcccagggggatataatgctttaaggcgcatgtacacagatattcaggaaccaatgctgagtgctgcacaagagcaggtgatccactggctccaaggttcaggccaaggagtagcttctgttttaacacaaatatgtgtatgattgagggtagcttttatatgaggaatgtggttttcaatttttaaaaagttcagtggccgggtgcagtggctcacgcctgtaatcccagcactttgggaggccgaggcgggtggatcccgaggtcaggagatcaagaccatcctggctaatacggtgaaatcccgtctctactaaaaatacaaaaaattagctgggcgtggtggtgggcgcctgtagtcccagctactcgggaggctgaggcaggagaatggtgtgaacacaggaggcggagcttgcagtgagccgagatcgcgccactgcactccagcctgggtcacagagcgagactccgtctcaaaaaaaaaaaaaaaagtttcatatcttatttaaaacaaaagcttattctttgtgattttttatgtcttttattacagtttggtggt

SEQ ID NO: 5481 - DNA, 1206 bp, Homo sapiens
tttttaagacagtcattttaaaatggtggctgaatttcccaacccacccccaaactaaacactaagtttaattttcagctcctctgttggacatataagtgcatctcttgttggacataggcaaaataacttggcaaacttagttctggtgatttcttgatggtttggaagtctattgctgggaagaaattccatcatacatattcatgcttataataagctggggattttttgtttgtttttgcaaatgcttgcccctacttttcaacaattttctatgttagttgtgaagaactaaggtggggagcagtactacaagttgagtaatggtatgagtatataccagaattctgattggcagcaagttttattaatcagaataacacttggttatggaagtgactaatgctgaaaaaattgattatttttattagataatttctcacctatagacttaaactgtcaatttgctctagtgtcttattagttaaactttgtaaaatatatatatacttgtttttccattgtatgcaaattgaaagaaaaagatgtaccatttctctgttgtatgttggattatgtaggaaatgtttgtgtacaattcaaaaaaaaaaaagatgaaaaaagttcctgtggatgttttgtgtagtatcttggcatttgtattgatagttaaaattcacttccaaataaataaaacacccatgatgctagatttgatgtgtgcccgatttgaacaagggttgattgacacctgtaaaatttgttgaaacgttcctcttaaaaggaaatatagtaatcttatgtatttttttgtgtgaagtgtttttctagcatttataagtgaaagctggcaggggtggtagttgggctcataattaacgtggtaatttagcaaaatgagagcctagtcatccaattttttttttcttatagtcagccagagctttcctcattacctatgagaaattttgagtgagttacttggttcctttctctaaaatagctttagtttgatgtttgagaatatcggagataatgtaaaataactgcagagtatggttcccggctcatatttctgaagtactacttattaacctccagctgtccagaaagcttgaaaactgtttttgttttgttttgttttgttttttgagacagtgtcttgctgtttttcccaggctggagtgcagtggcataatcttg

SEQ ID NO: 5482 - DNA, 1185 bp, Homo sapiens
ataaaattttcccactttattttcttttgttcagttcctggcagtacagatctagaatgcagattagtgtggtcagccaagtttatcattcatacaatgctaatcagctttcttaaaaatgttttttcctgattataaaattaatggggattaagctgtatgtaattttatatgtgttctttttcccaacaaaatgtgaatgtatttctttgtcattaaataattcttaaaaatggtttctttaaagatttcatagcttttcatttcatggtggtagtgctatgtatttaactttttttcccattttgaacattttgtttttttcaaaatataaaaactcagtggtaaactctctgccacataaatctttgtctttatttattttgttacttattgatgcataaaagatgtacatagttttggggtatatgtgataatttaatatattcacttaatttgtaaagatcaaatcacagtaccggggatattatctccttaaatatatggcttttctttgtccttatttatgattatgtccttaattctggaaagtaaaagaagtggataatatggtatgaacataccttttttttttttttgagactgagtttcgttcttgttgcctatgctggagtgcagtggcgcaatctcggctcactgcaacctctgcttcctgggttcaaacgattctcctgcctcagcctcccgagtagctgggattacaggcatgtgctaccaagctcggctaatttttttgtatttttagtagagatggggtttctccatgttggtcaggctggtctggatctcctgacctcaggtgatccacccgccttggcctaccaaagtgctgggattaccagttttgaacatctttttttcttttcttttgagacaaagtttcgttcttgttgcccaggctgtagtgcaatggcacaatctcggctcactgcaacctctgcctccttggttcaaacgattcttctgtctcagcctccctagtagctgggattacaggcatgcgccaccaggctcagctaatttttttgtatttttagtagagacgggcttctccatgttggtcaggctggtcttgaactcctgacctcaggtgatccacctgcctcagcctcccaaagtgctggaattacagctgtgagccaccgcacccagcccgaacatatc

SEQ ID NO: 5483 - DNA, 1178 bp, Homo sapiens
tgacctcataaattttcttaaaacaatatgagatttgtgtgtgtgtgtgtaattttttttttttaagcacaccagctatcgttggtattagtgtattttatgtgtagcccaagacagttcttcctcttccagtgtggcccagggaaacaaaaagattagacaacccgatttacacatcttttgaaaaaattcccagcatatagcacagtatgtggcacatgactgtcattgaaacaaatagggggtcaattataaagggatgaagtgagtcattgaaatttataataaatagaaaacaggatgtttcattcaggctatcgcaacataagacattatttttaaaaactgagaacattagtaaaattcacctttacagtgctttccaaattttgaagcactttcttatatggtcccatgggtttgtcaacagctgggacagccttagagagatgttaaataagaaatctcatttactttttctctggtgattgaaatactttatataagtcacattctaccattggctatgcatattgtagaatgcttacctctgacctacttatagcacattttgtatcatagtggatgacgtagtagatgaaagtgatgacaacgatgatattgatgtagaagctgaaaacgaaactgagaatgaagatgacctagatcaaaattttaaggttagtataaatttctgtaattagttagctttataaatgatatactacagttgtaaaacaaaaattgggtaaataaatatatatgtaattttaggttttactttgtccacatctttttaccatgaatgactatgcaattaaaggggtagatgatattggtttaaatccactggtctgaaaaggaccttaaagtaacttattttcactctctctgaccagaaagattttatctaacctttctgccttagattttgaaatctacaaaattgaaggaaagtgatctgaaactctcttgtggcaacttatttcaaaatgcattattatcctttgtcagcagtcttttggggatacaaaaacagtaggaaaatattctataatggatttgtttttgtgagaattagtgtttgcataatgattcttaggtttcagttaattgaacaaggaagtgaaaaaagtattattgagaaaatataaaattattgtcatattacataagat

SEQ ID NO: 5484 - DNA, 1120 bp, Homo sapiens
ggcctatgtacaaatatttgtatgataaataggaacagggaagaaagaacataggtggaggataggtaggcttaaggatctggtgacaggaaagtgagtgtattcttgctggatttataccagttatgaagcagggcactaactgagaatggagtcggatgggaagaaggattatcagagttttgaggagagcagagtaagtgtaaaaagtctttgagagtggaaaggtgaactttccaggtgtgatgtaagattactgaacagggttgaagggatatttgtgatttgtggttttctgaaatagaatgtgtttctcacttaagtcagtagaatttaagctatagaacaatattaagctatattaagctatagaacagagtaaggaagtgcgacgtgtaaatgctttctgtttttaaaagagtagaattgttttttaaacagtgatcgttatagtattgaatttacaccattgatttagaatgtgccctaacattctacgttctttttagccttaccaataattctaggatcgtaggactcctggctcaactggagaagatcaatgctgagccttcagaatcagacactgcccgatatgttacatcaaaaattcttcatctggctcagagtcaaggtaaacattgatctcttctttgtttttgaaatgcttttttaattctttaaaagtggatgctaaaaatgttcaaacttctaataatggatgattttccacaaaaattgaactttcaggccgggtgtggtggctcacacctgtaatcccagcactttgggaggccaaggtgggcagatcatgaagtcagtagttttgagaccagcctggccaatatggtgaaaccccgtctctactaaaaaatacaaaaattagccgggtgtggtagcatgcacctataatcccagttactcgggaggctgaggcaggagaatcactggaacccaagaggtggaggttgcagtgagctgagatcgtgccactgcactccagcctgggcgacagcaagactccgtctcataaaaaaaaaaaaaaaaaaatcaaactttctcaaattgactcgagtggaaaactgaataactttggaggaaattgatcttcaaagcatgg

SEQ ID NO: 5485 - DNA, 1199 bp, Homo sapiens
gatgggggcctgtgcttaggaagagctctctgtatattgatgatctggtgagtaaataaggaaagctcttcaaacatcacatttcatggatatgtttaagattaaagtttaagagtgtgtgggtgaaatatttggtttaactggaattaaataactttactgtggttttcagcaagatgagtggtatttggagttttcctttgggactggaagaaaaaagcaaaaaaataaattttaatttgatttgcatagtgtggcctgatcgtttaagtgttgttagaaagagagatgactaaaattagttgagattattatattatggattaagtatattgaccttattttcattatgattttttggtaccattatgtgttatgagaaagaaatagaaaaagaggcctccctgtggttggcgaagggagtttttgatctttatttcgtgggcgtgatgatgaggggagggaggtggcttacttatttgtcactagcactttgatttgctcagtgtacatttttgtgtataacgttctccccactgtgcaaggcaaattgacaaattgtttattaaataatttgtgtgacctaggaattttaaagaaatgctctgaaaaactggaagtctgaagtttttaaaaatgaaatgtacagactcatctatcttgtataactgctattgtttttgccaaaaaatgagtgaatgattgttttttggaaaatttttcaagtcctgattttatgtctgccttggatgtagccacttcctgaaaacaagtcctaatgtaaaatggacatgtaggaagatgctgcttatatgacatcacgtgtcactgagggaagattgggagtggaggcaggagtttggtggcaggaaaatggaaatgggcagatatgtggcacaaatgcaaggtcattctaagcagtgaattactagtagaccagtatctaagatttaagactttacttggccaggcgaggtggctcacacctgtaatcccagcacttttgggaggctgaggtaggcaaatcacgaggtcaggagttcaagaccagcctggctaacatagtgaaaccctgtctctactaaaaatacaaaaaaaattatctaagatttaagactttaattggccaggcgcagtggcgcgcgcctgtagtcccagctatttgggaggctgaggcatgagaatcgcctgaacctggg

SEQ ID NO: 5486 - DNA, 1159 bp, Homo sapiens
caagggatcacgaggagcgccatcaccgtgcaaggtcgacagcttccgctcaaagccctgtggcccacgcttccggcctcgaccgactacgtcatcaccaaaccccgtgatacctcactccaccttcaggtcctccgtcccaacggttccgtgtcctggaactttccacgttcctgcgcacgcgctctgcggcccttaacgtcccgacttcgccctcctctggccacgcccctgcccgttaagggccctgccacccccgtgacgtacctatcttccctcgggcaacctcgcaacagatctctgattggctgacccaggaagcggactttgcgaggcggcggcgacgataggctggcagccggccgacttccgcagaaggtgattggtcggcgctgctgtccaatcggcggcgggctgtcggattcaaatccggatcgttgggactgcggtcgttagtctccggcgagttgttgcctgggctggacgtggttttgtctgctgcgcccgctcttcgcgctctcgtttcattttctgcagcgcgccagcaggatggcccacaagcagatctactactcggacaagtacttcgacgaacactacgagtaccggtgggcgcctttcttagaccccgagccggctccctcagccggggcccccgcgggcggggcgacccaggcatagtagggtcgggggtgggggccggggcctggggggcggagcccggggccggagggcgagggccggggtttggggtcgcggccacctggcgccccgcgcagtcggacatggttgggtgcctggccgcgccgggccggttgggcctttgttcggtgtgcgcggagggtgagggaagagtgcccaccgggccgcatttagtacctgggtaggaaccggcgcaacttgggggtcatggggtcctcggcgacgcggagtgaccatcccgtcacttttttctcggccgtggccgaagtaattaggccgttcagtagctggtctcagttccagttctttgaaccagtccaggaaaacccacctggtgccgtcctttttcctttagcaaccgtgacacactttccctgtcgctgacggggtgatgcagcttttactagtttgtggtttagaatggtcaaatggtcattttcatctgttaacacagagg

SEQ ID NO: 5487 - DNA, 1196 bp, Homo sapiens
tttgggaggccgaggcgggtggatcacttgaggtcaggagtttgagaccagcctggccaacctggtgaaaccccgtctctactaaaaatagaagaattagccagtcatggtggtgcgtgcttgtaatcacagctacctgggaggctgaggcaggagaattgcttgaacccagatggtggaaattgcagtgagccgagatcacaccaccgcactccagcagcctgggtgacagagcgagactccgtctcaaaaaaaaaaaaaaaaaaaagagggttcccaggctttgtaccacctttcttgtgtttctctgcagtgggacaaaagttgcggttagtgggtagcctgaacttagagctgaagaggtgttgtttcttctattcctatgaaaaaaatagatgagcttctgttcttgaaagagccgtttaagaaaacatctttccaaaattgataatgaaatcttgcatcacccaataaatctgaaatttttggtcttttgattcagagaatttggaggcattcccattttgtgaagtcattctttcaaaaagtagacttcatttaaggatatgcatgttatagtaaccttccttggaacttttttttttttttttttttttttgacacggagtctcactctgtcgccagactggagtgcaatggcacaatcttggctcatggtaccttttatgtatgctaaatgatgcttagagtatgaatgaaacaacagtaacaatgtaaatattaaactcagtgttgaacatggaagacatacttgcatatgaattggttaaaattgtgtggttaaccttatcattaaaagagtatttattctgataggtagaaatttaaaacataggttacagtgaaattgaagactgcccagatgaatgtgtaagactccccatgttttctactttggtaattgatgaaaatgttattcttgtaggccaaaacatttaatatatacttactctattatgcctgcctttttcactgtgactaataaaaaacaccagaaggatttataagacagtggatcaatttaaaaagaattcccagataactaatatgtgaaataaagcaaaatttagcaaaagggtgatgtgacatatttctgaaattcttttgagaagtaagcatttgttggtaatgaggatgtgattaatcctagaagatagaaagatagtggctgtagt

SEQ ID NO: 5488 - DNA, 1179 bp, Homo sapiens
agtgtatgtgtggtgtacgtgtgtgttatgtgtgtttatgtgtgttgggggcatctgtatatgtgttgtgtgtggcatgtgtgatgtttgtgtatgtgttgtatgtttgtgtatgtgttgtattgtgtctgtgtatgttgggttgtgtgtagtgtgtgatgtctgtgtatgtcgtgtatgtggtatgtgttgtgtctttgttgtgtgtggtatgtgttgtgtgttgggttgtgttgtcatctttgtgtgatgtgacatttgtatagtttttgtctctctgtgtgtgtggtatgtgttgtgtgtcttgtgtgtatggtgtgtgatggttgtgtatgtgttgtgtggtatgattgtatgtgtgtggtgtgtctggtgtgtggtattgtgtgtgctgaatttgtgtggtgtgtgatgtttgtgtatgtgttgtatgtggtgtttgtgttgagtggtgtttggtgtatatgtggtgtttgtgtatgtgttgtgtatggtatgtgttgtgtggtgtgtcttgcatgtgtgatatttgtgtggggggtgtgtgtgtgatatgtggtttgtggtgtatgagttttgtgtatgtgctgtgtgtggtatatgttgtatgtctgtgtggtgtgatgtttgcgtatatgttacgtttttgtgtgtggtatatgttgtgtggtatgtgttgtgtgtattgtatgttgtgtggcatgtgacatttgtgtatgtcttgtgtgtggtgtatgtgctgtgtgtgtggtgtgtgtgcgcacacgtgtgttctgcagctgtgcaccttggagccgtcccaggtagtaagccagaatggaggcaataatgagtgatgagcagtttgttttttccctttttggaggctttgcctcattaacttggaaccagaggttcctgaggccacgggtggcagagtcgaggaggcctccaaagccagcagtggagcgtaggagccagggcgctggggtggagatgggatctttacagcctggaagggacatcctgtgtgtcttgctgcctgccactgggtgccctcctatagtgttggtggctgctccaagcgccaaggcacccccaccatgggcctgaagcctgattccacttccttgctccacaaggctgggccaccctctgcctggtctctccaggctgtgactggatggcttttctccaggg

SEQ ID NO: 5489 - DNA, 1806 bp, Homo sapiens
gacatgagttctgtttgtagagcaaggacttaagatcaaggaggattttgcaaagcaaaaagagtgggatagaactttctgggtaaaatgaacagccttagcatggaaattatttcccagtactcattttcagtttgtggacaatcattcaatcctagacagttctactgtccttccttcctgaggtttaaagtaactaaaccctacacttttctgacaagattttagaatatctttcaattcataattactctttggtgcagagaagtaatgttttcctaaactctcttcagtttactcaaaaacataataaattaattgaggacttaatgtgccacgttggtgcttatcttgaaaatattgctgaaaatcagaaattcacattgccagtagggtctgggattttttctttttgtttttgtttaagtgatttaagaagtttatttcctcatagtaactttcttcccaagtgtgccagtgtttcattaattgttccttcctaggaggaagaaatagaatttctctacaatgagaacacggttagagaaagccccaacattacagaccggtggatcctgtccttcatgcagtctctcattggcttctttgagactgaaatggcaggtgagtctctcttggtctgtcctcccaggaataaggactattctctttgtaactgcccttttgatatttaatagtggaaatattgagagatacagaaaattaaataattgtttccttttacctctcatatagttttgttaaggcttgttaattgtcgtgatatctttgtttcaagaccctggggacttctggcctggtgtggtggctcacgcctgtaatccccagcattttgggagaccaaggcaggcaggtcaccttaggtcaggagttcgagaccagcctggccaacatggcgaaaccctgtctctactaaaaatatatttaaaaaaaaaaaaaaagttagctggccatggaggcgggcgcctgtaatcccagctattcaggagactgaggcaggagaattgcttgaacctgggaggcggaggctgcagtaagttgagattgcaccactgcctgggcaataagagcgaaactccatcttaaaaaaaaaaaaaaagccctggggaattctgtctttagggggtgtcctcgtggtctcaatgctccacagaagagctttagagctggatagccatgggttcagagcccaactctaccacttgttcccaatccagagagttgcctgaagtctgaccgtcaatttccttttttttttttatgggtacatagtagatgtatatatttatggggtacaggagatatttttatataggcatacagtgtgtaatagtcatatcagggtaaatgggatatccatcacctcaagcatttatcatatctttgtgttgcaaacatctcggttataccctttttcttgtttttaaatgtacaagaaattattgttgactgaaatcaccccattgtgccatcagatgccactcttattcagcctatcttgaccttcagtttctttatctgcagaatgcccagtagtgtttgtaaggcttaagtagagacgatttacataaagtagctggcagatgataggtactcaataaataatacttgttattaatgcatttataacttatttttagttctattttcattactaaatagtccccttcttttccagaaaaattagaaaagtcagaagagcaataatgaaatggacattttgctgttatttctattaactaacaacagtgagttcgttgggtaattttacagagattcaaaaag

SEQ ID NO: 5490 - DNA, 1165 bp, Homo sapiens
aaaaagaaaatcatcagtctctcaaagtaaacatgcatgctatataaattaactcagtatgctctgtttggctctaaggagctcctgctattgaactttgtttttgacaggtggtatgcattgggtcagtggcggaacttgaagaactgtcaggagcaaagatctcagatctccacagagagaggtcagtttctaaatgttcgattcacttcagttttacgattctcctattaagacctggtctctagcagattacagagccacacatggaagtgactagcttgctgaattactttgctgatgactcatgtcatattgcagtattgtggcctctgtccttgtgaaatgtgaggtgaatggtgcataacctttcagatggaggattcatggtgctctctgaaagcctttgagaattgctgatatttctgtttgcaaatgtgtataatatcttgtcagggttttgtgtttcctattagcaattaaactgcaagttctgttatgcttacagttaatagaaatgactacttttctgtttgttagtgttgaccacctgaccattccttcacgctgtgggaagggatccttgcaccgcatctctgaagtgtttgactgttggtttgagagtggcagcatgccctatgctcaggttcattacccgtttgaaaacaagagggagtttgaggatgcttttcctgcagatttcattgccgagggcatcgaccaaaccagaggatggtatgcctccttgttctttcatcacgtgttttattgattttattttatttagggagtattttactaagtcactgccatttatctactgggtgatggagagattgtggcaaataagacaggctacattcctgccctctcccctccaccaccaagcacggacattaaagtgccttttgagtaggactctcccactacaatagggctgtagttttacaatttcaatgatctcactggcattttggaatatatgtgttacactggatgttaaaatgataaaaaaagttatgtgttcttagcttacgtcagatcatttactcaaatgtttgagtatttgcataaaagacagtagtttgggtgctagaaatttgagggatagttggtaatgtgctcagatattgaggctagccttataaatcaacattctaaaaaa

SEQ ID NO: 5491 - DNA, 1186 bp, Homo sapiens
aacctaagtcagaggtctgagtgccccctcacttcaaatccttgtgtcaaattaattaggaaatactcaaatgtacacctggagacaaatacaatcaagagcagacttcacacgtactgtgctggtctacttgttatgctctggatggaatctggacttctgggaagaaagttcatgagcctagtattaatctttttgataggcagacatttagctatcacgctactacagtgatctaaccaaaatttgtatgtgaataagtgaggttcccaatgagtcacaagattttgactcataggtaattagagtcagatattgtgaaaggaactatcatacctgaagatgaattacacgtagactttctggtaaattaagaggcacggattccagggcattatggtccaagtagaggaaggtgaggttattcagtttctgtaaggaaaatttcatgtgagtgttattgaggttctgtacattctttcacaggattcaagcaatatatatgtgcatatgagtatatgtctatatatacagacttgcatattgatatgaatacatcaattatatcaattgttcgtatggtagtttcttgtttgggttttttttctgacttcacgtgtagtgtattttgatcctttatgatggccagtggagctctgccgcataccccacacttctgtccattcatctgatctctgaatatccggctctaatgccaacttctggtactctttgtgtttgtcttgataggaactaatgaggtgagtccctatgtgggattgaattttgaccctggtgctgccataacctctcctgtacctctggagtttcccatctcagttccaccaatttctagctaagtggttacttcttagaaatgtgtgtgcttgtatgtttttagtagagacgaggtttcaccatgttggctggtatggtatcgatttcctgacctcgtgatctgcccgcctcagcctcccaaagtgctgggattacaggtgtgagccaccatgcccggcctaaaaaaatacaaaaaattagacaggcgtggtggtgggcgcctgtagtcccagctactcgggaggctgaggcaggagaatgctgtgaacccaggaggcagagcttgcagtgagctgagatcgcaccactgtactacagcctgggcaacagagcgagactctgtctcaaa

SEQ ID NO: 5492 - DNA, 1103 bp, Homo sapiens
acctaagacaagctgtgggaaattccaagggtatctaaactgaaaaccatgagcatgagctcagggtaatgaatgccttcctcaagccacagtgtctaccacccaaatgtttaggaaatgcagggtgatcagtgctaagtcttggcaaatattgtgattgtttcttagtagaaacctacaatggtagtagcaaacatatggctgccatcctgggtccttggcctaagtacagatgtcactaactgacctattttttacattctgcatacagtatatcacctgaaggccaagaaaatgagcatggttttgtggagatcaccttccctgtattgccataacaacattcctactagtttgacaactagtaaccagagtggctccatgaagtagaatgatactctaggaagcgaccatgatgtaacttcagacttttggagagtctgtgaagttacatcatggtcgcttcctagagaatcattcagccattacaccagtattatgacaaaacttatcaaatctgactcccagccaacatggagtaatagggactacgtataccttcccacctgaaacaacttaaaaatagagcaacatatatctgaagcattttccaaacattaaacaaagagcagtccaggccagtgatccctgaaaggggatgcaaatcaaatgcccggagagacctgtgattgacctgcttactccctcaagggagttgcagtgaggggaacacaggcagagtccagcagtctccataagttgaaaagatacagctggaaatctgaggacaccaaagagactagtgttcctagggcagagtacagagaggtgagagctagcccagaggaacccttccagagatgtgaagtcttccactgagtactggatagcacatgtatgtaagtaaactattaatacttgagactgggaaaagaactaacctaaaggacaaaggggaaaacaaagcaaaacaaaacaaaaaaaacaggtctctggagcttaaaaaagaccaggaagagtttgtgttccaccagtcagagtggaaaaccttacaattcacagggcatctggtagagtactcagaagagcattagctcagtaga

SEQ ID NO: 5493 - DNA, 1125 bp, Homo sapiens
ctcttctcttgcccgggtttattgggcatctgtcatagaatgccgtggggccaagacatcatggagtatttttagtttccaaaactgctgtttccaaaactgggaggagcacacacagctggctcctcccagtacccacttccattgtcctgcctgtctggaggcactcccatgggatcactttgggctgcttcgggtcagctgtgagccatctctgcctcttcctcctccttcagccccagtaacgtttctgatgttcccatagcagagtcgtctcccaggagtatgctaggctatgacagagatggaaggcaggtggcctcagactcccatgtggtccccagcgtcccccaggtaagggcgacttgacgaccccctggctggttggcagggtttgctctgtgctgatgttcacatgaaacctcttcatctccgcttgtttcccaaggatgtacctgcttttgtgagacctgcacgtgtggagcccacagacagggatggtggagaagctggagaaagctcggcagagcccccgccgagtgacatgggcacagtggggggccaggctagccacccccagacactcggcgctcgagctttggggtcccctcggaaacgtccagagcagcaggatgtcagctcaccagccaagactgtgggccgtttctcggtggtcagcactcaggacgagtggaccctggcctccccccacagcctgagatactctgccccacccgacgtctacctggacgaggccccctccagccccgacgtgaagctggcagtgcggcgggcgcagacggcctcctccatcgaggtcggcgtgggcgagcccgtgtccagcgactctggggacgagggccctcgggcgagacccccggtgcagaagcaggcgtccctgcccgtgagtggcagcgtggctggcgacttcgtgaagaaggccaccgccttcctgcagaggccttctcgggccggctcgctgggccccgagacacccagcagggtgggcatgaaggtccccacgatcagcgtgacctccttccattcccagtcgtcctacatcagcagcgacaatgattcggagctcgaggatgctgacataaagaaggagctgcagagtctgcg

SEQ ID NO: 5494 - DNA, 1184 bp, Homo sapiens
tagagctgaagttggcctttgaaggtggattcaaggacttggtaactgcatttctgcttacagtttcagggagtcctgggctctaatctaaagattctacttgtgcaggccttcatctttgttggttggtgttgaaagaaagggagcgaatggtggctccaggccttctctctgggctgctttgtgcttcgcttgttatgggtgcaggtcctggccttggaattaatcgcaaacaagtcttggacttctcagaagtggtggaagactgtcagatgctcttttcacccaacacagtttaagcagctgagttgtatttcatccactgaaaggaaaatccagttcttgagcttcagaacgtgaacggcttaggaaagtcttagggccaagatcttacaagtggacaatcattgggcactgataagatcttagatggtagctccttgttgaatttctggctcctgcattcagattagcctggtactggttgctcaccatccactgttgacacttacgtttgttttctcaggtccgggcccaccagctggtcttgccaccttgcgacgtagtgatcaaagccgttgctgactatgtacgcaacattcaggacacctctgacttggatgccatagctaaagatgttttccagcattcacaggtaaaaaaaaaaacaaacaaaacaaaaaaacagattcatgggatatgacgttgcatagtggtgtggccaggtttggaagaaggggacttgagggtgcaagctgactggatgggtctgagagctcttgctcaggccactggaagaaagctgcaggttgcaaggccagaggctgaggtagcctggtcatgttccctgccagccaggaagtctcagccacttcacccagcttttccaggctgaataaaagggagattcagttagacggttggtgaggtctcctgctcataagttctcgatcttaacttaataggatctgtatttcagagttttcagaacatgaactgtatcaagtcagtcatatggcattataaatctctgatttgtctgttttcttcaggtgattgtcagggattttcttcttttttggggaagtaggtgtgccaacaagttggcatcagtagaataggcaaggctctgtgaaactcctgctgtgtctctagagagctgaaatgcagccaggcacggtggc

SEQ ID NO: 5495 - DNA, 1089 bp, Homo sapiens
aaaattagccaggcgtggtggtgggcgcctgtaatgccagctactcgggatgctgaggcaggagaatcgcttgaaaccgtaaggcagaggctgcagtgagcggagatcatgccaccgcactccagcctgggtgaaagagcgaaactccgtctcagaagaaaaagagagagctgaaaccctgggcaggaacatccccagtctgtcactgccatccgttcccttggtacagatggcttgagattcctctctgggcaggaccagagaccgagcagagtggaagtcagggaagtcctagagctagaacccagggccctgactaccactttggagttctgctcttgtgactacattgctttaaaagaattcacgtttggtttgattcttttgtagtaatctattgattttccctgaaagttttaatgtcattcaaaattcttctctaacttgaaaagctgtagaatattatacatgtgctgaattataaaaaacattgtgatacacatgaccagtggcacactaatttatgaaggttttcctgcctttatttcagtctagaacagatgacaaagttattcgatttaagagagcaattggatattattcagcgactagtaagcctatgtcatttcatccaccacattacttaggtaagtaaataaaagcctgtgatcaatattgaccatatgataatccaagtaggtttaaatattcaccatataatcttgtaggtttatgtttttgaaacatgattttctgtagttatgccagtaagtatagccaaacttcctgggcagactcagtagcaatccctgaaaatattgaggaggaagagaacttaacagccttcataggatgaagaagaatcagagggcattgtgcagatgaggcagcaggtcgaggggatgttgacgtcttggcagctctgagatatccgcttctaaatacagaattgcctgaggacgtagaagggcctccacaactgcaagtgatttcataaatgcagtgtatttgtagtctctcttttcttgacccctgcctttttttttttttaattcttttttgttgttgagcagagtattgcactgtcgc

SEQ ID NO: 5496 - DNA, 1614 bp, Homo sapiens
ctttggttctggtgtttattcaactaaagtgaaccacttgttacttataaaatgcatacccagatttccctattgggttgttacctcagtgcagttgatgagattttaacattctactgtgcaatatggattgtttttgttttatttccttgtcattgttttttccttaatttattgggaaatcaatcaagtgggaaaatgtgcatgtttatgtatttgtaagaattgattgactaatagtgaaacatctgtggataaaaggtattgtttccatgttacatcaacttagaacttcttgtcttttttgaggcgaaatgttggataactttacactctgtctgaagtcttgctgaatagaattactgtgtgctggcatcatctgggacttcaaaacttggaatatttgcatctacttgtgttttactggccagtcttaaaaatagagtttaacagttacatttgttgaagtgggaggttcagtaaagtggctactgcatgcaaattatttctcaaatctaatttatgagggtatttatccatgtagaaagggattagctatccaaattggattttgcatgttaaaataattagataaccacatacttccgtgaattacactgttataactaaaactatttgtagatataaaatattaaaatggattttgtctaacatcttgatttatgcatactagttatatgagaaaatcaagtcatgatttgattggatgaaacttatttgtggcctaactgaaaatctgaatgagccattaattgcacagaatagagggacaaacaaaatacccacaaggacttgatgattggtagttttgctaaggagagaatgcattgttacctgagaggcgaatctttagaccagttactagagctgcttgtttttgttaagactgaaagcaggtgaatgatgcatgaatgtgtcttctctggcttttttttcctgtagtttcaccagtgatcattaaagaatgggcagcttacaaaggaaagtctcctcaaaccccggaactggttgaagctcttgccttcagggagtggacctgccccaacctgaagaggctgtggttgggtaaggcggtagaggacaagaaccgcaggatgagggccttcctggcctgcatgaggtcggacaccccagccatgctcaaccctgccaacgtgcccactcacctcatggtgctctgctgcgtcttacggtgggtgccatgcatgggagctgggacctgggtccccgccaggtgtaggggccatgaccatggtgtcagatgagttctagaaaggatgtaaagtttattcctgatcaatcatgttgaaatttattgtcatcccatatttatatatgtgatagaaatgtaggttatgtaaatgcaaaatatattttaatttatatgatacagtatgtttataggtatattttgtaagcatgtatggtatgtaaatattatataatgattttaaacatggtttattatttaaatattgaagattttgaaggctataagaggggattcttgttatatattatttggagttcttctgtagggaaaatgtgccacttcttcccccttcatttatttaatcatttacagtcacacat

SEQ ID NO: 5497 - DNA, 1176 bp, Homo sapiens
actgaagatggaagaggagcagaagctagagaagtcgcctctagctggaaacaaagacaataagttctctttttctttctccaacaagaaactcctcgggtatgtgagtgcctggatgggaggggtgacctcgcgcataaccgacatcacacacaccatacatactgcatcacacccactgccttataccacacacacattacacacacactatgcatgcactctgcatctcacacacaccacacactgcatcacacacaaccatacacactgcacatcacgtaccccataaacacacagcctttggctgacacacctctggggactcctctccctctgagctgctgacctcactgattgcagccctgttcctggcacgtcttcatcaggcctagacaccagcagagccacatccctgcctcccaccacgctccacctgtagtgtgggtgtgaggaagcagacatgcctgggtgggactgggctggaagatacagccagcctgcaatgagggatggccccccaggtagggagggaggccgtgggactccatgagtgttagatgtttggctcttgtgagctggtgctgaggacgtgcatgggggacagggtcctggctctcagagcccggtggccagtggggagggcctggtgtgaacccaacatgggaccctgggtgctgagaacgtgacccacctgggagtcaggagggcctcctggagacggcactgagcagagattagggggtgtgtttgggtggtgtgggcatgctggatgagcctcggggtgaggcaaggggtgcggagggctgtgagcccggtggcaacctcgagagcctcatggttccagcggcaacacttgggcctgtgtgtgctcccggtgcgtgggacatgtcacctgctgaggccccaggcctggccggagtcagacaggtcccagcaggaggggcggccacttttctgcagcagccactgactaacttggccaggttgtagtttcctcattgaagagatgagaggagaaggcctctttctgggtggtggagaaagggagcagtgcccaggcagagtcttgtgagtgtcagggagctcagggcaacacgcgaggccattcagccaaggggcaggtctgcggggtcctgtggctgcccagcttcatggccctgggcgtgtcacttg

SEQ ID NO: 5498 - DNA, 1204 bp, Homo sapiens
cattaagaaaagtgttgtcagtaatagaagagacttctaatggtatgtgtttaataaagcaatgtaatttataaaatacttagaaaaatattaatgttttatacttttttcccaaggtaggaatttttattttcctgcatttcatacacaacagtataattcagttattttaattttataataggttgctgttagagccagatctgtctttgcaggagagatttttttaaaatgtgagtaaaacaaagagccatcagcaacacttgtgtggctttgatttgatgtactttttaacactccacgctgatttctggagtcttgtactaaaattgcttagggttaaggagctattttatacaatcttcattttacgactccttcattaacacacactcgagtaattttctagtgtctaacactaattttcagctatttaaatccatggtttatcatctcctaactatgatgaagaccagaatctggagaaaaaagggaatctgcattgtttggaatatctttaaataagaaatcctagagaatggttctggattttacatgtagaaacgttaatcaacagcaataaactctgtgctgacgacatatttaaaacaaatgaggacttaggaaaaaacaggaaatttgaccaaacgactctcctagtaacaggttttgtgtgtctttgttaagagcatcgcagcttgttttaattctttttttacttcctttccaaaatttgatgttaagtttcttcacagttttatatacagcttttatttaataaccactcttcacttcaaacgaactgatttctgtaacaggaattacaaatgaaaggaatctgtaatgaaattgaaatgctgcatttcagtccataggcatattggtgttataaattgctgattagtgagtcttttgctaggctagggcttaaactgctttcaagcccacttttaattggtaacattacttggcattttgtagggtggaaatgccttttgcttaccattcttagccttatttttatattcttaatttaaacttgaccctttgttgtcactgtaatgcaagaaaccattcctgtttaatcttggacagctgcatatgtttagagactatatgcataggttctcacagaaatctgacctaaaacagacagatgttggaactcttatgtaaaaatctattctaaacaatctgggctact

SEQ ID NO: 5499 - DNA, 1210 bp, Homo sapiens
cccttcaatttgctgtgacagcatggatgatgagaatccacaggtacggggcgggagtgctgggttcacagtagacattcagagggcatgaactagcagccttgcattagctgtgggtttcaactcctggtagaccagtttcctgaggtgtgaaccacaagcacaccgcctcaggtgaacctcacgtgtcttctgtacctcagtctcctctttggaggaagtgctcagccgccagttcctggcaaaatcatcacagcagcggcagtgaggaggagagagaagatgggaaatgagccgacaataatgtgtcccagaaataggcagaaagcaacttgggttcccagactttctcctgaatcccagaatttagaacaacaggttattttgtcatcttgggaaaatgccacttctttccgagcaaacacctgcaagttgccagaggctgcatgagcacatgatagaaaactgaagtcttgtagggaaaatgctgcaatcacagaattgagaatacttgataagacagtatgcaggaggctttatgtcactgtagtcacgatgtgcttttagcacagagaaatccagctggttttataggggaatgactagtagacttcttatagcacatattatgcagtattatcaatataattttaaggcctattaagatactcaatctcagtggtgtctagaagaattctacatttaatggtcagtcaagaaaactgaaactgattattttgcaaatttcagagaaagtatatttttcaaattatatgaactacgatatgtttgcttcttttatatctataatagcagttgccataatgtggtatactatttgggctgctaataattttgctgtcatttttgtccagtagttaaacttgtattttctaagtgactaaacatcttgtcaaggatccttaaagacatgtggaataggttctgcggcctcacttgaggcagcacccaaaatgcctgagtcatcacagtcacttccgttcatccaagcacctggccccctccataggctcttcaaattgctctactgctcagcagaatcacaagacagggagagggtttattaaaatcttttcatttttagcttaatttcctttatttttggcatctaaggctttgtgctcaaatgagtttgctggggttgccataactaagtaccacagactgggtggcttaaacaacagagatt

SEQ ID NO: 5500 - DNA, 1146 bp, Homo sapiens
acagtatttgtcatgccagtttataacaaaaaaaaatgcagggattttatttctattggaaacattacagctatgttttacttttggacagaatttttatttgtatagagtgcttactaatgttaaatagttcagagtatataacatttacattaaggactcatggtaggttttagggtaaggagtttaaaggaaataaatattcaaactgggtctcattgccaattttggtggaaatgagtttgtgtcatttcaattacaaagataaaagtatgccatataatttatttatatgaagatttatttttgtagtgtacatagtagtcatcaagtcttttgacagaagtatatttttaaagaatttatatgtgatgaatccataatgtctggaactttgctgagacatgagtgggcacagttttcattgtaaattacagcaaggaaagaaaatgtttaacagtgttaagagagtcagagcagagtggatattcatgcgattatgaagtgtttattagttaccattggcgacctagcatgcttctcatttcaaaccttggaaggtgaaaatgtacaaactctctaaataattaatgttcaaacactgatagaaattctaacatgaataaaaaataatataacttgttggttatatctttgtttgtagaatgctttttttctttaaaatacttgggagagacagttagtgttggagccatcagaaactgttgtttcatcttgctgaccttgtgacactcttcttttttgctctatctgatggagagagttttaggttttcctcctttttgttttgtataaatagtgggtataagcatagctctgttacatggatgtattacaaagtgggggctgagcttttagtgtgatcatcacccaaatagtgtacattgtacccattaattaatttcttatcacctgaccctatttttgttttctcataccaagaaacttcctaagttaaccatcaaaattagtccttctgtcatctctcttagcatacttatttcccttatgtgatgcctaataatgagggaacataaataaagccaaattcaaagatgattatcatcagtgaaggtgtcatacttctaaacagtgtcaaagataatatggaattgattgaacctg

SEQ ID NO: 5501 - DNA, 1198 bp, Homo sapiens
aacaggatatgtcatggtagttaagagttttagaattaggcagacctgggttcaaatacttactttgctacttaatagcagtatgaccttgagtgtgttgcttaatatctctgtacctcagtttcctcatctgtgtttctgggtaaagtccctgaattaatttctgtaaactacttctaaaggccttggcacacagtaagtgctcaataattgttatgttattattaatactattactacttctgccacaaaaattgtcacgttaatctttgagtatctcatcacagtccacactacatcattcttctatgccgtggttcctgaggaatcagatttgatagaaaactccttaataattgagcaagatttattgaaagatataaataattcagtattctctagttgcattatttaacctagcttctgttaattttaataatacgtaagcaaatgaattttaattttatttgtgttaattttatattcagttttataaaattgtattttagcttcagaataagaattatcacccttcccccatgtctacagcaataccactctgaacacaccacatctcgtctgatcttggaagctaagcagggtcggacctggttagtacttggattagaggaatagctcccagagttgctttgtgtgtagtgacttagcagttggacactgctttccattttattattttggcatcatttgcttaaaaaagacttattaaatgaaatattatttattggattgtaggaaatgctaagttcttatgtactttccctggactctgcataatagcataactcagttctctgacatctttcactaccaaaatgaatttttgaaccattatttcacctttcataattttgaagaccaatgtttgtaagaaatatcaagaattatgttgccaccttaatttttaaacatcttctggaatcttagggctgatgccaggactctttagattcattggcacctttgatgaatggcctctcaagtggaaaactactaagactgctcagatgcaatttgcacctagcattgtcatctcgtaatatacaaaaaaatcaaagggagacactgtaattggacttagtaattggaggcctaatttcatatttgaaagttaaaaatggaaatcataggattaaccttcacccaaaggacggacatacttgagatgaatcaagta

SEQ ID NO: 5502 - DNA, 1201 bp, Homo sapiens
aggaaagccatgactcactgccatgccattccttaggccttgtagtccctagcctgcctatcttctctgtacctttcagagttttacgtttatttcctatgtaatatccagagttttagctgcacttagtggaagaataagatgtgcatctattcctgaattgagttttttaatgtatgcattactttatttagctagaatgtactaacactttttaaaaattatattaggaaaatcttgcagaagtagtatttgagtatcaaaaaaaagtaaaaaccagcacaaactatttacgtgggctctaatgaccagttttttagggattttctagagtggtagaaataaaattgtgccttaaatatttaatttgtggcatatttgtattttaatcaccaccttactttgatgaaattaatgcaatatcgtactgttttggctatagaaacctggcacagttgagttatagcacaacagttagtttttgctgttctaatgtgctttttttttttctctttcctccagggctggtggactaggcctcaattttgtcggtgccaatgttgttgtattatttgatcctacttggaatccagccaatgatcttcaagccattgacaggtataatactgacaaaatttaaagtgatctgcaaatacttttaatctaaaaatactcttgaacttttaaggttgcttatactatgactatgattagaagaaagggggaaactggtaaaaacgtacatttaatataatcctgaccttctcaatccaaataacagtccaaaaatagccatttttcatccatctcagaatcctattaatatgacagaaatgacttaagaagaaagaataaattcctaatactgtaggaaaataggatagttctgtactagtagatcagaagttttgagaaactcctggaagatagaaagcaagtagaatctgtgatcagggtatccgcagagaaatactacaatccaaagtctgcaggaaagagtacagaaattttaagcatgggcttgcaactacagtatgtgggagtagacagagtgcatcattctgggaaattgataatgtcctgactctaatacaaattcccctctgacaccctactttacagagagattggccgtaacaggtactctttgattaaagctgaaagaataattttacacattttataaacaaatggggaatct

SEQ ID NO: 5503 - DNA, 1192 bp, Homo sapiens
agtggctcacacctgtaatctcagcactttgggaggctgaggtgggaggattgcttgaagcaaggagtttgaggccatactgggcgacacaatgagaccctgtctttacaacaaaataaaaataaaaattagctgggccttgtggtgcatgctagtagtcctagctacttgggaggctgaggtgggaggattgcttgagccaaggttgaggctacagtgagctatgattgtgccactgcactccagtgtgggtgacagagcaagaccctgtacccaaaaaagaaaagaaaaggaaagaaaaaggaaggccgggtgcagtggcttatgcttcatgcctataatttcatcactttgggaagccaaggtaggaggatcacctgacactgggatttcaagatccgcctgggcaacatagtgagaccttgtttttactaaataaataaataatttaatgtaaagaaaaaagaagaaagatttgaaaccaataacctaaacttccaccttccaacattagagaaagaagagctaaacctacaagaagcagaaaaagaaaataataaagattagaggctggtccgatggtagtaggttatcagaacttattaacattagtgccactgaagctggtctactatcccctgctcttaaatctgactggctttacaattttgtagattaatggctgcctagaattggggactgggagtgctggaggtcatggttaaagagtttcgagttctttttgaggtgattaaaatgttctgaaattgactgtgatgatacatgcttctgttcacagatacacatatctgtgaatatacttaagccccctgaattgtacacttgaaatgagtgaattgtaccatatgtgggcattggagggcatccatagtttggatgtcccctccaaatctcatgttgaaatgtgatctccagcgttggaggtggggcctggtgggaggtgactggatcaaggggtggaccccttacaaatggcttagtggcatccccttgttggtgagtgagttctcacttagttcacatgagatctggttggttgaatgagtctgggtcccctccttctctccctctctctctcttttttttttttttttgagacaaagtctcactctgctgtagcccaggctggagtgcagtggcgtgatctcagctcaccacaacctccgcctcc

SEQ ID NO: 5504 - DNA, 1178 bp, Homo sapiens
ttaaaaacttaagaaatgtataatttaaaaatttaaaactttgatattattaattgcttattgttgaatgaatccttgtgaaaattattgattgtaatgttagtgccatggatatgtcctttgtcccagcacctatctcattgtcctaacaaggttactgaaggttctctttccactgctttaaaagccagctgatacatactacattctttctttttcatatagttgaacttttactgcaccaggataaatttttaaatatttagtgatagtatacatagtaaatatagagatattgctatgcattttcaattcttttctgatcattaccataagtttttattagaatgaaaattggaatagttcctttaggaaaacaggcaaaatatataaatgtcaaaaaaagaaaatatatacttagaaaacatagatgattagaatttttaaaaacaaatgttagtcttttcctccagtatctattaaagtgtttttcagtgtcaacagtaaaattttataccttgattcatatatactgcactagtttactgttgccattaatcttttttcttgctaatcaaaacttatcattgccatataaaataacctgttagaaagtatcaaccgtgtgtgtgtgagtgtatgtgtgttactaaaaagagtgtcataaaatactgtgctgagaggttcctaatttggttcctgatttcagaagcataccacataagatttaagcaagctcatctctaggagatgcataatttgtggataacggttttcttagttgggattgtgtgtacttcaggtattatgtaatgctgaacagcttacttgctttttctttttttccccccagagataaactgaggatcacaaatattattcttttatgttaataatggtttccattttctagtatttgttacattttacggctttattcacaaagctgtttatgtatttttgtggcagctctaagttaaaaggcacacttgtaacattacagtcccaattttccctttatcaactttatattataaaattttccaacacatagtcaataagcatgtccatattctagaagtagatattcttaacattttgccatacttcccatttctaattattttttaaaaagaacttacaaacgggccgggagtggtagctcacgcctgtatacc

SEQ ID NO: 5505 - DNA, 1220 bp, Homo sapiens
ctgagatggcaagaccagccccttgtcttcctcagcctgctcaacgtgaagatgatgaggatgaagacctttatgatgatccacttctacttattaaatagtaaatatatttttttcttatgattttattttcttttctctagcttcataagaatatagcatatgggctgggcgcagtggctcacgcctgtaatcccagcactttgggaggctgaggcgggcggatcacaaggtcaggagattgagaccatcctggctaacacagtgaaaccctgtctctactaaaaacacaaaaacttagccaggcgtggtggtacatggctgtagtcccagctacttgggaggctgagacaggagaatcgcttgaacctgggaggtggaggtttcagtgagccaagattgtgccactgcactccagcctgggtgatggagcgaggctctgtctcaaaaaagaaaaaaaatatatagcatataacatacaaaatgagtttatcaactgtttgttattggtaagtcagcagtgggctattggtggttaagttttgggggagtcaaaagttacatgcaaattttttactgtgcggggtgtcagcatccctaaccccatgttgttcaagggtcaactgtagtttaaaatgactcctgtctcaaaaaaccaaaggataacctttaagggattggtaactttgactcaaaactgctttgtaatcttttcacaatgtactgaaaagtgtggctagttatgtttgatccacattctagagaaatttgtaggttttaatttcttttctcttggtcctctcttcatgtataatggttgcttttaacagctgttcgctgatgtggtcctgctctgtcccagtctagcagctttagtgtatggaaaaattgaactaggaattgagttttgaagaaataaaggtgtaagagcaaacattcaacagttgctgtccccagtaatgaagttcatacagacaaaagatggcatgtcactgtacatcataccttgcaataaatattctgttaaattgtgctggtgcaatttaacatgcttttgtcaaagtaaacatactgttttcctaatttataactgtacttgaaaatgaaagatgaggaagggaccttgccaacctatgtagagcaggtttagctgttagtgatttctggataccaggattgtcttaaactggtaagggtgtagagggtgaatagaagcatcc

SEQ ID NO: 5506 - DNA, 1326 bp, Homo sapiens
aggaaacctggggtgggtgcaggtcctacgcagtactgaaggcctaattgaagctggagacaaaacagtggtttaccacgttccaacctcctagttccattggcctagaatttcacaatgctggaagctattaactaaggactgcctttcatggaaatttataacaattttcagtgtaagcagtcttgttactgatatattcagggactgcttatactttttacagacgaaaaaattctcctaaatccttttttaaatgaaaatgttattttataccaatctaaaacttgtattcagtttaacatcttggttttgcaaaagaggtggtctgtattcatggaaacccaatgctgcttctgaggtaaatttaaaagacaactagctgcgagagacaagatacttctaaatactttatggtaggacagtaagtattgactcatggtgccccttgttaacaggaggaaaaaaaattacaaggaaaagacacaatgacaatatgatgctttggtcttctttagtcctccataaactaaagcagagtaacagagaactgagtctcccgaactctcttgagagatgactccagagtcataaatataaccacaggcccacaatgtacaatgtccacaaacttgggacccccataagagatttcttacctacctcttttgggaggaaagtacatagtaataaataatgaaaatgaatttattttcctttttttagaagggtaacctctaccagtatggaataagagaaagctggtataactaaagaaatgccttatctctaccttatttatagagtagacatgcaaacccaaaacgttctgtacatttgaaccagctgaacgttcccatctaatattaaggcctgtgcatcctgaagttttgaaatcaaaacatttctatattctgtaactgatttctgtaatgtgtaacagtcctctctttcagactccttaagatgcctgttcactactttatccttcaaggctctccttgctactgaagagaggaaggactggtgtagggcactgaaaagattaaaaggccaaattcaaaagaactctccaaatactctctatcggtcctttgaatattttgatacagagttttgataccagttaaaaaaactgaacagcagtttctgccttgtatctaacaaggcagaacaatttgaattcactaacaagaaaacactttcttgtctttcaccttatttttatctatctatctatctatctatctatacacaccttatactatttaaactgtaaaattctttttggtagtaagatcaattctcaaactgctaaagtagaag

SEQ ID NO: 5507 - DNA, 1297 bp, Homo sapiens
ccttggcctcccaaagtgctgggattataggcatgagccagtgggcctgaccagctcaggttaataataagcactttaataattgctagatttgtaaaaagaaacatttggaagacaacaccttaaaatcgaggaaactggattaacttttcctgggtgagttgaggtgctgctgtgcattttgcttttcttggttctgtggtcaccacttatacttgctattagtcacctatattaatctgatcaagtttacattgttttatctcctaactgtcaaaaactttgttgttgttgcctccattggcaataatctaagcaaaatgcctttccactgtcctaaagtcaatttttgttactgtacagaggaggaagaaggtgggaaaggtgaaaagaggaagagagaaacagatgatgaaggagaagatgattaagaccccagatgacctgcagaaacagaactgttcagtattggttggactgctcatggattttgtagctgtttaaaaaaaaaaaaaaggtagctgtgatacaaaccccaggacacccacccacccaaagagccaaagaatagttcctgtgacattccgccttccttccatgtagtccctcttggtaatctaccaccaagcttgtggacttcaccccaacaaaattgtaagcgttgttaggtttttgtgtaagattcttgctgtagcgtggatagctgtgattggtgagtcaaccgtctgtggctaccagttacactgagattgtaacagcatttttactttctgtacaacaaaaaagctttgtaaataaaatcttaacattttgggtctgttttttcatgctttgctttttaattattattattattttttttacattaggacattttatgtgacaactgccaaaaaagtatttttaagaatttaagcgaaataaacagttactctttggtaaagcctagttgtatgcttacatttttaaattatactctcattgtaagctcatgttaaaacaccaaagaactggtttatttggcatttttatattagtagttgttgaggggaattgcacaagtgtgtaggatctttgagcatttagatcaaatcctcattgataactgggagtaaatgaagcatactttaaaaaataacgttcaaaatggaatactctggggccctgaaaaccagtaaaatgttaggttcaagtattatgtgaattaagggaaagaagatagtgtaaagcaaaaggccttcaccagaatcccaagagatctgaattctagttctggctctgccactgattttctgtg

SEQ ID NO: 5508 - DNA, 1143 bp, Homo sapiens
ccaaggcttttcatcctaggaagtttgtgtgctggttcacaagaggtccctggcaccctttctggggatgtttggatgcggctggtaggcagggaagagaaagggcaccccagcgggggcatgtgtggaggcagcacggaacatgtaggttatagatcgtcagggaggaggggtcagttgggtgcttgtttttctgatttttggtccttgatcacccccttcccttcccacacgtgtccccagcctgcctgtggctgttccccccacaagaagcacctcccttgcttggcaaccttcaccagcatttcccaaaagtatgctcctgggaaccctagttccacaggataataggtttttcataaagaaacgtagggtgtgtatgtgaaagtggggtgaggttccctggttgagtaggtttggcagacactaaagcgagctacacgatcatctttgctacaggcctctcacaaccttcagcatgccagcatgggtcaggcctcttcacagggccaagaaactcatagcatctcccacattactctcatcacttctccaaggtgcttttgcaagactggaattccttggacaccattggagaagccccgctttttctggaacagcggcaaccaagaggccttgcagccctggaagtgggtcagggcccttggtggtcacctttttctccccagcagctctgcagaggtggcctgcttggcagtgggacatcaggggaccggtcctgctttgagatggcagggtccctgttctgagagctctccagcctgagggcattgagctgaggctccaccctgagctctcctgcagggtggagggcattgtttcccagcacccaggcagtgtcttgctggtgtgtcgtgagtgctggatgtccaagtccctgctggccacggagggctcctgcctctcttcttcagcgccacaaaattacatggaggccagctggttttgtgaggagattgtttattttttaattcttttgtttaccgaacgtttactgagcatctaccctgtgccagccctactcgtacgctctgtctccaaagatgaaaaaggacttctctgccctcaagggaaccccacagtatcttagaggagacaatcatgtcggtgagatggtgtggt

SEQ ID NO: 5509 - DNA, 1179 bp, Homo sapiens
ctgctataaatacaaaaattagctgggcatgatggtgcatgcctatagtcccagctactcaggaggctgaggcaggagaattgcttgaacccgggaggtggaggttgcagtgagtcaagatggcaccactgcactccaatctgggcgacagagtgagactctgtctcaaaaaaaagaaagttttaatatttcaagagacaagttctcactctgttgcccagattagagtgcaagtggcatgatcatagctcactgcagctttgaactcttgggctcaggagatcctccctccttggactccaaagtagctagcactacatgccattttccatagcggctgtgccattttactctgaaactctgaaaggttttatgttgctcatgttggaagtatcctcatgtatatatcttcagtcatagtattttagtattcagcagtattactggttgtgggtagggtctgatgtggttttaggcagaaatagaaatctaggctgtagttgaaaacttttcttgtatagatcccctatctcaggtaggtaagagtagcttacttttaatagactttcttcataccagtataggacagatatttgactctggtcactggaagtgtgcttcataactgacaataaacttgccttttaccaaaacagagaaaaacatataaataaaatattgtttgtatttaaaaattttaggtttatttcttccttgtatatgcacattagaggggcctggacatattttttaagaattttaaatattgattagtttcccatgttttttctttttagatattaaaaaactgcactttgttttgtgtaagcaaaatgctaggccttttaaaagttaaatttttaaaaaaaattttccgtaacttaagagcttgttttttatttgacttccagtagagggcactctgttccttagatataacttacattcagttccgttaaatcaccccttgaatgtttcttgaaattgattctccttggaagatgcatttaatgtcttcatcaacatctgttcacttatgtttaataacttttgtcaaggattattttaaaatcttggggtttttttgcttttatctttttgtggcgatgagtggcgagaattgggaaaatatattaattttacaaatactgataatacagactcatatttaaatgattg

SEQ ID NO: 5510 - DNA, 1218 bp, Homo sapiens
gcattttttttttaatttaaatttaaatttttttcatttttttgaaaggtttttttgtttttttttgttgttgttgttgttgttgtttttgagacagtcttgctctgtcacccaggctggtagtgcagtggcatgatctctgcaacctctacctcccaggttcaagcaattcttgtgccgcagcctcccaagtaactgggactacaggtgcacgctaccacacctggctgattttttatgttttagtagagacagggtttcaaccatgttgcccaggttggtctcaaactcctgagctcaggcaatccacccgccttggcctcccaaagtgctaggattacaggtgtgagccaccacacccagctattttttctttcgttttttaattttaaagttggcggcggggcggggggggtctcaatttgttaccctggctggtctcgaactcccggacttaagtgatcctctggctccaagcccactaccagtctcaggtttctttactaaaagatcactacttttttttctcttatctgctgccatgtgagatgtggctttcaccttcctccatgattgtgaggccttcccagccacgtggaactgtaagtccaataaacctcttttgtaaattaaaaaaaaaaaaaatcactatttaaatactaggatggattgtgactgttgaggagtacttacatatcctacatttgactacaatccttccaaaccaagtattctatccaaaggaacatactgctatcatggagaccaaggagggactgtttaaggttgccaaggtgaagcgagctgaaaggctttgtcctcgtgccagcaactctgaaatctctcttaattcctgctgtccaggcagcagaatgccatggtttccccaagtaggtagctgctttagcaattaaagcccaaatgtctgttctgttgatcagaggtctctgaatttctgaaatggtgtttcgtttctggtgactgagttaatcctttacaatccctcttgtaaagtgtgctaatagaaagaatccacctttcaaagctgcagaaccagaccgtgccctaaattgaccaacgtaactgatgtgcctcgggaagtctcttgccagctgtccctgtgaagacccccctcctcccccccagctgctgccttgcacactgaagcatctcagactgcaaagccatgtagtcatcaagtcagtaaatcccagggct

SEQ ID NO: 5511 - DNA, 1197 bp, Homo sapiens
ccagctcacatgtcactttactcacttcccagaattgtaatcttcgtttcgaactgctctcgcacggcagctatacttctcagtacctgcttttgtaccattatgtgcgttttttctctttttataaaaaatctctttcagggaacgcatagttcttgaggtcaggatattattgttttatttttatatctccagtaagtcacagtgtgacttgcactgtggttgctcgataaatgttaggtgaatgacatcaatttacagaaataaatccaactctgagcgtctccccttgaggaccgtgttttgttcatctgcacgctctccaggtcctgcactgcgcccaggaccaagaagacgctggacccttactaggagaaccgaggcaagagccggctggagccgcggggaacccgctcgccccgcccacccgcctagcgccggtgagcctgcggctcccgcgaagcgcggccccgccccctcggcgccagggcgcacgcgcggagctggagccggcgcggaggagcgggcggccgcggctgtgccctctcctactcctcaccgcgcgagcgcggggaaccagtagccgcggctgcttcggttgccgcggtcggtggtcgttatggattctccatgggacgagttggctctggccttctcccgcacgtccatgtttcccttttttgacatcgcgcactatctagtgtcagtgatggcggtgaaacgtcagccgggtgagtgcggggcgccgcgggccggacccctcagagtgctcctgacggcgaggaccgtctaagtcgggtgggtcgggtgggtcgggtgggcggctgagtggccgctagcccagacagttcgatggtagagttggaggggcgccaagggccggttggtctgacttactgagtgcagatggggaaacagcgtgggggaggacggaggctctagtactcctcaaaggaggcgtgacctggggtccgcgaggccgtagcctgggcgagcagggccgaccttgccaaccgcccgcagaagtcccaggactgacagaagctgccgcagcgtttcggaaccacagatatccgcgccagcccagggcttgggcggcctcctcgcggtaccgccactcgctcgcagtgtcgccactcgctcgcagtgtcgccactcgctcgcagtgtttgaaagtcatgtgaggagacagcaggt

SEQ ID NO: 5512 - DNA, 1257 bp, Homo sapiens
gttgatattttatcttacttcctttgaatactaaatgcatttttgtgaaagtggttattctactcatttggcaccccaaaatatggtaccttgtattatttttaatgagttgtgttattttccattaagtagaatctcatggagaacagagattttaccagaatctagcttagattgcttcccctgcagattacattaataatgcattttgattttttttccttttgtttctctctcttgagaaacagaaatcatttgtatttaaattcaaaattaaacttttttcccccagataaccatgatgactacacagacttctactatgacatttgctccttttgaggatacattgagttggatgctatttggctggcagcagccgttttcatcatgtgagaagaaaagtgaagcaaagtcaccttccaatggcgttgggtcattggcctcaaagccggtagatgttgcctcagataatgttaaaaagaaacatactaagaagaatgaataaatttacgtgatgagctctacaaggccaaaaattttttttcttatctacctgttatattgtgctaatttttctatgtatgtgatgtgaaatgaagactatatatatggaatggaggtgacagaaagaaagaaattctttgtttgagggagacttcccctttctggattgtatttgtagagtgttacgagtgtatcatgtgattatgctttaccggtataagagattctgttgtgattatttgaatagttttatattaataaaagaagacaaaattttttaaatgttagaaaaagcagatctgtcattgcaaagtaacaaaaattttaagcttttaaaaatgtagatttttcatatttttaaaatttgaatctatttgagctttagttcagcagaattaaatttttacttgacattatcattaaaattgctaggtatggagaacaattcctattttattttgaacactgagaagagtaaacttttcctaaaacactttatattataaatgaaaataaattgctagtttatattttagatataaacatcatattttttattaatacctacatcaaatggaaaatatctgaaattttttttccatagcaggtattttctactagaagtagttttactacttttcatttagaacagagtatgagtcttaatctgaagtctttttcatgcccttgttttaaaaaaactactttttttggcctcaaaaaaatcaagggtgtaatttttaataaatt

SEQ ID NO: 5513 - DNA, 1168 bp, Homo sapiens
agaagtacagaaattgactttaagtttatctgatgaacggtagccagcagctcccctctctctgcactttctcctttcttacttctcctttgattttctcttgcatgctacaggtcaaggagacacagcagacaaggacaacaggcaagagggggctctttaatgagggtagggtatgatgggtctgggaaagtcaggaggtagcattccaaacccactgtgtgcttgaaccctacggggtgcatttggtttaaaatcccagtgcaaaattgtatggtatgcaaattatatcttgagagagtccctgcccacctagttttccccaagtgggtttgagtcagtcgcagcccatcctgggctactttcctctttctcaacttccagctgaatgtactgatgccactctacaggtgtccccttgttcctgtcccatccccatccccatggaggctgggagggggcgtctactacaggtacctttcttctccccagggaaggagactcagtttcatcagcctccttgttaaagaaggaaagacagatgcagccctggctgctgggaccttctactgtgacctgagacatgcccccgctcccccatgtattaggacgctctctttagacagaggttttactattcctgagtctcaacaaaactcgatgagtcctagcccctgtaattagtccatctctgttccctcttctaacttcctgttccggtggtgccttgtttgtaaggctggcttcccatgccccagcttcagtctctttggtcagacccccaaatgctaactgtgacccctctcctggctgagcactatctatttttgtttatgtttaaatccccaggatctagctttatgcctggcacacaataggagttaatatttattgaacaaataaattataagcattcaagggaaattagcattgcaggaatgggtggcaatcagttatttgttttcaagtcaggatgatttttaaagtttttattgtttattttcacccaaacctaacctgctaaagaaacatatgactgattttcttagattttacaaggtgccagaggacttaatttgacatacagaaactcttcaaatttctgaacgttaccccggatgctcttgctatatcatcccacatcctgttcggatttctgctgtttaga

SEQ ID NO: 5514 - DNA, 1207 bp, Homo sapiens
tgcttctagtttgttcttccttttttaggttaggtttagtttagttctttgtttagttttagtttaagattaaattattatctatctttgttagcatagatgtttatagctataatattccttctgcgtttatgctatagtagcatcccataagttttagtatgttgtatttttgctttctttcatctcaaaatgttttttaatttcccatttggtttctaatttaattcattcgttatttaggattgtgttaatttccacaagtttatgaatttcccacattttctcctttcgatttctaaattcattccattataatcagagaatatactttcaatacttttcaacttattgaggttcgttttgtggcctaacatggtatttctgaagaatgttctatgtatactgaagaagaatatagtgtagttcttattaagtggtctataaatatctgatagatctagtttgtagtcaagtcttcttccttagctgttttatctattattgaaggtggagctgtagttgtctctattattgttaattgccaatttctacctttaattctcagtttttattttatgtattttgtggctctgttatatataattgttgtgtcttcctgaaccctttttatcataaaatgccttttgtctatagtaacaatttttatcttaaatctgtttcctctgatatagccattctagctcttttttggttaccatttgcatagtatatacctttttctatcattttactttcaacctacttgtgtctttgaatctaaattgtgtgttttgtagaagcaggcagttggattgtaccctttacttcacctatcctagctttaatctggataaaacccagataacaaactgattttttagtttcttctgctttcatagatgaatagttattcgtgatgaattgggatttttgcccaaattttaagggttatttccaaatataatctgacacagcagtctttaacctttttggcaccagggaccagttacgtagaagacctttttttctaccaacataggtggggtgggcgcagtgattttgggatgaaactgttccacctccgatcatcaggcgttagttaggttaggaagtggggtggggcggtggttttgggatgaaactgtttcatctcacatcatcaggcatttgttaggctatcatacggagcacagaccctagatcc

SEQ ID NO: 5515 - DNA, 1141 bp, Homo sapiens
catatgagcatttggtagtattataggatttattatgaaaataataaaactgcagtaacactggccacagactaacagtacacaggtgcacagttgacaccagggattattgccttgtagagttttgacctttgatgagagagtgttttttacagttgttactgatagcacatttatgtaacttaattgtgctttaaaaatatttaattgtctcttgtgtaataacagtaagtgaaagacgataactaaaattttatataattagatcctggagagaatatttgttgggtgattgaattgaaaataccagtgaatgaaacatacctaaaagggtagataggttgggttggaaagatataccacatcgagggttaattaaatggataagatgtcattatctttttttctttgtaaaggaagattaatgcataaaattattttgtgtaatttacatacaataaaattatgtgttgtacagttgtataatttacatataataaagctaattcaccaattttagatgaagaattcagtacatttggacatatgtttgtagctgtgtaaccaccattgcactcatgatctagaacatttctaacacccccaaaagttccctacttccccttttgcagtcagccttctccctccactgccagcctttggcaaactgatcagtcagtaaagtttcacattatctagaatttcatataaacagaaccatatggtatgtagtctttttaatctggctcctttcactcacatagtgcattggagatgcatccatgttgtagtttattcctttgtattgctgaatagtatcccattatatgtatatgtcagaatttgttgatttaccagttgatgtacatttggattgttttcagtttggggttattatgaataacgcagccatgaacattctagtgcaggtctttatggggacaggagtaggaatgccacatcccgtggtaagtggatgtttaactttttaggaagctgcagaactaatctgcagtggccgtatcattttgcattcccctcagtgatatgtgagagtgcttcagtgactcctatactcaccaacactgggtgtattactgtgacactagatgtattatctattgctacgtaacaacttacc

SEQ ID NO: 5516 - DNA, 1113 bp, Homo sapiens
tttacagttaaagggctgctaaatggcttgcagatgagatcttctggctcaccttgatcttcacatgaacccattgtgacctatctggatttcctaggacctgtagtttccatttgggttatattagtgcctcaggaatgtgtcactactggtcaagcaatactcagaaattcaggctgtgaggggttagattagaggaaagtaatttaggtgagctatccagagctttcaacctcagggtttataggaaaaaaaaacaaaatacaaaaacccttaggacttctcatactctagccctgaccttgcagtctcctctgaggggcctcctaagacccttaaaataatattacaataggactttgagtgtgcatttcacagtggaaatagcctctggctagcattacttccaaatgctagttccagctaaaaacaagtactttttattagtttcttgtctttcaacattctgccatcaaaatatattcattttattaacttaccgattattgggaacctgcaaaaaaaaaaaaaaaaaaaaacacacatgctgtctgcagccactgtttggttatttttgatagtttaagagaattataaatcaagttgttctgtctactagagtcagaaattctgtgctagaatgggacttctaaaattaggtggtcctgtcactttctagagaaagacccaaattcataggtttaagtggcttgtctgacatacacatacagccagttagtaacagaattcagaatagaatagagttcttttttttctgtcagtccgttgttctacttctctttccttttcttcatggttgagcagcttttggcaaaatgtgttccatatagcagtagttccaagagatgttaatagatgtaagaaaaaaagtgtgtgtgtgttgggggtgggggattgcatggtcaattaaaatgaaggaatgctgagtttgtttccttactgtaggacttctaagagttttgaacatgctattacacattgtgaatttataaaaggggacaaacactgtttgaccttagactgcactccccttctttattcctcagagcatctcaaaggactacagggtcctttgagaaacatggcccttga

SEQ ID NO: 5517 - DNA, 1213 bp, Homo sapiens
ctatcctctgctcccaggggaatgtgggagagaaaagggttcttggccaggctgtaggtggtggctcacatctgtaatcccagcactttggaaggctgaggtgggtggattgcttgagcccagggatttgagatcagcctaggcaacatggcaaaaccccatctctacaaaaaaaaaaaaaaaaaaaaaaaaattagctgggcacggtggtgtggctatagtctgagctactcaggaggctgatgtatgaggatcacctgagtccaggaggtcgaggctgcagtgagccaagatggcgccactgcactccagcctgggtgagagagtgagacactgtcccaaggaaaaaaaaaagtgttggggggtagttcttaagcgttgaagatttcctttttggaaagtatttaaaggtagaaatattaataatttttcctaaaacatctccctaagaagtcactgataattataattagtttaaatttattcttacactacttaagaaaaatttcatttagaaaaggctaccatgagatcttttgactatatggagtagactgcatacagatctctttatttctattatgaatattttagcgattataatcagctattccactgagtattagatttggtcactaagtaactcatgtttttctttagtcaatcattcattcattcactaaaacatttgttgagagttggctaaactctagattctgtgccaggcactgtacagggtgatggagatcactcataagaaggcctcttgctcttagccagatcatatgtaatactaaatttaaattttttgcattaaaaggctaaaaaatcatttgtttttgttaattatatactggttgatttatagatgtaattagcacatattcataagagacaaatatatacaatgagttactatacatatacaaagtgattttagctgtataaagtgatattgcaaaaaactacagctaatgtttcttgctgggtaattattagcataaatatcaggttcttagaggtctttaagagaatactttagagctaccaaaattagcagcagtgatgtaatatcaccctgaaataccaggagcagaggtgccccagagtgcttcacagctatgatcaggaaacttgacctgccccattgctacagcaacggcataaggactaggaaggtccactagctggggaggtcttggaaccctccgag

SEQ ID NO: 5518 - DNA, 1185 bp, Homo sapiens
aaaatgtacctttttagcgtacaggtttatattttgtatgacatgtaacagattacacatttagcagcttaacgtacatttacgatacagcttctgtgggtcgggagttcaggcaaaacttggttgggtcctctgcttaggacctgaaaatctgcagtcagagttggggtttcatctgtggattggggttctctttcaagcagtcctgttgttggcataattcatttccttgtagttgtataactgaggctcatggctcctagaggctgcctctcttcataggcagctgataatttgggtttttgcttctttaaggccagcgggagagtatttttctaactttggtctctgacccctagactttttaaaagaagagctcgcctgattagacccagcccacccagcataatctcttttttttttaagtcagctaatgagggacattcattatatctgtaaaatccatccacctttgccatacatgttgagcatcccaaatcccaaatcggaaactctccagaatcagaaattttttgaatgggaacatgatgctcaaagaaagtgttcgttggagcattttggattttttttttttttttgagatggagtgtcactcttgtcacccaggctggagtgcagtggcatgatcttggctcactgcaacctctgccacccggattcaaatgattctcccgccacagcttcccgagtagcggggattacaggtaggttcatgccactacgcccggctaatttttgtatttttagtagagatgggatttcaccatgttggccaggctggtctcgaactcctgacctcaggtgatctgccctcctcagcctcccaaagtgctgggattacaggcatgagccactgtgcccggccagcattttggattttagattcttggatttggggttagtataatgtaaatattccaaagtgcaaaaaagatgtgagtcacttctggtcccaagcatttcagataagggacactaacctgtattaacagaaccacaatatcaggtattgaaggtgtttggctgttggctcatgttaagaatgagacatggccgggtgcggtgggtcacgcctgtaatcccagcactttgggaggtcgaggtgggtagatcacctgaggtcaggagttcaagaccagcctggccaacatggtaaaacactgt

SEQ ID NO: 5519 - DNA, 1158 bp, Homo sapiens
ctcactgcaacccctgcctcctgggttcaagcgattctcctccctcagcctcccaggtagctgggattacaagcatgtaccacaccacacttggctaattttgtatttttagtagagacagggttttactatgttggtcaggctggtctggaactcctgacctcaagtgatccacccgcctcagcctcccaaagtgctgggattacaggcatgagccaccatgccccaccaattatatataaaatgttttaatcctgttttttaaatttagcatttcattgtaaaatattttcccatgttataacagtgatgtttttaattgctgtctatattatttggtgtggatttactattttctttactattgagtatacaactgtttttggttgatttttctttttttttttaattttcatttgaaataatcctcagttcttagcttttcagttcatggtactaaaacactgtattaaaagcacactagatggctctagaaacttttttcatgaggattggttctgatatccagctttccttcctcgtcagatcttggagtctctgtggatcgttatgagccggaatgtgagcctgctgttcaccactgtcactacactcttgaccatcctcttctacagcgggacagcccttctcaattttgtactctctctggtacgtccacatagataagtacacgtcatatttccttccctgttaaagcatatttctggtttcatttgcaattgcagatgtctgtcttcctatagtttccaaatacgatttttttaggagatgttgtcctttgttttgcagataattttcctgaccacactattttatctattaagttccagtgatgagtactacaagccagtgaagtgggtgataagcctgactccactatctcagccaggtccttcttctaatattattggccagtctgtggaagaagctatcaggtagggataaggtttatgctattcttatttctcccagaactttttttccatgataagcctgttttttgtcatgagcatcctgataacattcagtgctaaactcgtgatggactctggtattttcaaggttttcatctcattttgacaggataaatatgaacagtgcagttgttaataagaaaaagattcaggccaggtacag

SEQ ID NO: 5520 - DNA, 1103 bp, Homo sapiens
tagactgggaaacccagagcctaacgcgcagtgtctagtccaatgtagccactccagaaatatttgttaaatgcagcgtcagaaaagtgagtggaggaaattgatactgctcgaacggtagaagacccctcgccagcgcctaccctgcgattacccctccctacctgcgggaagcagaggagggcgggtcctcgcccgcctcgggtgccctgacctgtttggtgccgggtgggcttcggaaacagaagtgtgtctgcaatgtgtccccgatccttttgttcctttgattattattgactctcagtgttttttcctcatatgttgattgccactgtcatcttttatcttcctctcaatcagttttttcttagtgggattctcattttagcagccctcatgtgttgaaaagatccttagtagtgaattgtctttcatatactttttttccaagcacctattgtgtgacaaattattaatccattcctggggaagggagtggggctgggattctgttctccagggtctggcaacctcagtataacccaactgctaagaaccccctccactgagccagaagacctttgagtggtctatgttagttgtcccaaaatccagacactacaaacaaagttgattaggatttctggagcacacagtttagtcctcccagttgtcagagcatgtcagagcaccttcctcctctaccagtgacaaaggtgtacaagggtgacaggaactttaaaaaaagcactacagcctggggcccaaaggccctgataatcaattaatcctcaaaataacaatccaaagtcattgatcgaaagttacactaatttgattgttatttgtctgttagtttgtttttcgagatggagttttgcccttgttgccctggctggagtacagtggcgcgatctcggcccactgcaacctccacctcctgagttcaagcgattctcttgcctcagcctcctgcacagctgggattacaggcatgcgctgccaaaatgcccagtaattttgtatttttagtagagatggggtttcaccatgttggtcaggtttgtctcgaactcctgacttcaggtgatccaccaacctca

SEQ ID NO: 5521 - DNA, 1201 bp, Homo sapiens
agggaggccacagtctattggcatacatgttgggatggaacttgaccatcctgactcttcacaggtctgcatggcatgaccagccacctgaaacccagggaagcaactgtagatgattatggcaccatagctgtaatctgcaccttctacaaaaccattttcaatgggttgtggggaatcacagtggatggcattgcaagatggggcatctacatcccaatcacctgtctctaaacaggtcaaggcactgggaccttcgagccgaaagcctcggttgcaagagtaggtaacggtctgtccatagtgtaggtccgtgtaagagaatttgccattcaaaatctccttgggtttcaggcactcaatggctttacatgttggttttcctccaagccagtgaccattttctccacaaagggtggtagtatttcccaccaattcaaagcctggcttgcaggtatagagagctgtgctgagataggcaaggccttgcacatcaatgattccattggggatttcctcaggttggggacattctactggaacacattctggcagtggagagctccaggtgccatcaggttggcagagggtggtagaatttcctcttaggaaaaacccacctacacaagaatacttgacagtacttccaaaatgaagagcagaagaaggaatggggacaccaaaggaaattaggggaggtggggtacaaagaacaatcttacaaacagggaaagagtcattccattgctgggatggcaagcatttcaggacagaggggccttgcaggacatgcccttctttacaggaaaatgtcacaactcctacctcggtggtcaactcctttaatactagctggttttccaagaggggcggctctgggcacttggcaggcatgcactttggatttgacttcttattccatttgccagatttctgacatgtccaagaactgtcaccaacaagctcataaccctcattacagaaaaactgaaccttggaccctacttcaaagttttctcctttcatgaagccattctggatcgggggaggttttccacagtcgagaggaacacacatcagaggggattcactgtgccagtggcgattggcttggcagacaaatacaggacttccgactgacttatagcccgggttacactgatacctcacttcactctcaaagatcctgccagttgtatgc

SEQ ID NO: 5522 - DNA, 1201 bp, Homo sapiens; identical to SEQ ID NO: 5521

SEQ ID NO: 5523 - DNA, 1223 bp, Homo sapiens
agtccagagactttctgattcctaatcttttgcttatgagcttccctacctgctttttgatattttataggacctttttaatatccttacagttaaaaaaacacaactcatgatgacagatgctgtgtttaatgtgggcatattgaaatcaaatgaaatgggcaggtaggcactcagtgggcccttacagtctacacagttatgaccttacgttttaggaaatattttgagttagtcatttgacttcactccaccccatttcctttactcttttattctggaattctatttggctattagacctgctggactcattttgtagccttctcatttttactgttctagtcttctttacttttttttttttaactctacattttgggcacattccttaaagttatattccaatctgtctactgaattttttttgaattcttaaaaattgacatataaaattataagtatttatcatgcacaatatgatgttttgagtatatatatattgtggaatggttaagtctagctaattaacaaatgcattacctcacatagccaccatttgtttgcggtaagaacagttaacatccactcccttggcattttccaagaataccatgtatcatcattatctatagtcactgtcctacacgatggatctgaccttattcctcctaactgcaatagatctcctgtctaactgtaaatatgtatcctttgatcaacatcttcccaactccctctccccacaaccaccccagcctttggtaaccaccactttgctctctacttctgtgggaaaaacttttttagattttgaattaccactttttaagcatcctgtttttgtttgaataagtgcaatatattcttctcgatgttactattgttaaacctattcatctgctcagattccagagagaaaaatctttccgtctcaggccttagatgatgtaagactggcttcagatgctatttagctctgataggcggaagagataataagaaagaagacaagcttcagctctgaactgcctgtatctcatcttgttcctccaggtttgggcttcaggaatttcttctattttgtttatatcagactatagggctctctgaagaatgatacatagtttgaaaaatttccccattttatctaaattgttgtatatctgtaatagttttctaaagtttttagaataaatttgtcctttccaggtttcagcatt

SEQ ID NO: 5524 - DNA, 1147 bp, Homo sapiens
tgatttttattataatttttaacttttattttaggttcgagggtacatgtgaaggtttgttatataggtaaatatgtgtcatgggggtttgttgtatatactatttcattacccagatattaagcccaataccccatagttatcttttctgctcctctccctcctcccaccctctctcctcaagtataccccagtgtctgttgtttgcttctttgcgttcagaagttcttatcatctaactcccacttataagtgagaacatgtggtatttgattttctgttcctgcgttagtttgctaaggataacagcctccagctccaatttctgactttaaaagttcagtttgtattttaacaatcttaaaaaattctttggatttgcaaaccttattatacaaattttgctccattatggcatattttctgccttccatgaggattggaatagctttataaagaagtgtgggtgaatcaaaactagaaattgttactttgaagagtaccttcccacactgacttttcgagaagcttatgcagtcttcctctccgttctgtttgtagatcgttctgtacttgcgcatgtgccttgcgcacagtgcgggggtggtgcccacctctcagagtttggctgatatgcaggatcatgccccagccattgggcgctacatacggactttaatgtcaagcgggcagatggcaccctcatcatctaacaagagtggggagactaaccctgtccagatctacattggcctgcttcagcagctgttagcaggtgttggaggtaggaatatgtgacgcgaaggaaagatactgaagcacttaagcaaaaatctaattttaaactttgctaagaatttatagcaaaattattctttttcttctgtaactgaacattagcctttgtttctttttaaacttacctgattcattctggatacactacttcttttttcggaaagaaatgctaacaatagataaatacatttttacttcggaagtggatgtgaagaacaggatatcctttttatagatagctcatctgtaaatttgctgtagtgaatcacatactatatttaggttgtgtaggttttcttttttttttttttaatagaaccgaaagaatgtgtgctaaagcagtggcctt

SEQ ID NO: 5525 - DNA, 1166 bp, Homo sapiens
aaaaaaacaaaaatgtaagggacagtgcataagccttttctttgttaagtagtggtgttttgctttttcttcaggattggatggcatgttgtccacaggaatgcctactgcagggctaacactggcaatatggcagctttaaattctgagttactacagtctccatgtcaaagcataatgtgtagcatatcagcaataactacatatttatagaaaacactttttcactttactgagccaattcatttaattgtcaaatgtctatatccatggtttaaatggcaacatatctataagtatgtatacacattatatttaagcttttctctgggccaaactgcttcatccttttttctttctttttttttttttttagccttatgatgaatttgtttgaagggcattttctttatgaacaaaggcttggatgcatattcctttctttctgtgaatgggtattattccctgaggaaagttgcacagtgaaaaccagtctggttgtgacccactacatgttttgtttttaatcactattacctgagttgaactttgctcaccatgtttgtacttgttggtctgtttaatgaagtttggttgatgccatcctttgcactgccgaagcgtaatcttgtgtattacttagctctctgctgatctcagtatggacagtgtaacaacaaaaccaaaatggctggacagacttcttgtgttttgtaaatataaactaggacagttctgtaggtttgttcagtgtgctagtggagtatttccttaatgtaaaacttcacttaacagagagattctttgtttagcaagcttggagtgatgataaaatggtaagaaataatataaatgttgaagaaagcatcacaacagaactataggagtctaaatttaataaatctttaaaaaaaaccagtgtctagaatatataccatgttttattatttaaaatcattgtcttaaatttttgttcaaaaaataaaaatttgaatacaatcaaaacgttagcaatagtgtattttttgttcttctgtatttttataagtagcatgttccaccattcacatcagaattattagaagagttctgtcaagtattccttttgaaatcttccttttacctgagccataggtaaaataaataaggacataggcagtcctgtg

SEQ ID NO: 5526 - DNA, 1193 bp, Homo sapiens
cttccagaggtggtgagaactccagggccgagtaatggagagtacaaaggtccttcttggcccccatgacccttccaagccaagaacttggcagtagctgtgagaagcagagatagggagaggaggtgaggggcacctatagctcttagccatgagttatgactccctccatccaagggagacccaaggacatgaaaggggactcagttccaaggatcagagggaacttgggttgttttgggataatgactgtggcttgggatgtcacggagatgaacaccagaattggtgtgcaacagatgagctccagtacccctgatagtttgcatgggttttgctctgctgatgatggtcagggacagcagtgaggccctctacaatgccgccttctgcctaaacacaggcagtgcccacaaaaggggagctgtcattatggagcctaggaatggatagtcagagagcagcggctgggcagtgcaactcctgcattggacaaggtcctggctagagaatgtcaatgtccacactgcatgtagccctatcgaggagatgatgtagggggctgtcagccttggagactctagcctaagtaccccaccaccactctggctggcttccaagggcacaaatcagctttctgaatctgacttggcttcctgtgatctgcattcatgaacattcttactagagttctcatggaaaatgaatacacaactatttggtctgaatgtgtctgagtttggtgtctccaaaacaattctctggattagatggagaatgaagaaacttcacaaaggcaaaaggacaggtccccatctcgacccccagagaccacttctcagagtctctatctgttcgtctctggtgttagccacgttcctttactttccctcatttctgtggccactcctgtggcttcctctctttcaacctgcaggctgctgctgccctgcctcagacccttgtaggcttctgtagagatgctactcagatgggggtggagctagatgcagagctgaaacccacctaggagatctagcttggagagcttgtgaatcttaggagagctaggcatagaatgactaaagtttgtcaccgcatgagataaaataaatgaaaagccacttctggagggaatgaggcagtctgcctttattggagagatacatattgttgaacagctctgggcagtt

SEQ ID NO: 5527 - DNA, 1174 bp, Homo sapiens
tggctcagcagagcacactcagcggtgaaaggcatgactaaccctgtacctccaggtagcatgggggatgccttcccaggaaaagagcaggaccagtgatggctgccctggccacacacagaggggtggctgagcttccatgctgctccccctcgcctcctcccatgggtgtgcgtgtgagctgtgcatagagatgcacagtgggaaaaccaaagtgtgttcatatttgtctcttttcttttcctcctccatgtctagatggcagatggacactgagtggggaggatgcactgctgctgggcaggtgttctggcagcttctcaggtgcccgcacagaggctccgtgtgacttccgtccagggagcatgtgggcctgcaactttctccattcccagctgggccccattcctggatttaagatggtggctatccctgaggagtcaccataaggagaaaactcaggaattctgagtcttccctgctacaggaccagttctgtgcaatgaacttgagactcctgatgtacactgtgatattgaccgaaggctacatacagatctgtgaatcttggctgggacttcctctgagtgatgcctgagggtcagctcctctagacattgactgcaagagaatctctgcaacctcctatataaaagcatttctgttaattcattcagaatccattctttacaatatgcagtgagatgggcttaagtttgggctagagtttgactttatgaaggaggtcattgaaaaagagaacagtgacgtaggcaaatgtttcaagcactttagaaacagtacttttcctataattagttgatatactaatgagaaaatatactagcctggccatgccaataagtttcctgctgtgtctgttaggcagcattgctttgatgcaatttctattgtcctatatattcaaaagtaatgtctacattccagtaaaaatatcccgtaattaagattgttcttcccttggttaatttttctgttactaagcgtcttctaaaaatgctctttgccccctgttagaaactgagatttggtggtagtgtagtagcaatgcttaaaacagtattgagcccatggctagactagagtccatgtgtgtttcaggggaggggttgccatagagggtgacacttcttttatctaaacttcagtaact

SEQ ID NO: 5528 - DNA, 1136 bp, Homo sapiens
tttgtaacctgaggcatatgttccagagaacagggatatttgtctggtccagtgaccttggtgatcatagtcataattgaaagatgcctatggcatgcttaaatcagcattgtcaactgatttgttgttgtattattttcacttcttggatctatgtagtagttgtaataacaaatatttaaatagctatttttttgatgccattaaaaaaatcatactctggccttttttcccccttactgttgtttcccagatcttttaaaaattcatcccatatccagaaagtaccagttataaagattgctgaccaagcaaagttttgcatcaaagtgtcacctcattgctctgaccaaagactgactgttgtggttttaactcctctctgtaaagcattttgcattttccccaagctcctttctgaaagaagaaccagtgcagagcggcctttactttcaatttctactgctgaatagactacttagagaaaatgtgagtttcagtgtgaacagaatggattaggatgacgagtttgatgggcattttcagtactgtatctaagaaaaaaaaaatagcacagctaggagcctctgacattgtctggtgttttacgtggtctgttcatcaaaattccccttttcagtttttaagaatgttcgtctaacagaagaaaatgctgtaaatatttgtaacaacattttttttaacaaggccaaaaaagaaaaaaaggtttttgggaacaaatgaacttataaagtggttttatataaaacatcaattgtcttgtatattttggataagcagcagtaccagctttcatttgtaacagtctgtggcattggaaaaaaaggagtctgtgattgttgaagtgaattatgttataaatgcaaagagaagataaaatattaaaaaacatattttctaaatgcgtagtgcatggttaattcaagcttctgtacactacagtatattccattttcgttcagtttgtatatttgctgactattacttgatatctctaatctcttttcctaacaaatatagcattgtagcatgccttttaataaatgtcatgacatctgtactctcttaaaatttttctgtgttcttgtctgtactttgggtttccctttgtctta

SEQ ID NO: 5529 - DNA, 1150 bp, Homo sapiens
ggccattcctggggctagtggtataccaggaaattctgttctactcgtcacaaatctcaatcctgatgtgagttgaaaagtattatatgtaaatagtctttcaggagaaggtatagtagcacttttttctttctttcttttcttttcttctcttctcttctcttctcttctcttctcttctcttctcttctcttctctcttctcttctcttctcttctcttctcttctcttctcttctcttctcttctcttcttttcttttcagaaaggattttactctgttactcaggcttcagtgtggtgctgcattcactcactgtgacctctgcttcctgggctcaagtgatcctcccacctcaggctctcaggtagctaggattacaggtgcccactaccacgcctggctaatttttttttttaattcttttgtaaaaacaggatcttgctatgttgcccaggctggtctcaagctcctgggctcaagcgacacacacctcagcctcccaaagtgctgggattacaggtgtgagccaccatgcctagccatggtagcttctgatccagggttgtattcaaattaaaatgcttaagtttgttttaagaacttctattaaaattcatcactagtatatacggaagaagcatataaaaccatgctttaaaataaaatcaactgccattacagtataaataaacttattttcaatttttacttaaattgtcagacacttaactttgtgttaccctttacagcttatcacaccacatgggctttttatcctatttggtaagttcatttttgctattttattattgtctacaggtgtgaattgagcacatttcacttttttagtaatatgtattgattacttctgtgtgccaagtattgtgctgacactgaggataaaacagtgaataagacttagtaagtaattacagtgatgatttatagtatgggaaatataggttttgtaaagggagtgtaacgcagggagacctaacctagcagagggactcaatagaaatgatagttaagctgacttgttcaacatgagtaagaatcagccaggcagaaagggagggcaatgtcttcacaggggaggggagaggggagagatgggtcctggtgcatggaagtgaaggaagcccag

SEQ ID NO: 5530 - DNA, 1230 bp, Homo sapiens
acctaagggtatttgtggccacttaacgactttcacaaatgcttgaatttataaaaatagataccagaaagcaaatcacataaaaataaaacatatatatatatatcctgatttataataatggtaattgacaagtatgccatcgtaaaggtacaaaataatatatgcatgttcagggtacagcaaatataaaggctatactcccaattgagtgccagacactgtgtggtacacaaaagtaccacaagccatagtcctcatctttgaccaaaaagtagaaatgactagcaaaaactgctacaagatgaaattagagtcagggatagatatcaacaagaggtatgtctaagataatcgaactgaatgtcaagttttattcttgtcaaaataggttttcgtgtactaaaaaaaaaaagacaacacgaattgatagcagcatatttcctaagatttagtatctccaccaatttagagctcaacaggaataaacattgaatacagctgcaaaaatggtgaaatcaatctctgactgatttaacagaagtaaatggtctacagccataccaccctgaatgcacctgatctcatctgatctcagaagttaagcagggtcgggcctggttagtacttggatgggagaagtaaatgaaagcacgagggtaatgatggctctattagtcagcttatgtgaggagtactgtgttcaattctagactttaaacatgacaaacaggacctgcgtctcagagatgtgagaggtgataggagatttgagaccgtttcatatgaagtagtaatgatttttagcttagaaaaaaaaaacatggaatcatacactttaaaacgactaaaatggtaaacatgtatattttgccacaatttttttaaaaacacatggtaaagtggggcacaagagaaggtatcactggagtgattaacaattgaaaaatgaaacaaagatcataattaccattttggcataatgtgcatttactgggtcagcatactgaagcaaggcttgaaactgattattctttgtaaaggtgataatcttcaagactgtgccaaatttagaaaatatctggaaaacagttcacattaggttaaatgtaaaagaaaagtattaaactgatgtatctttataaatacaacttgttcataaatccttttaaatgaaaattttctcttgaaaactttggtaccaaaatgacttaagcctaaaacattaac

SEQ ID NO: 5531 - DNA, 1178 bp, Homo sapiens
gtgtagtagggagcagtgctgtacacttcctcggaccatagcggggacggcgggttccacacctgtcggggcagtagggactgagctcgtgcgcgcggaggatggattgctccaacctctcggtccagcgcgccggccgccgcgtgcgaacgtgtgtgcggcaggaggctcgatctacacctcctcggggcagcaacgactgcgagctcggtgcgtgccgtaggaggtgtcgttacacacttcctgtgggtctcgccgaccacggcgcgtttccggtgccggctggagcccggggtccgagcccccgccccgctcgccggccccgccccggcccgcccgcgccccgccccctgcccgcccgccgcgctccgagccgggcgcgcggagctcggggcgcacggagcggcgcgcggcggtcggccgagccaggctggcgcccccgccccccgccccgctcctcggtccgccgcccgccgggcgccttccccgctccacttacctttggtgcccggccctctggccgctctcctcccgccctcgcgccccttcggcccgtcccgtccagcccgggctgcccggctctcgcaggcccccccgcgccgaccgcgttcctatggacagacgcacagacacctgcaggtgggtgagagcccgcgcgcggggcggggacgagtgcgccgacgccgcgacccaggcggggagcccctttgtgtggggggcggccgcgccggggtcgactctgcttccccgtcagcggccgcgcggtgacccggctgaaccttccttttgtctcctctcgggggagcgaggccggagcgagggcagggacccgggcggccgctcgtcggcagcgccgggcttgggggtgcgaggcgcagagacccccggtggcggctccggtccgcctgccccgggccgccccgccgcccggcagctcgggtctcagcggcggctgcaggcgcagtgcgtggggctggcgcccccgctcctgctcttgggtctgtcggaggtgggaaggagggcgggaaggaggaggaaaaggtctgtcctcttagtttccaagtcttgagatgcttatggagaaagagaggtggttcagggctctgccccactagttttcctcctcgggtggctcgccgaggtgcgtttggggcgtgtgtgaaggaacgtgcatggct

SEQ ID NO: 5532 - DNA, 1142 bp, Homo sapiens
gatgttctttaaacatagcttaaggaaaggtggcggttcagttgtttttagaaacctaccaaaggaatccttttctagcatctggatgaacccaagcagatatggagaaattttcaagatttttcttttccctccctggaaaatttgcttaagtttttcagctctgaagttttacaataaatttagaccagtttactacagccaattcaaggaaggatcaatcaacccaacttaaaatccataaaattcacggctttaccaaaatcttgtttaaacagcctttgaagattcttttaaagtttttttatgttgatataacttccataaaatgcataatcttatgtgtagagtggagtgatttttcccccttttatttttagttgagatggaatgattctacgtgtttttgggatacagagtaatatttcaatatgtgtatacaacgtataatgatcaaatcagggtaattaggacacccatccttgtgttgggaacattcaaaatcctctcttctggccttttgaaaatatgcaataaataatagttaaccatattcatcctacagtactgcagaataccagagctcattcctatctagctgtaattttgtatctgttgactaacctctatccatccctctccctttactcttcccagcctctaacacacacagttctactctctacttccatgagctcaaaaatttatctcctacatatgagtgagaacatgtggcatttatttttctgtgcctgacttattttgcttagcatgatgtcctccaggcttatccatgttgtggcaaatggtgggatttctttcctttttatggataaatagtattccattgtgtatatacaccacattttctttatccatgcatcggttgatggacatttggtttgattacatgtcttggctattgtgaaagtactacaataaacatggtggtggagataatctctttgatacactgatttctttgatacactggttttcttttctttggataaatactcagcagtgggattgctggattagtattgtagttctgtttttagttttttgagaatcttctatatggttttctataataaatagcctttgaagatttccatgaaattttagctgaaggtgctccc

SEQ ID NO: 5533 - DNA, 1462 bp, Homo sapiens
aagggtgtcattggagctgcatcctcttggttaatgcaagtaatagacacaattttattattgagggaccatctgaacctctctgtcagtgactttggaagtaaaatgtaccatggaaaagctcatttctttattgcttgtttctctttttctttctctcctttctttccccccttaggcaggaattattataacaataaagaaaagtaacaaaatttttctccaaatcccacaaccatcagtcatcagctgtttttacttttcctggtattctcttccagtccctgctcatctacagcgaccttaactagattcagttttgaagtgcgttttttttttatgccaaatgatcatatttggaacaaactgaagtaattgagctataggattatcttgggtaataatggcttcttcttttgattatttccctttaggagtgacactgctgatcctgtaacatggaggattgtcttcatacctcatctgagaatctgtccaaattggtcagctgggcccatagccatgggactatttgcagcctcattccaaacctgaaacacttgctttctgaaggttcccatgggaacctgacagcaatgtggggctgtagtgctggccatgcttatcactggccactaacagctacttgcagagctgggtcccaagagagggtctgtttccaggataacagaagttttaactctgatagtcccagtataatcggggtgccctctgagacacagactagccctgttgaaaggtaccctgggagaccagtgaaagcaaagctagactgtaaccggaccagagactcttgtgacttctcctactgtagtgagccctctgaactggatgaaactgttgaagaatatgaagatgagaacaccctgtttgacatggtttgtgagtcttctgttacagatgaggatagtgactttgaaccccaaacccaaaggcctcaaagcattgctcgcaaaagacctggggtagtcccatcttccctccattcaagctcccagacgcagatggttgacgaatgcagcaatgatgtcatcatcaagaaaatcaaacaagaaatccccgaagattattacattgtggcaaatgcagaactgacaggaggagtagatggaccagccctgtccttgacacagatggcaaaacccaagcctcagactcacgctggtccctcctgtgtagggtctgctaaactgattccccatgtcacatctgccatcagcacggagctagacccacacggtatgtctgcatccccctctgtgatctccagaccaattgtccagaagactgctagggtatctctggcttcaccaaacagaggaccccctggtacacatggcaccaaccaacaggtggccatgcaaatgcctgtgagcacatcccatcctaacaaacagatcagtatccccttgtctgccctgcagctgcctggacaggatga

SEQ ID NO: 5534 - DNA, 1207 bp, Homo sapiens
ctctggttcatggtaaacatactctagctggtattccgtatacttttttggatgtttaaaaatgtgattacttttaaaaatagatcatgaagcataaataaaattgattgtggaatatttacgaaggcattgtaacattattgctgttaccgaatgtggagtatttttgttagaaagcaaaagttactactactgtcttctagtatatttgtttatggacaaggaatttgagaattatcctcacaaattttaacactatgggttttctccttatgattgtgatgggatgctgtcatgggaaagtttttttaaagttcttctgttggaataaataaaaaacacaaaaataaaatgtctgttatctatgcagtacttttattcgaggatcaacattgcctgagttccacaaagtgagaggttatttcctttattttactgatggaaatgacacacaaagaaggtagatggtttggttgaagttatgacgggtgagagggaacctggccccctccttgtgaaccgagagggacagggttggcgaccagcatgcaccatgctccccgccccgcctttgcctgcattggtacaggagtagtctaaactgccgactgcttccccttcctctccttttatgtcacatcatgcccatcacttatccaaagtcgagactgctaggttatatcctaaagaggtcatttatttttaaaattagaatcaaaaaggacctagagtttaacagaaggattgactgaggatcagggagacatgtctcttagtcttttttctattaagtatctgcacaagtcacttacacttcagtttatcagacctgtttttaggatcaactttgtgacaagcactgtgctagactggtggagataaaaagaagaatattaaatttcctgcctcaaggatatcattgtttataaaagaagcagacaaaccaacaacttcaacttcaagtgtataaggaggtgtataaaatatagctgaagatttatgaagagtggttgactcagcctcagggaacacatggaagtatatttcaggtagaaggaataacgtgagcaaagatgttagagaagcaaggagttgactgtagcttgagaatatatctcaatggagccaggagagttgctgctggaaagatgggctggaaagccacctgtgaaaggctgtgcatgtgatgtcacagtgtcctccacgg

SEQ ID NO: 5535 - DNA, 1404 bp, Homo sapiens
atacataagtgtttacacacacacacgcacaatatgtggttaagcctggtaagcctgctaaaatggcaaagcggcctggcgcgtggctcacgcctataatcccagcactttgggaggccaaggtgggcagatcacttgaggtcaggagttcaagatcaggaccaacatggtgaaaccccatctctactaaaaatacaaaaattagccgggcgtggtggcaggtgcctgtaatcccagctacttgagagtctgaagcaggagaattgcttgaacctgggaggcggaggttgcagtgagccgagaccatgccactgcactccagcctgggcaacaaagctagactccatctcaaaaaaaataaaaaataaaatggcgaagcacctgtccatgtgtttggccaaagccgtcctccgaggtcttaagggggccagagtagcagtcctcgttggcgttctaaggcagttgttctggcttccagtcagctctaaaccttaccttctggggactccaggattttctgctcttggcctaatgcaagagaaaggagaatccccagagaaagaagtggggaggtaaagagcgttttctccacttacctttgggttttttatgctcccaagtagaaataaatatcaagaattcacaggttgactgaagcacaagttgcccctgggctctgtgtcaaggctggtggtactgtaggtgttatgagaggacccatagggtgtccttcaggtgagctgttgtccacagcacctttcatatctgctgtaaagggagccctactttctgtctatcccccccaccgccggcccccggaatctaagcagactccctgttggaagcttactctggcacagaagctaggatgtcaccttaaagggtgtgattcaattgaatatagtttagtgcggtaccaggcacatcataagcatgcaataaatgttagccagcttagttataacttttggtaataattaatattatttaactaatttgcattataccacttatttcttccattatggagattctgtctcccttaaactgttaaacttgaagaagaaaccaaacatgataatctggtcaagttaacacattttcgcccatgaattctacctccaacacagccaagctctgatacctcagatataagcaaaaacaagtgaaggaagaacagaaaagccttatggggctttatgagaaggtttttccattgtttagtgtgtttgcaaaaaggaattttatggaagtacctaaccaaagctgtgacagaagggtctccttggtcatgtggcattttccagctttccttggattttatgctacattaatttgccctggctgataaatggtgtttgaagaaatgtgaaattttgttactttgatttttattttaattca

SEQ ID NO: 5536 - DNA, 2182 bp, Homo sapiens
ttgtatttttagtagagacggggtttcaccacgttagccaggatggtctcgatctcctgacctcgtgattcgcccacctcagcctcccaaagtgctgggattaccagtgtgagccaccgcgcccagccaagaactgattttaaaataaattccatctcagcaataacaatgaaaaataaatgaataaacaaataaatttggtctcaagcattcagaaagagtaattttaatgccttggtcgaagaattgtgactctatttaatagcttaattgcctttttgtttttaatctttcccagcatgctcatgcacattcatctggatacttcatcactcaagactctgcatttgggaaccttattcttcctgttttacctcgccttgacccagaatgaagaaaacatttgcgatggaaaagtgactttgtaatatcaaatgccaaagctactatcattcagtgctacatgaactgtgactttaagaattttggtgaactttgatattttttgtttgtctgaaagaaaggaatgtgtaagtgaaagctgaaagaagaataaccaggatgatgagagctgtggaagctgtatcgtccaaggaattgattatgtaccgtgactgtaacttttttgtaatgctgtttaactctcaatcagactgtgaactggatggtcacgaagtcattccccaactcctagcaagtttgactgaatatatcatgtccacagtagattttcaagaatcatttatagtacttaactttaaagaaacaaggctgcttttaaaaaatgaactaataggcttaaatcaattgcatccatatttgctgtttataggattgctatcagtataccttttgcgtttatagtcaacatgtatcatcctgaaatattctttctggacttataactacttccccctttttcactttaaaacaaacctcaagaataaattactaaccagtcttaaccatcttttataaacatatgctcttataaatgttgtgactagatgcaattaaaaataatagggaatgtggtaggtttttaatttgtacatcctcttatttagtgttaccacataaatgatgagtttgtgtggttctgttttccatttttgttctaactgaaaactttttggctgggcacggtgcctcatgcctgtaatcccagcactttgggaggccaaggcgggcagatcacttgagatcaggagtttgagaccagcctggccaacatggtgaaaccctgtctctactaaaagtataaaaaattagccatgtgtggtggcacacgcctgtaatcccagctactcaggaggctgaggcaggagaatcgcttgaacctgggaggcaggggttgcagtgagctgagacggtgtcactgcactccagcctgggtgacagtgagtctttgtctcaaagaaaaaaagaaaaagaaaacttatgcaagtcgagctcctttttaattaagtaggaagggattaggttaagaaagtctctcaacatgacccatctttagcagtatctggggtgcttatttaagtatgcagtcccactaccctaccctagtcctacagaattagaatctgattcaaaataaagtctgaaaaccatgagatagagaattctatgaaatatcttgtacagattttcgtgatatatttatacacgcatgggtttgtagatccctgaaacttagaggtcatttagctaaaatctacattttttttaacttttaataggattgaaatgatattttacactgtatcacagatacagtattttatataactttttgtaactgaccttatcttggccttgagtcccatcctctctggtggtagcgtaaaactgaaaattccagtttgggtcaatatttagtgaaagttctactttcttttcagagagtttgttcccccctttcttccttagatgttttcaaacacacagccccatcctactcaaaccaagtgaagcaagagtggacaattctagaattggctgtgccatgtaggttttttttagaatttgaactgatttccttcattttgatgaggtggcaactgtccccattgtaatggtcaccattgcagcgaggatagccttacttctgcggcgcagagctcctcagggggcctctggctcctgtccttcctcaggtccatccaactactccttgggcctc

SEQ ID NO: 5537 - DNA, 1171 bp, Homo sapiens
ggtgggaggatcgcttgagtatgggaggttgaggctgctgtgagccctgatcataccaccgcactctagcctgcacaacagagtgagaccctgtctcaaaaaaaataaagaaaatgaatgcagccctgtcaacatcttgattttagcccagtgagacctctgacctatagatccataagaaaatagatttgtgacgttttaagccacgaattttgggtaatttgttacagcagccatagaaaactaatgcatatttaactgcaagaaccaaaaaaatctaggaaccctccatgacaccttcttcctcattccttcatattgaatccatcactctcctcctgatttaacttcctaaatagctattggatccgtttgtatctctgcatttccatccactaaaaacttttattatctctagctctttctactgtgatagtttcctgactattttctcttgtctattctcaacattgcagttagagtgatctttttaaagggggaaagtttattttgttcctcacccctacttttatgccttagatttcagttcaagcatcacttcctttgaaagccttctctgacactgctccccccgctttcacgctaggtcaagtttatttagcattcattcctacaataatgattgttataaatgctcatcaaatggtttctttatttcagactactcatgttagattttaattacacattcattcatgtgattatttgattgatctctattttcactggacagtttgaaaaccatgaaagctagaatcatgtcaagttttgccttatcattgcatccttagaacctaactttgtgcctgtatgtgatagcatgaaagactgctagatctgaaagagggcttagtccccaacacaataaatatttgttgaatcaataaataactgaaaacatgttaaacatgttaatagtgccacagtgacgttgctctagtactaaacataggtgtctcaactatggtactttaatgtactatatagttgtgaagagtatatagcttgtaggataaccacttgacaggatttaagtaatcttttaaaaattattgttatgaaagtgtagtagattgtccataactgcataatcaaaataattttcacttttagctttagattttttttacaataagaagaatttcagtta

SEQ ID NO: 5538 - DNA, 1190 bp, Homo sapiens
acaaacacctgtggaggcaatttggcaacatatatcaaaattacaaatacgtatgtttcttttgattcaacaagttcttttctgtttgtgtctgtcctgcggataaactagcatgtgaagggagaaggctttctttcctctccacctctagttaacatcattcaagacctctacattgaggtcgtttctgtcttttgatcctcccttcacttgcagaagtgcttggccgcatagcatcctgggctgtggggctggcacttggcatcacttctccatcactgcagtgccatcctgcaggaaagtgtccacttccccaagagcttgatgccaggagtctccactactgtgggtgcagccatgtccatgcagtcatcctgagggcacaactaaggcatctctgtagcttggcatggaccaggcaccaccctggcacagacaggaagagctgaatcttcacttggcttctgggattccactcactgttggttccttatgtaccttactggctgttcctcctctgtctccttggctggttccgtctcatctccctagctctaaatgttggactgctgtaggactccattctgatatggcctctcttcatctgcatggtgtccctaagcaatctcatccagcctcacacatctacacactgataactccaggccagaaacctctctcctgaattccaaattcctgtctcccactgccttcttgatgtttaaccctgcatctccaacaggcatgtcaagctagttatctagctcactcttaattccaaggataagccttggaattagcctcggctcttccctttttcatcccatacctaagccatcagcaagtgcttctgaaataccatgtccagaatctcatcacttctcactctctccactgctgctaccctgactgctgtcatcccctcttgcctgcattactgtaccagccgcctgactcgtcttcctgcttccaccttcccaccttcagtcatatatccaggcagcaaccggagggattatttaaaacataagaaacatcagtcgcatcatgtctcttgctttttaaatttaattaattaattaattaatttttgagatggagtctcactctgttggccaggctggagtgttgtggtgcggtttcgactcactgcaacctctgtttcctgggtgcaagcaattctcctgcct

SEQ ID NO: 5539 - DNA, 1238 bp, Homo sapiens
atgaatgtgaccaacttgaacatgctgtgagctcacttagccctgagctcatcttcccttcggatccttaattcttatgctttgttcaattcggaaacctcacctaatgtagggatggtctctatatatgtcttgtttctgaaatctaaatctccctcaacccctgcttccacagcaattccttgggcagaagagaccaggaagccctattcagatagtttcattgtgccttggccactgcatgttttactggcaacagcaagaaattgagaaaagcagagtcttgagaatgattcaatccttttcaaaaagcaggtattctagcttttattgaaaggcaaaattaattcggactgactctatgactaagtagctaccctagggttcttaaacattgatagaagagggacccaggggaggaaagaccataatccttgttaatccgcagatggagggtttgaatgttgggctctgggtcacctctgtgggaagtcatttcttataccccaacctggaataaggggacttttcacatataactatggtgtccttttcaaaggaagattgcattgaaccaagggtttattgttatcttgggatgtgtgtgtgtgtgtgtaagtgtgcacgtgtgtgtgtgtgtgtgtgtacttctttctggattgtagaggtctggcatgcgttcagaaatttccagagacaaaggcctggatctttcttccttcttccagtaactcagatacaattggaagtatctacccccttaattgttgacttactgtttaggatataaagaggaactggaatctaacctccaaaaactcaaaggagctattgaaacacaactagatatataagctgaaaaccaattgcattggatttaggacaattgaatgtttggaatatctgagctatgagacctgagagactgtgccattttcccaataataaaatgaggagttagtccattgaggaagagccacactcacttaagttgaaatacttgacttctagccccaagagtcagccttgcaagatttcattcaaggaatttttgcttgttgctgacttgtccctttactatacatgcatcattcaggaaggatgtctaatgagattgtaaagttagagacagtagctcaggagcattattgagccttaggatgatgtagcaaacaacaattagagttgtatgtcttctgcaagagaagaccataactttcacaaagttcagaaaagag

SEQ ID NO: 5540 - DNA, 1148 bp, Homo sapiens
gtgggaaatacattgtgcctttctctagatgtgatacgttataccaaaatctttgtagtgtgcagagcggtggtttgagactaaatacaggcttagaacttgcagagtgtgtattcttggatggctgatgcatcgacttgcattcccacttaacactttgattagcatgaacttgccaatcaaaaaatgacaatcaatttgagaaaatagaaatagatatttttaaataaaaccattcacagtttactttgtcttgataccttggtttgtcccagctgaagtgaagcaagagagtttgaattaatttttccattataatgttttcgcatgtctgcctctaaaactgtgattttcaagctttagcgtgcatcagaatcacctgtagggcttgttaaaacactaattgctgggcctcaacccaaaagcccccaaagtggcacttctgagttcctgctgatgttacaagggaccacacttttgagaatctgtgctttaagctaaggaaatattgcctggtgggttggctgcctggtattgggcatggaaatttgaattgctgattggtagatggtgtgtctggacttaactcacgtagtaaatactgctgatcaatacctaatcattccacatttattgagctccacctgtgtgtatgtgtacccaagcacacatgtgtgaagggctatagccaaagtatttttactagcctgtatgaaatcactagtccttatttttaaaggtctatggtttcttggaagtagtttgattgttgagagagacctttgatctgcagtgtaaatctaccagtcatgggccagaagggcaaaagcccagctttctctttggaaagactcaggctgtggtttgttgatggccaggttttcctcaggctccaacaactgtgcttataccaagcagatcctcatcctccatataatcatctttgttattcgtgggggtttaattacattacaagtggccaaaacccctgttctcagtgaagaaccacattggatttgtattctgttcagttgtagtctacactgcagtcttattcctggttcaaactacctctttaaattgatttgtcttgtgctggtctgttaaatcctgccctccttggtgctagatccagttgtgcctcaggg

SEQ ID NO: 5541 - DNA, 1199 bp, Homo sapiens
gcctctgggaccgcgggcccttcagttgtcctcaggagaccaaagccatttcttaaataaatagatgatcaaggtgagaactcaggtaaaggatccacttggttcattcggtgactgacaacccagccgagtgattaagccgtgctttcctttactcctcagttcaggaggctaattttgggcaagggcgtgattcttcgaagatatgtttattgtgcttagatctcccaaaaggagagtagtcagtcagccttgaaggtttgaaggtcatggtttttcaggtaccgtgttgagaaaagccagtagccgttgtgtttttcaacagtagcataaattagttagaagcaaattggtcatcacggtctcattggtgatagatatcggctccactaaatcatggaatcgtggctttcaaatcttgctttctctcttgcactttgtggctgggagtttttatgcctgcggtttctgcagagggcggcccacagggtgtggtacgtggccggtctccagcttcagtgtctctgagtaggcattcagcaagctatgggacaggcctcaggctgccttcatgtgccttggaagacttgtgggtaggggtcacctctggattcaccagctgagcaggtcagagggcatccggttgggagcaggagcctgcatgggagataagatagtatgtggttgaggaagaaactgtcagtcacctcctggtcctggaataagtggcccttcatgtgtgtatgggcacgtccctgtatgggatttcacctctggtgctgcatgttgatttttcagccagaggtacttgtggcaaggaaagctattcaaaatgtgcattatcagctgagcagtgtaagagtttgcagcctcaattgtggtaagtttaccagcatgctggtcagaagtcctccatagatgagtaccagtcacccaacgtacacaaggatgaagatggagtaggcagtcacttctccacacaaggcctttttcaaaaggaagcacctccccctaaagtgaagtctgattctgccgtcttggagggttaggagtacatccaaccccagtaacttgacaatctcactctttcctctgttttttcacctgtgaaatgggaatgacagtgcagccctcacagggcttttgggagaattagagggaacttggatgtaaagtatctggtccagtgcctggtacat

SEQ ID NO: 5542 - DNA, 1225 bp, Homo sapiens
aaggggaggtgaagaaaacacacctccacctggcaagtttttctccctcatctgaggtcagttgcttcaccaacaaagcccaagccaagaactgcagcgttgagggttgtccctcggagtggagtagcccaaggaatctcaggtccaccaagagcattggtaccatctgggccacgggtggatgcctttgttctggcacagttctccacttcccgattcctggctcagccagccaggcctccctctaatggcatttagtaaccaggaaacaaaacacatgccacctgagcaaaactgcctgcacttcatctctggaggttcgctgcacagaggccacctgccgcatcaccagtgaggaagctttgccaccatcctgcttggcagcttcacacttgacatctgaggattggtttttggctggaaaaagggtaccagggtttcctggcaaggacaggagagcagtgcagtgacacagatgagaagctgtgagtctccaggattcaaggaagccaccaggtgtgcaggctgggaagagacatctctttcagtttgaccctttatctcctgcacttttaaagaaacaccagagaaaaaatctacaaggcgtgtttccactgaagctgaacctctgcctttaggagtcccctatatttgagcaaggccacctgcttcccctggacttgagctggactccttgaagagtgggcttctggagagatgttaggaatatagcacatgctctctgggggccacagggtcattgggaaggtttgaaatgaagatgggatgtggctggaacagcctgtgagatggctccattggggacactcccctcatcttgtcatcacgatggatatgctggaagaggaggtgtcccagtgagccgcccgaagttcatagctttgccctcgccttggcaacagcggcaatgcctctatctctgggatgcatcttaaggagggctcctaacaaggccgatgatttagacagaacaagagactaagtaaggtccggctatcccgtggagccagtagtaggtgggagctcctgtccccgccagccctgctccagcccccgtgtccagctgggccagtggaagaactgggaaggaggaagcccctccctttcactgtggctaatgtttgctaggccagttatggtgaaccaatgatacagtgttttccctcttaacgttcccctcctggttttgccttttcagggtttt

SEQ ID NO: 5543 - DNA, 1129 bp, Homo sapiens
ctctctttttttttcaaagatagggtctctttctgtcgcccaggctggagttcaatgacgctatcacagctcactgtaaccttgaactcctgggctcaagggatccacctgcttcagcctcccgagtagctggtaccacaggcatgcatcaccatgtccagctaatttttaaatattttctgtagagattgagtctccctatgttgcccaggctggtcttgaactcctggcctcaagcaatcctcctacttaggcttcccaaagtgctgggattataggcatgagccatggcgccacgctgggcctgaaagcagaatttcttagcaaaggctcagctgggaggttttgtttaatccaatcagatgggaatcctaaagtccagaaaggggaagcatttgcccaagatcacacaggtcaggatgggccaaggccagactccagttgttctggggttgggagagtgagaatcggcatcatctcaggcaggctgagctgccatctgcaaactccatgccgtctgtctgtctgtctctctctctcctcgggggcattccatcacatagtccccttggcccttcctccaggagccagggaggaatgtgatttttcattctctgcctggcctccctccgagacgtctccaggcagctccgacaagaactccagttcccattcttgagcctggctactggggcagcctttgttcctccaatgcttcagagctgtgcccccacctcagagcacttgccaggggcctctgtagagcctgatcgggtagcaggaaacagaggcccagagaggttgggcacattgaaaccacacagcagccagacactcagatcagtcatggaggatggacaagggagagaggagggtattttcagggtctccctttctctgagtgcagacttaatgttatggttgtggctgagggagtgatggagtgggcagaagtgagatttgagggagaaagcgtaggctggttaagagaaaagtcagccgcttcttcactctgtaccagggttcctggaccttggcactactgacatttgggctggatggttattcgtggcgggggctgttctgtgcactgcagcatgctcagccacatccctggcctctgcctacc

SEQ ID NO: 5544 - DNA, 1173 bp, Homo sapiens
tggtgctggaccagggaggagagatctttaaaaccttacactacctcagcaacctcatccagagcattaagacgcccctgggcaccaaagagaaccccgcccgggtctgcagggacctcatggactgtgagcagaagatggtggatggtgagaaggcttcctgccgggggtgggtgcgcctggcggtggggagctggggcaggtggagtatttgatttccgccgcattttggctgagtttttgtcctcagcaagacagatacactggcagtcatttattcactcagcagtcacagagcctcacaatataccaagatccgcatgctggggatgaccatttcagtgcaaagagacaagagctctggcagaaaaagctcctgaggctgtaagagtccccacccctggggcccatcctgtcacaggctcccgggtgagccaggattttccccctttctgagcatgaggactctgctctctcatctgtgagctgatgtggtgctgtgaaggacaagctgcggagccagacagacctgagttccaatgtcagttctgcctcagacttggtctgtgagctggggcaagccacggccccatcccgagctgcccttgcctcctctgcacaagcggctgggactagatggctggttgttccactcttgagctgcaaaggttttggcttcctgagaagcccagtggggaagctagatgtaagcagcagcgctggctgatggggtgggagacctgactcctaccctcccccggcaggccctaggaggagccctaggcctcgaagaatccattcaactaggtgatcccccaaacccttgtgcaagtgacccagcctctctcaatgtcagttgtcttctctgtaaaatggatacatcccagtagcaacataggcaagtacttagccatgtgacccctcctctgggggctctgccagttgtgagctctgcccagaaggtttccttccatctcggttggaggaatcccttttctgctcacccaccctgacttcatgctcacctggggctcggcaggtcacaagatgcagggtccatctacagaaccaaggaatgggctcatcccccagatacatacatcacctccatcccacgctgcctgcaggtacctactgggtggatccaaaccttggctgctcctctgacaccat

SEQ ID NO: 5545 - DNA, 1237 bp, Homo sapiens
tttgtctgtgacattcggccagaaatccatgaaaactaccgcataaatggatagaagagagaagcacctgtgctgtggagtggcattttagatgccctcacgaatatgaagcttagcacagctctagttacattcttatgatatggcattaaattatttccatatattatataataggtccttccactttttggagagtagcaaatctagcttttttgtacagacttagaaattatctaaagatttcatctttttacctcatatttcttaggaatttaatggttatatgttgtctttttttcctatgtcttttggctcaagcaacatgtatatcagtgttgactttttctttcttagatctagtttaaaaaaaaaaaaaaccacataacaattctttgaagaaaggaagggattaaataatttttttccctaacactttcttgaaggtcaggggctttatctatgaaaaagtagtaaatagttctttgtaacctgtgtgaagcagcagccagccttaaagtagtccattcttgctaatggttagaacagtgaatactagtggaattgtttgggctgcttttagtttctcttaatcaaaattactagatgatagaattcaagaacttgttacatgtattacttggtgtatcgataatcatttaaaagtaaagactctgtcatgcatttttccccattcttttttttttccctgtctccgtgacaaccagtggttcttcatttttgatcatgcgaaatgcattttgacccagatggtctgcagaacttcacttaggacattagcacacaaatagcacacatatcacatacccatttatatacataattagaaaatgttcctgatacatgtgtcatgtgatttcttccaacaaatgttttggaaaacagcaagcaactagtctgtaggttgtcttttctctagagatccttgtcctgggacagcctggggcaagttattaagcatatttccttcctggtgggctagatgatgtgcattatacctgtagtaccttcatactagcccttacaagttaaatgtcctgtggccatcttagccgaaagtctttggttgcaaaatcttataggtaaaaacagttgaaagaacattatgggatttccttgcttgttctgatacaatacaactagatgaccttaaaaaccctcatatttaatatgactcaggattttatttttcagaccactactgtctctagttact

SEQ ID NO: 5546 - DNA, 1222 bp, Homo sapiens
ggtagatgggtctaaaagtgcatgccaccactcccggctaatgtttttgtttttgtttttgtttttgttttgtagatgcagggtcttactatgtttccccagctagtctcaaactcctacactcaagtgatcctcccacttcagcctcccaaagtgctgggattacacgtgcaagccaccatgcctggcccatttctataagtagatgtgctgagtcagaatgtacatgcttgtttgtttgtttgtttgtttgtttgtttgtttttgagatggggtctcgctctgtcacccaggctggagtgcagtggtgtgatcttggctcactgcagcctccacctcccgggttcaagcgattctcccacctcagcctcccgagtagctgggattacaggggtgtgccaccacgcctggctaatttttgcatttttagtagagacaggggtttcaccatgttgcccaggctggtctcgaactcccgacctcaggtgatccacccgccttggcctcccaaagtactgggattacaggggtaagccaccgcacctggcctatgcatgcatttttttattttaacagatattccaaattgttgggaaactctcagaccccagaacttagctggctgcatgctcggccagccctcagagacagcatgattggaggcaggagcaggaattggcaacctgagaagtagataccacccaggcaccctcattcacaaggatccaggtagtgggctactaaaaatgaagttcattcatttatttatccacaaatggacattcagtacctgctaagggacaggcattgtactgagcaagagtgaacaatacacaccaggtccctatttagtgtgcctgatttccaaacaaaacaaaaacaaaaaacaatttagacgcgtgggagcaagagcctcaagagatattgaagctttactcactgatgataggatattaaaagggatcctgcaacaggtgtgtggcctgatcaccatctatctaaaccctacctctccaacaaggttgccctcctccatgaagccagatgtggtccccctgccctttctgccaggctgcctttactcttcattctcactgctggtcactccagcgtgaacttagtgctgacacatcaatctcctataccagggaggcacagaagacaggggcctttggagctggcccaccaggctctaccacttactggcatgtggcattggcag

SEQ ID NO: 5547 - DNA, 1376 bp, Homo sapiens
tttcttattttctatccaagccctgttcactcaacatcttcattatgcaggtattggtgaaaattaactttgatattcactagcagtactccattactcataggaaatctgagaatcactgaagtgaagatttactgtatcatgtctacaaatcactgagcactttatatgcactattttatttcattacgtcctactgtgtatgtggaatgtaggtataaatatcaccacttacaaataagaaaaaatgaggttcagagtttatgtaccatgcataagttcacagagatatgaaacattagagtggggttcaagccaagttctggatgcaaacccgctgctctaaaagctcatcatgcttttccacctgctcccccgtccccctgagcgccaccctggctgcaccacactcgcttggagcttctggctgctgctaagctagtgctgccgtagtctcccttcagccgccatcatgattatctaccaggacctcatcagtcacaatgagatgttctccgacatctagaagatctgggagattgtggacgggctgtgctgggaggtggtggggaaaatggtcagtaggacagaaggtaacattgatgactcgctcattggtggaaatgtctccgctgaaggccccgagggtgaaggtaccgaaagcacagtaatcactgctgtcgatgttgtcatgaaccatcacctgcaggaaacaagtttcacaaaagaagcccacaagaagtacatcaaagattacatgaaatcaatcaaaggcaaacttgaagaactgagaccagaaagagtaaaaccttttatgacaggggctgcagaacaaatcaagcacatccttgctaatttcaaaaactaccatttctttattggtgaaaacatgaatccagatggcatggttgctctactggactacggtgaggatggtgtgaccccatatatgattttctttagggatggtttagaaacggaaaaatgttaacaaatttggcaattagtttggatctattacctgtcatcataactcgcttctaattgtcatccacacaacaccaggacctaagacaaatgggactaatatcatcttgagctcttcatttatttttaccataatttattcggagtggaggcattgtttttaagaaaaacatgttggctggggggcagtggctcacacctgtaatcccagcactttgggaggcaaaggcgggtggatcacaagctcaagagttggagatcgtgctggccaacaccgtgaaaccccatctctactaaaaatacaaaaattagctgggcatggtggcgcaagcctatagtcccagctgctcaggaggctgaggcaggagaatcacttgaacccaggaggc

SEQ ID NO: 5548 - DNA, 1266 bp, Homo sapiens
aaacaaaccagaaatgcatatattgtccacagcatttcccaagcagcatgacttgcaaagtgaggtctgggtatgattcctgttctgtaggagactataaatcagaaaaggaggggggaaaagcaagtatatttttatttttaaaattcagtattttttctccaatatttaattaacccatagcattaccccaacatttggaaaagagagagaataaattacccctaattctgtcactttaaaacaagcacacagttaattaacgtttggaagtgttccttctgtatttgtgtgtatgaacatgtggatgcacacatctctcctggaatgcagctttgtctcctgttcttgctaattgccattatgtcatagcatctcattccttcttatgaatgtgctgaaacttaactgcctcactgctgttggacatgtaggttatttctagtgatttgccatttttaatttcctaatgaatgtctttggacacaaatctttttctgtgtttagaggtttttttttttttccttagagttgattcccagatatgtgtcattagtaggccaaaggacagatagaaatatgcaataggcataaaatttattttcatttatttatttattttccccctccccccaacaacttttaatgtgtaaaagactgtaagtagtttgaaggccctgatagagtttgtcagatttctttctaagatgctggccctggtgtagagcctcaccagctgggtaccacggtgctcagttcctgcctgttggtagttcacgtagacaccaccaaacaaacagaacaccaagaacaggtatcctgttgttgctgtgtacatttaaaaaaatctctaatgaggttgcacctattttctcatatttatttgctggtttttcatgcattataggagaattaggttgaaaatcgatatagaggagtgatttcagcagagtgtagtcaggacggtgagcatagaaagccaggaactgtataacttgtggacctgccctctgattataggctctgtgtaaagaaagcatgtggcacaggtcctggcacactgcaaaggctcgaaagggttagtcactattattatttacttatattgtcattattaagaatggttagaaaactcacttttttttgacgtagagaggaaacctggacaaaggggcatagtttaattgaactcaaatatttgtagggctgtcatgttgacaagaaatagaccttatgtgactctaaaggacagaaatggttgtcaga

SEQ ID NO: 5549 - DNA, 1179 bp, Homo sapiens
tctggtgcctcccatccccagacccaccagacaccacacagcagacaatacacacccactcgcacaagcttccatccacatgtgttgtactttcagctctaggcatgcagacaaccccacacggccacaccaccacatgcccaagtgtacacacacagagccacaccgtccctctgggcctgctggctcctcccttggctttcccttggcccacttccagggcccaggtgctgcaactaaatgtgaaagctcagtggccgctccttctttcagcccatcaaccagcattggtcccatagggaagcacaggggactcaccctctttcatatcccttgccctgccctgaaatggacaatcactttttgggataggttgaaatttttaaagagcctgcatcatttggttccctcaaagggaagcccttgccagtgggggtttgaaagagaatttttggaaccaacattcaaattctgcctcatctggagggaaaccaaaattgggagggggaagaggacccctgatgttttgctgcttccagagatattagaaactgactcacttgattggaaaatggacaaaagtgccttgacgtggagggtgggcaccagatggggaccagccttgccaactgctgctgtggcctccagcttggctggttttgcaggccgccagcaggaaggcgaaggtggtagtacagcaagaggcactggcggggcagcaggcctgcaggagctgtttttccattgctaggcctgacccctctctacctgtgagcgttcagggggtccctgagatagtttagatgcccccccatcttagacctcagctcccacagtgccttttaagggggacctcacctcctgtgcacagcccacccactttcctctgcttccctggcacagcccaggcatagacgagctggcgttggacccagttcttcccccttttcagccccacagctgctgccacaggggccaactagggccaggtggaaggggagctgagaagccaacccctagcccaggggtgctgtgggaactgggatccaatttgtagcttcctgcctggcttcagagagcccagcaaccttctaggcctgctttccagacttctgagatagcctgggatgagcaatcctgttatagtacatctggaccttccctacctgggctctgggg

SEQ ID NO: 5550 - DNA, 1170 bp, Homo sapiens
tatttgtcacaaaagtgcttttttctcactgttgcctattttcatatatcaggttttaaatagttttaattttttaataaaattttctctacgttctatatgcaattgttatatatctatttgaatagctgaaggactaaaatacttttttaagagataacttcaggaaaccattatattttactatctgcatgctgttaactgtggtacactgtgaaatatgttgattacaaacccattcattacatagtataaggaattcacagtatattgactatatagtgtctaatgatcttgggcagatactgtcaaacttacaatatctatatagatgtaggtctttttaaatttacctagtcattcttctatcatgtatattgatgctgaaagaggaactggtcagctcctctggacaacaaattcttagtctataatattaggagacatcttctgttttgcaaatgtctgtgaatctgagcaacctggcattctgcttactggccagaaagctggcgggtgacatttgtaacatttcctctttgagactctgagttcacctagagaagtctaagcataacagctttctttcccagcacgagcctttatagctctctttagctcaaccactctgtccatccagccaatggatgtcccttcccctgtaccccaatttcaagcttattttaggaagccttgaactaccatgtatcctggctcctagctgagtttattagaggtatggagcagtgcaacttaaactcaagttgcacttacattttgaattttaaaatgatggttttatctgttgtgtgaagtggttcacccttgaggaccaggagcctccatatcctgactgaaaaccttttctgagacttagagtaacagtgcttttggttccttgagttctcctgtctccagataccaaatgaccttgacttttctgccttgtgaattcgtagtccaatcagctgaaattaaatcacttgggagggacgcatagaaggagctctaggaacacagtgccagtgcagaagtttctccaggtggcctccctttccaacaatgtacataataaagtgtatgcactttcactaatatttttggggtgagagtctgtttcggcctgtattgaatgtctgtggatttccgttttcagaagtagtacattag

SEQ ID NO: 5551 - DNA, 1229 bp, Homo sapiens
agctgctcacagcccggagcctgcctgccaccctcatctccaggccacccccttccccgatgcttgtcgtaggtatacacagccctaaggagcctgtcccatgacccccgctcacatccccattgtccacaggagaagcgcattgcctcgttggatgccgccaatgcccgcctcatgagtgccctgacccagctgaaagagaggtacagcatgcaagcccgtaacggcatctcccccaccaaccccaccaaattgcagattactgagaacggcgagttcagaaacagcagcaattgttaacctgcctgaggagggaggaagctacccaaggagagggggactatggtggccaagggcagggtctcggcctggggaggcacccacggttgcagccccagcgcgggtgtcaggaggccgagcctcccctccctgccgctgtccaggaggcggccgcagagggagccaccagagactgaagcagcgtgaggcgaggtcaccagccgctccctgtggggtgcgggcagaagagactgcacgctggggagtggggacagcctgatggggcagggggcctgccaaaaatatgtctgttggttcctgaatgtggtgtgtccttgtcctcctggatctggccgagtgcatgtgtccccccacacctgtgccagggagggggcttcctggaggggggattcaagggctaggggcctacacctgtggcttcccctcgcctccttggggggcccgggactccctggcagccaggccctgtcatgtgggacctggcacttggcagatcagttggcaggcaggaagataggaggacacagagcaggaggtcagtgtcccctgcctgtctccatccgaagcacctgccactgcatgcagcctgttgggaccttcctggctgtgaggaactgaggattcctacccacccaccccctctgaacctgtccccagagcaccacctgctaccttcttccctgccttagttgtattgccagatagacccagtgagggccatggctttttcttgtgagctcttgtccctgtggggaggacccacagcttcccacacctcccacacaggcccaggctgatgctctagggctcccagaagccagagatctgggcggatctggccagatggctctgagcactgtatctgccttctcctggggcccagcacacccagggcacagtggtcctgtagggagtgccacctggtgctc

SEQ ID NO: 5552 - DNA, 1214 bp, Homo sapiens
gatttttatcttaattgcaagtctgccgattttgtaaatgttcttggtgtttgactgtaatgtaactatctcacctaatggttgtacatatcctttggtcctggtgctgccgagggctggccgggactgctgctctcccaagggttttattttatttctgaatctagagaacagtattgggcaggaggaaaaggcttggtgtctgcggggggtgtcttccctgcctgtggcatttgtgtgttggctttgcagctgctgtctgagtagtggccactggggtgccttcactgggccagtcaacggggggctcctgcccaggccacagagaacctgagttcccgggagctgggccctgcctgcagccagggctggggttgccagaggccctggagggaaggacagtccctgctggggaagaacagccccggggccccctggtcaccgagactcagcctctgctggagaaagccacgccctccctgctagcacagaggcctgactgacttttttgcttaacttccatgttctgggtgatggaaactgccaaacctcctgtcagtgaggactctttccgactgcccagaaagtgggggtggaggaccgaggctacagctccacacgccccggtcccccagagcatctgccccaggtacacctccccctgcgccccgcacgactgcgggagccagactgtccagggaaacagcctctctcttttctacacactcagccacaaagccccccagctcccacaccgcgtcccagctcccctcttttgtaagtatgtgaaaaggaaaaaatgcaaacgttggagtttgggctggagctcctccctccagctgcgacttttaactatgtaataatgtacagaggaagctgttggtgttctaagactctgtgtggctgtgcaatttctgtacatttgcaattagaaatattaaagatttatttagctattttaagcccgactcgtgtctccattcagctgtgtgttaagggatgaccctgagtccggagcggacactgtcctttaccaaggggaccccagcatctggttcactctggtggcattcgtgggcaggggatacccctaaagccagtggtggtggtctggccagcttggctcactgggagatctgggattgccccctcctcctctgggttgaggggtctctgcaccagggagtagagcagttgtcctcttaaaggctctt

SEQ ID NO: 5553 - DNA, 1225 bp, Homo sapiens
cctgaaaaaggaataaacgaatcagttgaagggagaaagcacagaccaattctgatttttctcttttctattttttaggttaccaaaagagatgaagactcttccctaatgcagctgaaggaggaatttcggagttatgaagcattacgcagagaacatgatgcccaaattgttcatattgccatggaagcaggactccgtatttcacctgaacagtggtcctctcttttgtatggtgatttggctcataaatcacacatgcagtctatcattgataaggtttgtgaaattagagatgctgatgttctatcattgctgttacattgaagagtattagaatattctaaagagtctatacacaaacagttggagattcctatgtttttaaatgtcagactcttataaattatccttattttctttttatttttctacttgcaaaataaagggatgcaacagggaaacaaatacatgatactagcataaaagcagtgaggcttacaaagtctcaaatttatctatattctgacctcagagagttaatacagcttataagttttctaagtgtctaatgatgaatttcatagggcagattctgaggtgaaaatttaattcatcactgatactcctactgtggaatctgaagacacttgaaaacgtattaaatatgttgataaattgaaagtatttgagtataaatgtgtcataagaaccaaagtaaaaagcattctcatttctgtttgttagctacagtctccagagtcatttgcaaagagtgtccaggaattgacaattgttttgcaacgaacaggtgacccagctaacttaaatagactgaggcctcatttagagcttcttgcaaacatagaccctaatccaggtatgtgggaatatgctcagttgcttatatttttttctacttttgaggtgaataacacaagagaattactgctaacattcttcccccccaacccccatgcccttggtggcttattttagacgctgtttcaccaacttgggagcagctggaaaatgcaatggtagctgttaaaacagtagttcatggccttgtggacttcatacaaaattatagtagaaaaggccatgagacccctcaggtaagtacatttattacatttctgactgctgttgtctctaactcagtttcatcctgaacatcttaaccagctgttttgttaattggactccgtatgtgactcataag

SEQ ID NO: 5554 - DNA, 1225 bp, Homo sapiens; identical to SEQ ID NO: 5553

SEQ ID NO: 5555 - DNA, 1149 bp, Homo sapiens
aaagagtacagattcaccagaacataagagaatgggatttttctgccagaaggtgagctatggtatgtacagtttagttagtgatgatttgttgtcttctggcagctatacttaataccaaaaaattttaagagagatacacacaatagttgaacctgttatgggcaaagtgataattcagtggtaacttgccagttcaaaattaggaagtcattggcaagtgcatcctgagccctgcattctgtggcttgcgtgaggtatgagtacacatgaggatctgtggtttgagtccattagacctcgaaagggcggttcatgatatgtggttccaaaagcttgtttggaaacaagcttttgaactttttcatgtggaatttacaaaggtaacttttgctctgcaactcactgaaatctctttccattattttttaaatgtttgtaaattgtggcttggtttactcagttgtacagttgacctttgaacaacatggtatgaaccgcatgggtccacttatacgtggatttttttcaataaaagttataccaactatgcctcctgtctccccttctacctctgcctcctccacttctgcctctgctacctttgagacagaaagaccaacccctcttcctcctcctcctcagcctacccatcatgaggacaaccaggatgaagacctttatgatgatccacttccacttagtgaatagtaaatatattttctcttccttacgattttcttaatattttctctagcttgttatattgtaggaattcagtacataatacctataatgtacaaaatatgtattaattgactttatgttttcattatggcttctggtaaatagtaagccattagtaagtaaattctgggggagtcagaagttacacgtggattttcaggtgcgcagggcgtcagtgcccctaactcgtgttgttcaagggttaactgtacttcctgataatcaaggtgagaattggaaatattttgcctcacatgccagtctaggaaaaagatagctacttttgttgtcattgttgtgatatttggtcttttgagaagggtcttgctctgtcaccctggctggaatgtagtggcacagtcatggctcactgcagcctcaacctcccagactcaaacgatc

SEQ ID NO: 5556 - DNA, 1232 bp, Homo sapiens
ggctgctttcctcccttctttagtatcacaaagagtaacagtactctggaattattgcccactagcctagtgaaatttttcttcattgggttatttgactcttctagtgaaattctattaacagctgaaatgatgtctctctctctcctgcaacatcattattcccctgtctactggctcattccagttggcacacacatactatatttcatctattttttttaaacaaccatttcttgaccacagtgccttttttagctgctacccaatttctctgctcccctttacagcaaaacttcttgaaaaagtttcttctgttcatctttagttctcatgttctctccggaaaccactctagtgagatttttaaccccaccactctactgaaaactgtacctgtcaagactacgaagtttatttcttatttgacctattagctgtgtttggcacaaataggtgcttccttttgtgaaacactttctgctttggtttctaggataccagattgctggtttttctacctacttggcttcatagtctcttttttggttcttccttattacacctacctcttaatattggactgcctcgtgggatctctgttgttgttgttgttgttgttgttgttttgtgagacagagtttcactcttgttgcccaggctggagtgcaatggcgtgatctcggcttaccgcaacctctgctgcccgggttcaagcaattctcctgcctcagcctcctcagtatctgggattacaggcatgcgccaccacgcccagctaattttttgtattttttagtagagacggggtttctccatgttggtcaggctggtctcgaactccggacctcaggtgatccacccgcctcggcctcccaaagtgctgggattacaggcgtgagccattgcgcctggctgactctcaaatttttatctctagcctggaactccaggcttgtgtatgctactgcctacctgacatctcttatatcttctatccttatttcaaattgaacttaccctgtctcctcttccccgtgtcccttttataatcttccatatctcagtaaatagcagcttcatctttccattttctcaggtcaaaacctggagacattcttgactcttctcacccattacatctgatcccttaggaaatcttagcagctctgtttaaaatatatccagaatctgaccacttctcatcacttgcactggcataagcctacatt

SEQ ID NO: 5557 - DNA, 1148 bp, Homo sapiens
tttacactgtttatgcttccagatgtttgtgcagtgtctaaggtaacagttaagtcattcttgttgctgcacggaagagcaatcatgcccttctcttgtgtaatgatgggatttgcttcctgctgtccctgaacagtattgtagggaggttgaagattgatgtcaagggaccaagtgcttcccagcacttgtggggatggtggggtggggggagagtcacgtgtccaccaagggccaggtgccgtgttcactaatgacactctttgcctcccaggcacccccattttgcagcacttgagaactgaggaagttgaatcccccaagatcacagagctgggatcgggagagccaagattccagtccagcctgctcactgcgttgcctgaatatttattttcactgtcttctgccctctggcaccttgaggagaatcctaactctgtgcttttgtttttctcttactaggcttggccggtacaggtgtgagaaagggactactgcagtcctcactgagaaaatcactcctctggagattgaggtgctggaagaaacagtccaaacaatggacacttcctgaatggcatcagtgggtggctggccgcggttctggaaggtggtgagcattgaggcccagtaagacactcatgtggctagtgtttgccgaatgaaactcaactcaataaaaaacaaaaaccaaattgggcagctgaggtctgggcactgtgtggtgtttttgggggcagtagggggctgctaaggccattggcctggcccttcagggtgctgatcctccttgagcactggcctaggctcagaggagagcgtaggagccatgcgcccctcctgaggacagataggttctgtctgctgtcagaagtcagagtggactcccttgaggcttcaggtgaccatcgatacctaccctttttgctggctgaatttgtttggggtggcctcaggtttggtttggttttgaaatggggtgataagtgcagcacaccctccacctcagcagccaagtaggaaaaaaatggcaaagccaaagctgtgttctcaagcccagctcagttctgagaaccaagagaaggtgagcaggtgcaccgccagagctgtgtgaaggtgggtggacctcactttggccggtttca

SEQ ID NO: 5558 - DNA, 1192 bp, Homo sapiens
cgactccctgggccatctgacctattcttcaatactctgctaaagcagcaccagcatctccagctcaactcctgtaggtcattgtcatgtccaagcttccaggagccaccccaacaacatatcagggcttcctcaaggtgtctgggccagtacactaaatcctgagtcataggtaaggacacccagaccaatgaactcacccctctcctaccttgtgttacagaccccagtacaatgacctcaagatccacctctaggtgttcttaaaactcctgttgatctgtattagccagatcctgcaattctctccaaagtaaactaccctttctggaaagtatgtcttcacttaggctgtgctacgatttacttttagctattagtctggaggcaataaagggaggtgtgattgatggaataatggcccccaaagacacccaggtcttaatccctggaactggtgaacgttaccttctacagcaaaaggaactttactaatgtgattaggttaaagatgttgagatgcagagattgttctggcttacctgagtcactcctaaatatcatcacacgtgtccttataagagggaggcagagggaaacttgactgcagaagaggagaaggagatgcaatgacagacatggctttgaggatggaagaaggaggccaggcgcggtggctcacacctgtaatcccagcactttgggaggctgaggcaggtggatcacttgaggccaggagttcaagaccagcctggccatcatggcaaaaccccatctctactaataatacaaaaattagacaggtaaggtggcccacacctgtagtcccagctactcgggaggctgagggaggagaatcccttgaacccgggaggcagaggttgcagtgagccaagatcgcaccactgcactccagcctgggggacagagtgagactctgtctcaaaaaaaaaaaaaaaaaaagagagagagatggaggaaggggcacaaaccaaggcatcccagcaaccaccagaagctgagagaggcaagggaacagatcctctgccccaagcctccaggagaagccagctgcaccagcgcctcggcttagcccagagagacgggttttggactgtggacctactgaactggaagagagaaatttgcgttgttttaaggcactgagttcatggtgatttgttacagcagc

SEQ ID NO: 5559 - DNA, 1127 bp, Homo sapiens
tcactgcaacctccgtctccggggctcaagcaattctcctgcctcagcctcccaagtagctggaattacaggcgtgtgccaccatgcctggctaatttttgtatttttagtagagatggggtttcaccatgttggccaggctggttttgaacttctgacctcaggtaatccacccgccttggcctcccaaagtgctgggattgcaggcgtgagccaccgcattttttttttttttcttaaagcacactctgtagtcttttttttttttttcccccacagccagtcatattactcttttacatagcattggcattacaaaatcttttgagatcgtctttattccttctccttcttccttcaggtcttgaaatacctttcctacttgtctgcctgtggaacttcaaggttcagcccaaatgtaatgccctctctggcacctcagtctgttctaatgaattgcttcttcatctttgtttctccaacacttttcttacccactttagttacagtactcataacatcatactgtcatttatctgtttagtgtatgtgcactgcttgtgagttagtatggagtggtgagaaataaggttggaggtcagcagatgatgagtacttctagggcaaggatcacataatattattttatgtcatcatagccagcatagtgcctagctcataggagacactccatgagtgtttgtagaattggatttttaaaacctggtttctggaatattttattttagtttccaatccttgagttttttcctgaactatgaattctttccacctccaggagttgaaggcataactggaaattgtatccaaggatgttcttagttgctctcattctttctccactctcaggaactttgcttcttagtcccagataatatggacttcatttgactgtgatttcattattcctatttagttgaattaaactctttcccttgccatagggaatgtctgtatcaaggatctgacagatgagaaccagagatcttgggctcttgttttttgttttaacctctgtaagtttaaaaaggaatttgaaacattttctgcatgctcctgattttctaaaatggatacaagtccctctccttgagaatggtcaccgg

SEQ ID NO: 5560 - DNA, 1264 bp, Homo sapiens
gacagctgtgggcaggggccccaaagccggaagcaggtggggcaagtggccttggccagccaggcctctgaggctggacgttcatacaggcagcagctggtgggccctgcatacagatggacagagtactgcctcagcccccagcatgctcttgctaaccagagccgaggtaatggtaactacccccggggcttggtgggtgctgcgtgccctgtactaggttgtcatgtgactgtcctcgtgactgggaatcgggcagtggaaggagcactgagttgggagtcacttgactgagatgcaagccccggctcttccacagctttgccaagacttggacactcagcccagtaggtcagcagacttacatgaaatgaggatggtcccaccagccttagatttggggggattaattgagttagtgacatgtgtggcctgctggcagtcccatggtggcagcctcctcctgagtggctctggatggccctccccagcccccttagctgctgcagtagctcctcagccctgggtccttggattcaccctgccgtctgtctcccagggcaagaagtacaagcccctggacctgcggcctaagaagacacgtgccatgcgccgccggctcaacaagcacgaggagaacctgaagaccaagaagcagcagcggaaggagcggctgtacccgctgcggaagtacgcggtcaaggcctgaggggcgcattgtcaataaagcacagctggctgagactgctttgtttcctggcacttccactgattgggtggaggtgggtgggtctggttttggggaccaggtgtctgatgggttccagcaagcgtcctgcccaccacagttgtctgctctggtggggcctggagagtcctggccatggggatctgctggatgccagcacagtcactttgcgtctgtggggagaagcggcatgcctgtgcgccactgaggggagcgggtgaggtcggcaccatctaaggtggttggtgttaggtttgagggtccctgggtgatttggacgtgcgggatatttgacgtctagtctgatcggcagctccagacactaagattttcccatctggggtgaaggcacaggtgtgggccacatccaggactccctgctaagagtagaaggtggggctcgaggcaagtcctgccttgggagaagctgtccacagcttcctcagtgccacagcgccgtgccttaccttcagggtctcaaggcactttcctgtgttgcagtcccagactttgacc

SEQ ID NO: 5561 - DNA, 1235 bp, Homo sapiens
agtaatcataatttgattttttttttctggtatgcctctcaagttctaatggatcaaaaaaggaaccgtcaaagaatacttaaaaccctttaaactgtgttgagaccgtctgtcctgcgtcctggcttggtctcacagtttccctcctgttttaggtgcccaccagctgacctctcctccttctcagtcagagtctctgctggccatgtttgatccactgtcttcacatgaaggtaaaccagtgaaatgaactttttcacttatgtcacagacaggaggaggaaaccaaatccccttgttaatgcctttgttagatatgttgtgtctcagttacaaaactttttttcctgtgttgcaggggcttctgctgtggtaaggccaaaggttcactatgctaggccatcgcatccaccaccagatcccccaatcctggaaggagctgtgggaggaaatgaggccaggttgccaaactttggttcccatgttttaactccagctgaaatggaggcattcaagcaaaggcattcttaccctgagagactagttcgaagcaggagctctgatatagtatcttctgtccggagacccatgagtgaccccagctggaaccggcgtccaggaaatgaagagcgagaactccctccagctgcagccattggtgctacttctttggtggctgcacctcattcatcatcttcatccccgagtaaggactcctcaagaggagaggtatgggacataggccgtgaaaaagaattatgttctgcctgcctagttctcttgatatctgaaattaacatggaatatataaatctaggattacagatagagagtagtcatgattaaagatgatttgtcaatctatgggcccacaaccataaccgcaggaaacctgtacaactttggttttgtagtgatactatcttgcatttttatgacacttttagtttctctaagcaattttgtatctgattttatttaaaccttacaatatctttctgagatgttagatgagttgttttttgttttttgagatggagtcacactctgttgcccaggctagagtacagtggtgcaatcttggcttactgctacctccgcctcccaggttcaagcgattcctctgcctcagcctcctgagtaggtgggactacaggcatgcgccaccacacccggctaattttttgcattttattagagacggggtttcaccatgttggccaggatggttttga

SEQ ID NO: 5562 - DNA, 1223 bp, Homo sapiens
tggaatcagtgaatttaaatgaatggggttccattcaaaagtggtatttccagaaagtaaatgcatatttcacttttggggaccctacttttgaaagactttggtccatttttttttttttttttttcaagatgaagtttcactcttgttgcccaggctggagtgcaatggcacgatctcggctcactgcaacctccgcctcctgggttcaagctattctcctgcctcagcctcccgagtagctgagattacaggcacctgccaccatgcccggctaatttttgtatttttagtagagacagggtttcaccacgttagccaggctggtcttgaactccggatgtcaggcaatccaccatcctttgccttgcaaagtgctaggattacaggcatgagccaccgcgcctggccaactttggcccattcttttaattatctttaatagtggtaaatataaaatgaatagctagagatagtagtaagttaaatgaggttgcgtgactacagcttctgcccatagacaagtctaaggcctgtgcatgtttacagggagaggtcaggtggcccacagagggtgatggagatttctagagtaggagaaacgatagtataggccaggatcagggaggtgatgagataagagaaaatagttagattgcttttcatctttcaggtctcagcttaaatgtcacctctttgaaaggacttttttaattgattttgctaaagtcggtcttccctgttatttttgggctctgtccttcatagcatttatcataacttgtttattattgttttttgtcaaggcccatgaaagtagggaccttatcccttcttttgccattgatatgcttcagagggaaggcaatgaagaacattgctactgcaaggcctccaatgggtgggactgcaaacttgaggaagggacttcatatttctttaacatggactttatgcttatgtttggtgctttttgttctcttgtcttcttagaatagccttatcaggcagttattaatgtttccattttatagatgagaaaactgaggctcagagaagtgacgtgacacagccagtaagcagctgagctgacatttgaatttggagctttgtaatttcaaaacccacaggataccacatgatccatgctctgtggaatttgttggtgtggtcagtgtaaaaggtgatcaatagatatgtaatggaattcctagacagtattg

SEQ ID NO: 5563 - DNA, 1196 bp, Homo sapiens
ttgccgttgttgttttcccaccttatgggtctccaaggacacagtagaggatgggtggctgagccagtgtatgtgtgagggtggggaaggaggtggagggaattatgtgcggaataaggagtggatactagctgttggcagaaaagcgttgaacaccaggttaacgagcctgggtttattttgtgagtagtggagacccacagaagccttctgaggttatgcttgagcagctggaggattaccctgatggtgggtgttagatggatgggattgggggagtgtggaggcaggaagacctgcgaagggtctggggaaccagcctggggggatggagggaaggccagcatagcacagtggggaaggtggagaggagaggaaaggtttgaagccagtttgcaggcaggcctagctgaatttgagttgactgcatgggtttggggtgggggaaggagaaaccagatctgatcgctggtttgggaccccattaatggaggagtggtgctgccactcctaaggggtgaaggcagcttggctgagggtcaaggccaagaggcagatgggcaattcagtggtgactgtgtggagttggaggagcctgggagatattgtgttcgggaggcccctgaacatgactgatgctcagaagtgtggtctggccagagatagagtcagggtgggcaggcaggcctgggggtcagaaccaccagagagaatggggtgcctggaagagccagtgtgcctgcccagcattgcttcacccctgcatggtgatgctgggccttcgtggctgcttcttccatcagactgggaagactgggagctcctcagggcagagatcactgtctgcacccagcccagagctccggtgccagcacacagcctggcacctggcgagtgtaggtccctggggaaggcaaggaggatgcagcatggagctaaggaaggcacagaagggcaggaggaggagacctcccggaccaggtgcagcccatcagagcctctggggagtgggggcacagcagaaggctgtggtttttggggaagcaatgggaatggatacccactggcacccacacgggcttccatctcacactgttccctcaccagccctgcaaggtggattctgtgactgctttcacagatgagggacggggccaggattggagcccagatcttcaaggaaaacacatcttttg

SEQ ID NO: 5564 - DNA, 1157 bp, Homo sapiens
tcagccttcagcacaccccatctcaccctgtcctcataaatcactgcaagggggggtattgccatgtcccatttcacagatgaggaaactgagggactgcctgggatccctcagccagtaaggcaaagctggacctcagccccaagcctggagctcaagcctgtacctttaacaggatgacactaccccactgccggaattctgcagacaaagcttgtcagggcgtgaagggcctggggagtcgggagggactagctgcaggggcatgagtcaggccccctcatcactgggctttaccaaaaatcgtgtttccacatcagaatcttgagccagggctggtctcctgggccttcaaagccatgagggaggagcagggagctccctgggactgctgaagcaggcgggggacagagctgcctgcgccctggtgagagggaggcttctgggcaggtgccagggcaccaatgggcagataccagggcactgggggccaggccagtgtcccaggctggacttggcttctaatgacacagccttagtgcctgctgcttcctcgcttccccctctgcccctcctggggctgcagtcactgcctctggtctcccagccatgtcctgggctatgtctcacccctcagtgttcctagctgcttcctggacacagcctccctgagaaggtcccacagtccccccagctcatcccaacccatgccgtatgctccatcctgcccacacgcacatggcatgccctgctcctccccacccttctctgcaaatggcaccaccatccgccctgtccgagccaggaaccaggagtcacctctgaccttccccatcccacactgctgatccactgaggtgccaagttggggagtgaagtcttctcatgtctctcgcaccctcctaggagctgtctctcccacagccaccttgacagagaccccacccttcctctggcttcctcacccactggccccagcctcggtctcctcctccagcctttctcaccctcgtctaccaaaccctccagcggctcccagcggcctcggggacccccacccagctcggcaccccagggctccccatgacctgtggtccctctcagctggtctcccccacaccgacctctctccctgcctcttggccccacgtgctgca

SEQ ID NO: 5565 - DNA, 1153 bp, Homo sapiens
tgccagggacatcctgggcagattcaggggcagatgccctatcccccaggagacctggcccttctctctcagacccaataagttggaagggacgtcagaagcggtcatctcatctgccccttattttatagttggaaaccctgaggcaagagagggaaagaggcctgtccaaggtccgggttagtgacagagctgagctgagaacagggacgttgtgccccactgtcccctgtggtttgtgaatgacctccaggtcagggggtcacaacttgttcttagtaaacttgccagctgttggggtcacatattcccattctggggcctcacaaacccccgaatccagccgggaccccatgccaggagctggtctagggacagcatgcttgtgacccacagactgttaaagccagaagggacctcagagagtcccttatgctggaggcgccctgtcagccgtggctaggggccccttgctctatgctgtgccttgctgcccacaggctcccagacaccagtgcccactctgcccagccccggactgggtgtggctcgcagatgaacaagatgcagggcctgccttgaggggtgtctcctagaaggaaagccagactctccggcccagccagagagtccagacatggcagggacccgtttctcagatgaggagcctgaggctcagagaagggaggcgatgtgttcagggccacccagcagaagcctgtggggctgggcaaccttctcccactttatgggaggagctgcagccttggctgggagctgggcggggagtagccaggaccaccccttgcccgtgccgtgacatggaaccttcatcactaagggggctggagtgggaagagggagataactgtgtggtctccagagcaaaagagaatgagaggtgggcagggggagtcttggcaaaagaccaagttccacttccctgctggggaagtcaaggctcagaaagaggaaataattgccccaggtaacacagggcagaggagggacaaaaagctgggcatggccccagccagagcctcatctgcctactccgtgaagcctcccaggtactctgctatcctgggaaacgcacagggaggccacacagagacactgctcacaagagtcagaccaaggtgccagcacagcc

SEQ ID NO: 5566 - DNA, 1197 bp, Homo sapiens
ggatgtgagcgctgagcccttggcaggtactgcgtggccaggaccacgggcggcaagggtaggggaggagaagtcggtgggggagttaagggctcctcagcaggccccgacgctcgcgccgctggccccgccaggcccattccgtggaccggcataccaaagccccgcgcgggaggttggggtcccggcgctccagctccgaatcccgcagtcttctgcccacacggcgcgcagaccgcgataccgaggcctttggggcagcttctcgcccaaggtcaccctcgcggcggcggagctccgccggccacagcgcttagagatcccgcccccgtccgtccgctggcctttcggggcgtagggtgggcgcggcttgacgacctcgggttcgagccaccaatgcctgaggcctgacgagccgagctgggagaaagactgcgcctggacttagctgatcttctgtttaagtaaaacattcagcatcccctgttgctgtctctgtcacctgttgtaacctgccctttttgtctttcagctaggtcgctgtcaacctgatatttctctccactttgtctttgtcggggtatctggatcctgttttatatctgtctccaccttgcttctgtgtctgttcaccctgtctctgccactcagcccttactctaattcagggcctgtcagtctggctttttggccatctgtctgtttctctctttctgccaactttgtttttgcctcttgtctctctttcctgagtttgggtggggcagggctgcccagacctctgagccatggaaggtgactcatgaccccgtgaagttccctgcactggtgacactctcagtgactcgaccgcagtttggcctcaactctgacaggtgtcgcccaacataagtgtcagagtgcaggagagcctgtcagggagacaggaggcccattttagggccagagcagcttgatgagtcctctccttttctcgcctgtggtttctcaggcctgcacagcttcccaaatgccttcgctctatccactcaccacaggatggtctccagggatctctggagcctgctctttgagttacagctgtttaacaggcctgtctacaggctaagaaaggatcagactgaggtctttggggctactggaacagtagcagggtttctgggataactgcatgcttagttcagagattgtgtcagc

SEQ ID NO: 5567 - DNA, 1120 bp, Homo sapiens
aaatgaaatgaaggacacatgatctgctttggcttcagactttaaaagagcttttgctgtttcctcttctgcagttaaacacagtgggaatatcacttttgatgagattgtcaacattgctcgacagatgcggcaccgatccttagccagagaactctctggtaagagcaggacaacatgtaaccgccataactgtagttgtgtttttcactgagtgataacattcttcttacttgaagggtgctcagtgagacccaagatggggtgcagttttctgggactgaaaggatggatcgtaaattggatgtgtttaatctgggcatcaaggacccatggaagctttgcattccgggttatggaactagatggaactctatattctatattaggggagcaggaacctcattccttccattgcctgctatgaaccccttcagtattccccagtatctgcagattgtgagggactgagccagcacctccaatgccaccatttctttacttaaaggaaccattaaagagatcctggggactgcccagtcagtgggctgtaatgttgatggccgccatcctcatgacatcatcgatgacatcaacagtggtgctgtggaatgcccagccgtaagtgacattttcattgttacagtaggggtgaaaggggggccacccagtgtattcacagagataagctgggaagttttggaaatggttactggtggggtgggataatccttttaaactttttactgattttttttttctttcccacagagttaagcacaaaggaaaacatttcaataaaggatcatttgacaactggtggattttctggtgtggcgtcttccttgagggagctagctcctttgtggggtggtcagtggggtcagggtggcagaacctgtggagaagtaacaagcaccttgtggtgggtaacaaaactgccctgtatgggctgggctgagctcagaaaggaagcctttctttcctttttttttttttgagacagagtttcgctcgttgcccaggctggagtgcaatggtgcaatctcggctcaccacaacctctgccttctagattcaagcaattctccagcctcagcctcctaagtagctgggatta

SEQ ID NO: 5568 - DNA, 1213 bp, Homo sapiens
ggaggaggggagggcgaggccgggcacctccccctttataacgcgccccctcctgggctctcgggccgtctcctagtcggctcttcccgtctcgccccctcgcccggccgccccgggcccgggtccggccagggagctcccaggccgcggctcgggggctgaccccccgcccgccgccccgcgcagcccggcggaggcggcgccgtcggaggaggaggagcagggcactgcggctggccccggatcgggcgccagagcggcagcagcttcggcagcagcggcggcccgggcccatgcagcgggacgcgccaccccgagccccagctccggcgccccggctccccgcgcccccgatcggggccgccgctagtagtggcggcggcggaggcgggggcagcggcggcggcggcggaggcgcctctgcagctccggctccccctggcctctcgggaactacaagtcccagggggcctggcggtgggcggcgggcggaagaggcggggtcggcgccgcgaggccggaagtggccgtggaggcggaagtggcgcggccgcggaggggcctggagtgcggcggcggcgggacccggagcaggagcggcggcagcagcgactgggggcggcggcggcgcgttggaggcggccatggcaaagcagtacgactcggtggagtgccctttttgtgatgaagtttccaaatacgagaagctcgccaagatcggccaaggcaccttcgggtaaggctgggcccctcggggccgggagccctgggcctgcacccctagggccgacgtcgggatgcccgggccccccccgagttggtagagaagtcgtctgtccccgggcttgcctgctggtctctaggccgcgccgcaccccgccccggcctgacggagccggctggtggggaggagcctgaggcccgtggtgggggcggggaggggctgcagagaggcgcccgtgaggggagcgggatctctccaagggacgcccaagtgaggagaagggactgagggaaggaagcagaggctccgaacgagacaggctgccgggtggcggggtagccgcgtgccctgggtacctagcccagccccgcccgggaatctctttgctgctgcccctcctcctgtagtgggggaggggcgggccctgcggaaatggcctgatgagttctcgggtctccctttccgcctgcagggaggtgttcaaggcca

SEQ ID NO: 5569 - DNA, 1213 bp, Homo sapiens; identical to SEQ ID NO: 5568

SEQ ID NO: 5570 - DNA, 1213 bp, Homo sapiens; identical to SEQ ID NO: 5568

SEQ ID NO: 5571 - DNA, 1207 bp, Homo sapiens
gtcaaaggaccccagaattgtgagacaagtgcctccctgccctcaggggcccttgggagacctgcttaaggaaagataaaggcgctggaagagcctgttccaggaggcggggagtactggggggcggggggtggcatcagagagactgccctgaggaagtgagcttcgcactgaaacctgatgcttggtattgaggtgaaggcgagttaggatcaggctcgggggagagggctcctagcagagggaacagcatgagcacaggtctggcatggaaggaggttgatgagagcctagagcagagagagtcaggctctctcagtctggcaagtagtgtggactttctcctgagggcactggggagccatggtgtaggtttgagcaggggagtggcaggaaagattggttttaggaaggtctttcaggctgccttggggaagggattgaaggtctgagggggtatctactggggcttcatagatgggaagatggggaggagatggccctagggggcaggaatggggtccctgtgacatggtgcccgcctgcagattggacagcccacactgctgctgtatgtggacgcaggccctgagaccatgacccagcggctcttgaaacgtggagagaccagcgggcgtgtggacgacaatgaggagaccatcaaaaagcggctggagacctattacaaggccacagaacctgtcatcgccttctatgagaaacgtggcattgtgcgcaaggtgggccccgcgggcccaggggcagctccgggaagaacgggttcctatgtggctccgcctcagctcactgtgtggcctcaggccagcccctctctctgggccttggtttccccactggttcaatgaggggctgctgtcaattaggttgggctcggggaggcaggcctggtctctggggcctgccatggtgaggcccaccccactccacctggtgactcagccctcacggcccatctccccacaggtcaacgctgagggctccgtggacagtgtcttctcccaggtctgcacccacctggacgccctaaagtagcaacgctggagccgcttccccagctcagagccccgccccaccccgtcctgattcgaggtcctcctggcctgagcgcagcgcctccaccctgccctgctgagcacagacggaggaagccgcttatcctgttttcatggacagctgagcactaaag

SEQ ID NO: 5572 - DNA, 1181 bp, Homo sapiens
accatcttctggccaatcaaggcttgctggagtgtctcccagccaatcagggccttgaggaggatgtatcctccagccaatcagggcctggggaatctgttggcgaatcagggatttgggagtctatgcggttaatcaggggtgtctttcttgtgcagtcagggtctgcgcacagtcaatcagggtagagggggtatttctgagtcaatctgaggctaaggacatgtcctttcccatgaggccttggttcagagccccaggaatggaccccccaatcactccccactctcctgggataatggggtcctgtcccaaggagctgggaacttggtgttgccccctcaatttccagcaccagaaagagagattgtgtgggggtagaagctgtctggaggcccggccagagaatttgtggggttgtggaggttgtgggggcggtggggaggtcccagaggtgggaggccggcatccaggtcttggctctgccctgagaccttggacaaacccttccccctctctgggcacccttctgcccacaccagtttccagtgcggagtctgagaccctttccacctcccctacaagtgccctcgggtctgtcctccccgtctggaccctcccagccactatcccttgctggaaggctcagctctttggggggtctggggtgacctccccacctcctggaaaactttagggtatttttgcgcaaactccttcagggttgggggactctgaaggaaacgggacaaaaccttaagctgttttcttagcccctcagccagctgccattagcttggctcttaaagggccaggcctccttttctgccctctagcagggaggttttccaactgttggaggcgcctttggggctgcccctttgtctggagtcactgggggcttccgagggtctccctcgaccctctgtcgtcctgggatggctgtcgggagctgtatcacctgggttctgtcccctggctctgtatcaggcactttattaaagctgggcctcagtggggtgtgtttgtctcctgctcttctggagcctggaaggaaagggcttcaggaggaggctgtgaggctggagggaccagatggaggaggccagcagctagccattgcacactggggtgatgggtgggggcggtgactgccccagacttggttttgtaatgatttg

SEQ ID NO: 5573 - DNA, 1238 bp, Homo sapiens
ggaaccccctgcatccttcctcctttcctgggttgtcctggagcgccccctagcctggcctggctctgcagcctgggaaggaacttgtgatccttgtgcctgtaaggactatgggggaagtagctgcatacggtagatgctcaataaatgtaggctctctccttccgtaccaaaaccaaacacctgctgggtctcagggaggcagaacaccacagcttaacaacatagattctgaaatcagcgatctgggtttgaggtgtgattcacccactcactagctgtgtgacttggggcaagtcacttagcctctctgcgcttgcttgcttcatgagtcaacaagggaccatattctggcttgcagggacggcagatatgaaatgcctggcacagtgcttggggtctagtatgtagcttccagaacccaccctgcccctctacctgggaggccaaatgggtgagtgggctggggcttagaccccacggctttcccacaccttcctccccattggccacaaccacgtctccctacttaggatgggtgccctgagggcagggcggggaggactccgggcatgtccccaggaatggataaacaatgcccagagtgtcttgttaaagagcccctggtgactcccagcggctgggttgcaacctctgattaaaccacccttttctcttccagcaacaactaaatgactcctctgtcatcatcagcgccctcaagacctacctggtgtcggggtaaggagcccctcggagaccaggtggccattgcttttggtggcttcctccagggaggcctcccctgagttccctcctgggagcacgtggagctgctgcttagatttccagagtacagagtggctcgcacctgtaatcccagcactttgggaggccgaggcaggcagatcacctgaggtcaggagttccagaccagcctggccaacatggcgaagctccatctctactaaaaatacaaaaattagccaggcatagtggcgagtgcctgtagtcccagctactcaggaggctgaggcaggagaatcgcttgaacccgggaggcagagggttgcggtgagccaagatcgtgccactgcactccagcctgggtgacagagcgagactccgtctcaaaaaaaaaaaaaaatgattttccagagtagcccgtggccgtcctcctccaagccccctactttgtcctccccacacctccctctcttggggaggtagccctggca

SEQ ID NO: 5574 - DNA, 1196 bp, Homo sapiens
gccgggtctcagcagggtttagccggctctgcgccctgcatggcccggccgccccgccagccccgcccgccgcccggccccgcccgccgcgctcctaccccgcccgcctcccgcaccccaaacctgctgtgccaggccgcagcaccgcctgccgcaccttccccgaagccggcaagccacagagccggcggcgcagcgcagccccagcgcgcctgacgccgctcggccccagcccgccctgctcgcgcaacggcttcgggcggcgccgccgcgcggcacgctgggagttgtagtccacgccgcgcggccccacccagccgaggagacccccgagtccgcgaggagacaggcgggcttcaccccggcccttcctccctgccgaccccggcccttgccccctgctgtccccagcgcccggatgtaggaagagcaccccagtccacaccacagccgaaaacccggagcacgctctcgggccccggccgagttcagcaaacacccagcaccacacctagaagctcgctaagagggcggtttcaggcagaggtgagcggggcggccgggttccgcagccggctctgtggcgcaatggatagcgcattggacttctagctgagcctagtgtggtcattcaaaggttgtgggttcgagtcccaccagagtcgaattttgatggctcctactccctgactttcacctgcgtgttttaaggactccaggacctatctaacaaataaggttcagaacgaaaatcataagtcacacccaactttgctgcgacacagccataaacctggtgtctaggtgactacgagaaatcctttctcgtaccatggtgtcttgtgagcagcctggcacacctgttggcacaaaggacacggatttggaggcccttagttaacttcaccatctatgatctctggtccctgcaacaaatcagttaacctatatttgtcatgccacccttatttgtcatgccacctccagagccataggcgagtggccagattctcggccctgttgggactcttggcctctgaaaaattggtttcttgttaagtaaccatgttgggcatccacagttgccacttgtccttaaacattaatagatccctgggaggctgaggcaggagaattgcttgaacctgggaggcggaagtcgcagtaagccgaggttgcgccactgcactccagcc

SEQ ID NO: 5575 - DNA, 1328 bp, Homo sapiens
ttaaaaaaataacaagaagttttttaacactttgcccaaagacctagcctcattcagtagatcagattaacccaagataactttctgaggcaagaattatgtcattctctgttttcctgggcagaagatctccttaccaggtaatataatagctatttttctggggtgctggtttccagggacctcatgtcttggatcaatggaatacgggggttggtgtcctcagatgagctagccaaggatgtcaccggagctgaggcattgctggagcgacaccaggtgggtggacctgcctgctgagtagcaaagacgtggctgctctgcagggccctagaggcctcattcccaccctttgtggtgagtcggtggttgacgtcagagtgggcatctgctgccagttacctaatcccttccctccttttggcaggaacaccggacagaaatcgatgccagggctggcactttccaggcatttgagcagtttggacagcagctgttggctcacggacactatgccagccctgagatcaagcagaaacttgatattcttgaccaggagcgtgcagacctggagaaggcctgggttcagcgcaggatgatgctggatcagtgccttgaactgcaggtgtgtgtgctcctggtttctgaccaagtgtttccttgctgaagggcctcattttctcacctgcctcttgccctctttagctgttccatcgggactgtgagcaagctgagaactggatggctgcccgggaggccttcttgaataccgaagacaaaggagactcactggacagcgtagaggctctgatcaaaaaacatgaagactttgacaaagcgattaacgtccaggtgaggcctctggaccatggagttggagtctggatttttcctgattgacatctgtttcttggcttatatagtcactgttatatctccaaggaatacctgcgttgtctaagaaaaatatgtacataaataatctttaaaactttatagattctggtatttctgagattttaataatgggggtgccacaggaaaaaaaaatattatcaaagggatggaaaacaaatgtgtgggtaggtaagggaataatgaacaaacaacaaggaagatgtaaaactgtttgatttatacgtcactttgctgtaaatctgacagcattttcctattatcaggcttaattttgttctgttctgatattctaacacctgccccacctgagtgacctggagacttcttgagttaaactctactctagtaatgaatgaaatcaagctttcttttggcattttacactcttgcttctaaagtgtcagtgtatt

SEQ ID NO: 5576 - DNA, 1196 bp, Homo sapiens
tatattgggctcagagagtacactgtgtctctatgtgaatatggacagttagcatttaccaacatgtatctgtctactttctcttgtttaaaaaaagaaaaaaaaacttaaaaaaatggggttatagaaggtcagcaaagggtgggtttgagatgtttgggtgggttaagtgggcattttgacaacatggcttctcctttggcatgtttaattgtgatatttgacagacatccttgcagtttaagatgacacttttaaaataaattctctcctaatgatgacttgagccctgccactcaatgggagaatcagcagaacctgtaggatcttatttggaattgacattctctattgtaattttgttcctgtttatttttaaattttctttttgtttcactggaaaggaaagatgatgctcagttttaaacgttaaaagtgtacaagttgctttgttacaataaaactaaatgtgtacacaaaggatttgatgcttttctctcagcataggtatgcttactatgaccttccaagtttgacttgtataacatcactgtcaaactttgtcaccctaacttcgtattttttgatacgcactttgcaggatgacctcagggctatgtggattgagtaatgggatttgaatcaatgtattaatatctccatagctgggaaacgtgggttcaatttgccattggtttctgaaagtattcacatcatttgggataccagatagctcaatactctctgagtacattgtgcccttgatttttatctccaagtggcagtttttaaaattggccttttacctggatataaattaattgtgcctgccaccaccatccaacagacctggtgctctaatgccaagttatacacgggacagttgctggcatgtcttcattggctatataaaatgtggccaagaagataggctctcagtaagaagtctgatggtgagcagtaactgtccctgctttctggtataaagctctcaaatgtgaccatgtgaatctgggtgggataatggactcagctctgtctgctcaatgccattgtgcagagaagcaccctaatgcataagctttttaatgctgtaaaatatagtcgctgaaattaaatgccactttttcagaggtgaattaatggacagtctggtgaacttcaaaagctttttgatgtataaaacttgataaatg

SEQ ID NO: 5577 - DNA, 1138 bp, Homo sapiens
tgtctattaagccctggcacagcctaagtgctcaatcaatcatagctgtatacaggttaggaagtactgcacagcatggaacaccccagtgtagctcttcagactgtgggaagctgaagagtgaaaatctgtattatccccacccaagcactgggtccccagcacacacgtctgctcacaggcaaataagtgcttggacaaggctccatgttctttgcaggtcaaattgtgcatagatagtggcacagcagaggcgggtgaaagaaggagtcaggagacctgggcctggccctgctaagctgctaattggagtgtggtctcagtttccctactcagagcgtggacatgggaccactgatagttctagcccttgtgtgtggctcacttggcatcttgtccactccccaggcagtggctctgccaatgatcctgtgagtattcaggaatcactgttgcccctggggatccttgtcctggagtggcccacctgcttgcccccagcatggcgtccgacactcccgagtcgctgatggccctctgtactgacttctgcttgcgcaacctggatggcaccctgggctacctgctggacaaggagaccctgcggctacatccggacatcttcttgcccagcgagatctgtgaccggctcgtcaatgagtgagcagacccagggctgaggaggggcaggggtcttaccatgaatgtgtatagagagattgggaccgtgtgtgcactatgtggggagtagctatggagatgaatgtgtgagggtgtgtgtgtgtgcacatggatgttcatggctgcaagagaatagtggtgtatccataaccgtaaaggtgtatatgtgtgtgtgttggtgtgtgtgtggaggggtgtgcacgtgaaggcatgggtgtgtgtacacatgtaagcttatgcagcacaggttatttctgactgtgaaactgcatgtgtgcatttagagatgtgattgtgtcaaaatctgcatataaatgaaggaattaagtgttgccccacacgtgtatgtacattcacatgcacatacctgtgcttgtgaattcagtgagcatggccacatatgcatgtacatgccggtgccagaataacggatccatgatcagggagtgaatcatcc

SEQ ID NO: 5578 - DNA, 1179 bp, Homo sapiens
cccgccactacgccaggctaatttttgtatttttagtagagaccgagtttcaccatgttggccaggctggtcttgaacttctgacttcaggtgatccacccacctcggcctcccaaagtgctgggattacagacgtgaaccacgtggaatttttaaaccttgctctttgttttatggaagtgagttcatgttgtgccccctctgcatgttgctttctttcctcatattttgcgggaatccctccagccctttgctgcagctttacagcagctggttcccagtgaactgggagttttaaatgtgtccctctggtcaatctgttcattaaataggtggactttagaaaggagttcccgattgctcttactggaatgcaagggatggagcagagaaccctgaggctgcactggggatctgtctaatctcactgtgctcagtcttcctgtgtattaaatggggagcctgcctgcctcccccagggtggtttcccagccaagtggccacatgctttctgcagaagggctgataagtgggctgccccgtggagtaggcaggctttggctcccagctagatttgaggtggaattttggacaatggaagaattttcattgtcttcttcccctgacccctggtcctaggaaagccaggccaccctgtgctaacccccctcctatggctcccttttaggttgaaccatgattccggtgacagagctccgctactttgcggacacgcagccagcataccggatcctgaagccgtggtgggatgtgttcacagactacatctctatcgtcatgctgatgattgccgtcttcggggggacgctgcaggtcacccaagacaagatgatctgcctgccttgtaagtgggtcaccaaggactcctgcaatgattcgttccggggctgggcagcccctggcccggagcccacctaccccaactccaccattctgccgacccctgacacgggccccacaggcatcaagtatgacctggaccggcaccagtacaactacgtggacgctgtgtgctatgagaaccgactgcactggtttgccaagtacttcccctacctggtgcttctgcacacgctcatcttcctggcctgcagcaacttctggttcaaattcccgcgcaccagctcgaagctggagcactttgtgtctatcctgctg

SEQ ID NO: 5579 - DNA, 1185 bp, Homo sapiens
tttgttttttgggtttttttggtgtcttgttttctttctcctccatgtgtcttggcaggcactcatttctgtggctgtcggccagagggaatgttctggagctgccaaggagggaggagactcgggttggctaatccccggatgaacggtgctccattcgcacctcccctcctcgtgcctgccctgcctctccacgcacagtgttaaggagccaagaggagccacttcgcccagactttgtttccccaccgcctgcggcatgggtgtgtccagtgccaccgctggcctccgctgcttccatcagccctgtcaccacctggtccttcatgaagagcagacacttagaggctggtcgggaatggggaggtcgcccctgggagggcaggcgttggttccaagccggttcccgtccctggcgcctggagtgcacacagcccagtcggcacctggtggctggaagccaccctgctttagatcactcgggtccccaccttagaagggtccccgccttagatcaatcacgtggacactaaggcacgttttagagtctcttgtcttaatgattatgtccatccgtctgtccgtccatttgtgttttctgcgtcgtgtcattggatataatcctcagaaataatgcacactagcctctgacaaccatgaagcaaaaatccgttacatgtgggtctgaacttgtagactcggtcacagtatcaaataaaatctataacagaaagtggcctttggaggtctttgtgtcatgggaggacgcttccctcacttctctgaagcctgccgggccgtgtggaacgttgcttgggcacctacaggagagttaactctgctcatctcctgccccatgagactctgtgcctttggaggcagttactggagcttgtaagctggacgcagcacctgctaggtaacaggctgtgacctgggctggggatcccatagccagcacaatctctgtcatcctactcacctgtggttgggcactcatgagggggtttttttgttgttgttgtttttttgacagggtctcattctgtcacctagagtgcactgctggaatatagtggcgtgatcacggctcactgcagccttgacctctccaggctcaggtgatctcacctcggcctcccaagtagctaggaccacaggggcatgctggctaatttttttttt

SEQ ID NO: 5580 - DNA, 1222 bp, Homo sapiens
acagggtttcaccatgttgcccagggtggtctcgaactcctgagctcaggtgatccggccccctcagcctcccaaagtgctgggattatagacgtgagccaccacgtctggccagttttctttattgtaatgtctgttttatatttaattgatttctgttgtgtatttttttttttttttaaattttcactcttgttgcccaggctggagtgcaatggtgtgatcttggctcaccgcaacctctgcctcctgggttcaaatgattctcctgcctcagcctcccaaatagctgggattacaggcgcccaccaccacgcccagctttttttgtatttttagtagagatggggtctcaccatgttggccaggctggtctcgaactcctgacctcatgatctgcctgcctcggcctcctaaagtgctgagattacaggcgtgaaccaccgcgcccggactctctctctttttttaaaatagatttctgcctccgtgtgtgtgtgtgtgtgtgtgtgtgtgtgtgtgtgtgtgtgcgtgtgcccagccttgttctttagtttttatatatgtatatgttttttctccctttttaaatggatttctgtctctgtctgtctctgtgtctgtgtgtgtgtgtgtgtgtgtgtgtgtttgtgtgtgtgtatgtgttagaagtctcactgtcacgcagagtgagactctctggatttaatgtccaaatattggatgttttttgtaaatatctgggttttttttttgagacaggttctttctctgttgcccaggctggagtttagtggcacaatcacggctcactgcagccttgacctcctgggctcaggtaatcctcctacctcagcctcccaactagctaggactacaagatgctgcaggttttgccatgttgcccaggctagtcttggactcccgggctgaagggatctgaccaccttggcctcccaaagtgctgggattacaggtgtgaagtactatagcagacgaaacatcttattgttctcaatgtttttatttgattctgttatcagagaacacattctttgtcattttagtcttctaaaatttactgtctcatgttttatggcctaccttatgatctttcttggtgattgtacctgtacacctggaaagaatgtctagttgttttttcagttgaatagtatgagtttattagcaagggattggtagtaacctaaatgctcatcca

SEQ ID NO: 5581 - DNA, 1147 bp, Homo sapiens
cctggaggaaatctcaggttcgtcagtcatctataccaaggtgataattgagtctgtgagagtgattcattcatggagatggtacaaggacaaaagaggcccaaggagaaaaccctggggattgactgcatttaaggagcctgtgaaagaagaggaaaggggaaaaacattgagatgagatggttaggaagatagaaaatgaagatagagcatagaaagtttgagaaggatcaggataaaatttctaaggaatgtatcgtaacatgcattttataatcttaagactacataaaattagtagacaaattttgtgggtaaaggaagagtaattgtaattgaggggtttattagtgaggtgactgggggtttgagaagagtgaaatatcagaatgagagagtgaggccactctttatggcttgcttattgagcgtgatgaagaatctggtcgagggatattaacactttctgttcggagatgtagatgtgttttcttctctcactaggatatggactgtttaatgttgacctttggggacattccacatcatgccccagtgcttttggcctgggctctcctccgtcacactctgaacccagaagagacaagcagtgtggtccggaagataggtggcacagccatccagctgaatgtgtttcagtacttgacccgattgctccagtcccttgccagtgggggaaatgatgtgagtttaaggctctgggtggtgagcatgggagtgagccggcagaagcattataataatgtaatagttataatggtggtgtggataatgggatcatgttgtaactaaccttttgagagcatttagacatcatcaggcattatttataatgtttatgaacattatctttttgaatccttgtaacacttcttcgtgttaaagattatcattctgttttatacattaggaaattgagactcagagagatgtaatttgcccaaagcaacaaaaatgccagtaaatggtagataacggtttgaactctttgccagtaaagtatgtcttaagaagatagctttggccatattgactggagaagtcactttcaggggacttaatcaactgtaacaagatgaattagaaattctcttgagtcttatgttggggtttgagtggcatggtt

SEQ ID NO: 5582 - DNA, 1085 bp, Homo sapiens
acccgcaaagctcgggtgctctatgactacgaggcagccgacagcagtgagctggccctgctggctgatgaggtgggcccggtgccgcaaggtggggcaggaatgggctgggtgaggagcagcctgggcactgggatcaggcacatggggcctggaggggccctgttggcaaagtggggaccagcaggttaaagagggcatatccagctctgaggaaaggatccttgctctgctgggtctctggagcaagtgagatgagcgccagccactgaaggtgtagcacatgccacgggccatggggaggtggcagctctgtccccacttagtcctggggccagttccacccttggccaggccatgaccgtcctctactgccatctctgcagctcatcactgtctacagcctgcctggcatggaccctgactggctcattggcgagagaggcaacaagaagggcaaggtccctgtcacctacttggaactgctcagctaggcaggtgcccccatcccccccgcattctggcctaggcaggagaggatgggcgcagccctgccacttaacttgtttgttggtgacacagttgttcagagtggggagaattcaccccattctgtccctgcccctagtcacctagctgtgagggtgcctgaggctgaatggctccacccctcccccagccctgcttctgacctgtggctctggagcccctgcccctgcctgcatccccgagcaccccaccctccaggctccactaaggagggaggggctgtctgcagcagctgcactcagcacctaggccagggtggggccgccgcagatgggctcaggaagccccaggtgcactcagcgagagccctgcctttcagttgccaaaagctgcatcaggggaatgcggcaaggcacacagggctctggcagcccctggggactgggcgctgcccctgggaggggagagcctggccagggctggtgttgggcccggagcagcatcttccggtgctatcctcccctcccacccctcacagctcaagccaagtccagcggccgcagtcttcacctctccacactcactttttatctggt

SEQ ID NO: 5583 - DNA, 1072 bp, Homo sapiens
gagtagtgtggagaactcagggcggcagctgtcccatccccagggcccctccacctcctgctgtctctgaatgccaggccctggggaggccctgaggatagaggaggaggcctggccgtgcctttctggagttcacagacccctaaagacaggaggcagggatggcgtcgtaggcctggagagcgcctggggggcgggagggcctgaggctgtgcttaaggcccagaggtcctggagcagggcatgtcttgtcctgaggcttaggcagggcccccaggggagttggggcaggaggtggggaggacaggatcgtggaggcttcgcatgtcatggtgtctgttggtttttaggctttcttgggaagtctggtgtttcctatgtagtttggggactaggccacacctctccctcatgcttgtcaccactgctacaccttgtctgcccactttctctccttcccgcccctggaggtgagaccctcacctctctcgtgagcatgctgcctcatgtcttccgtgccgtcgttctgtggctgggtgactgtccctcaggccgccaaccctagttggctctcacagcaacttccagtgctcctggacggggacttcctaagcagcatgggggccacacgggccggccacgcacactggcctgggtccgcattccctatttcaggctgttgtctcgggtcagatctccggaagcggcaggagcgctgggtctcctggtcgtggccgggcagcgtctttcttcttcagggtctggatgccacttcccgcctcctccctgtgcccagtggaaggagaaacatcctagagggtggagactgccctgtttttcttttgccattgagtcccagtgtgactcaagcacgaggccacctttctctgccagaggacagaaagcttcagtgactggcccagggtcacacagttctgccgcccagcccagcagcctgagccagcagtcaggatggggtggggacactccgtctctcttgagaccccactcagagaatggggctgacactgtaggagaaatataagcaggactcctgctggctgctcccctc

SEQ ID NO: 5584 - DNA, 1126 bp, Homo sapiens
cttgccctgagcacaggcgccctgggaggtgccaggaatgggatgagggcctgggcctgggcctgctcccagagagagggcagagccagacccacatgggtccagaggaagcagtgggagggaggagcctggggatggaaaggaccggctggggctctggtggtggacaaggggacttcaggtaacctggggggcatcatggtgggcagtggctgggccaggcctgacaccagccctgctcccccagcaccagattgtgcagtacctgagggacatgttcgacctggacaatgtgcgctacacgtcactgcccgcgctggcagacgacatcctgcagctgtcccggcgccgcagcgagatattgctggggtacctgggggtgcccgcggccagcagcgcaggcgtgaatggggcgctgccccgagagaatgggcccctgggggagctgcagtagaggcggcacgggctggggggtggcagagagaaggctcctcctcccttccctgggttggtatctgacagctgtggtggctgagggccgttgcccctgactttgccccacccccatcatctgggagtccccaaggcccagaggggacatttccatggagaagaacggttcctgggggaagcagaggccaggaccagtggggcctgtgggagagaaaggctgtgagagagggggttgttgtggagaattgggacaggcagagccaggatgccccaggtgggggaccccaaaacctcccatcgctccagggctgctgacaagggtgctgggagggtggaggtgaaggatggggcctagagccctgtggtgaaggtcacagtgtcctgagctagaagccacctgtggctatatggtctcagcatccagctggcctgtcctgatgccctccccacctcaaccgccttctcagagagtttgcaactccagagaaggagagtggggccaccttagtgggcagcaggcctgggccatccagagatggggcagaggtgggcctcccactcctgtgctctcttctgagcaggaactgggcccttgacagtgtcctttgacattccctcgccctaccaaagatcgtcttttctcctcccacctctgtcaccaccaaagacgggc

SEQ ID NO: 5585 - DNA, 1199 bp, Homo sapiens
aggcagggatgccacaatcataaccatggcaaagaccaggatcagaaaggcccaccatctctgaccccaaatccctgggcagatggttccagaactcagaattttcccagttgtagaaagatggggccaggtgcagtggctcacgcctgtaatcccagcattttgggagtacaaggtgggcggatcacctgaggtcaggagttcgagaccagcctggccaacatggtgaaaccctgtctctactaaaaaaaaaaaaaaaaattagccgggcgtggcgatgcatgcctgtaatcccagctactcgggaggctgagccaggagaattgcttgaacccgggaggcggaggttgcagtgagccaagatcgcgccactacactccagtccgggcgacagagcaagagtccattcccccaccaccaaaaaaaaaaaaaaaagaaagaaagatgatgtgatacatatcacatatttcctaacacccccaaccaaacacatttatgcatatgcataaagcagacgaggaaagattctaaataggctctgaatctcagttttctcatctctacaatggggcagtgatggcatgcacctcccagggctgttctgagaatctgatgcctcccattgcactggtgagcctggcacaggcacaggtcccaccccaggccctttgaactggctgttcctttggcctggaacattcctccccagatacctcctgagagggctccctcacttccttcaaggcactgctcaaatgctacctcttcacagaggctttccctgaccaccccgtctctttcctcttcctgcatagcctctgtcacctgacattttatgtcataaattactcatttattaatttcctgctctcccacagtggcacccgagctctgtgagggcaagactttgttcggttgtgggctatgcccccaacccctcggacagtgcctgcacaggtggacatttttgttggatgaaggattttctgttaaatgtgtctggcacacacagaaaaacaaagcccagcaggtacgatggtgattattattgttactggtggcgctctattattgttattagtgtctgttgaaaaagaccctgagctataccagcccttggttctccagcctgtgaaatgggcatcctgggcactgaggcactagccttgggaagctgatagggggtccctgcaggagag

SEQ ID NO: 5586 - DNA, 1175 bp, Homo sapiens
gtggcccagggcaggggcagtggctcactcctgtcatcccagccccttgggatgccaaggtgagaggattgcttgagcccaggagtttgagaccagcctgggcaacagaccgaggccccgtctctacaaaaaatacaaaaaaaaaaaaatgagttgggcatggtggcgcatgcctgtagtcccagctacttgggaggctgaggtgggaagatggaggatggcttgagcccaggagttcgaggctacagtgagccatgatcccaccactgcattccaacctgaacagaatgcagaatgcaacctgaactttcaaagataaaggaatgtgtggcccagcagtgtgtcctcccatgctcatcccctcgactccgtacaagctggcagccagcacagacctccccaccagtgctcagcttgtgcggagtcctggaatcctgacttgagtctaagtcctagggctcgtgaggaagggccgcacgtgcggtgacagggtccctctgataggttatatgcctctgcttttcaggaaggcccgaacaagacaggaacgtcctgtgccctggactgtggagctggcattgggaggatcaccaagcggctgctcctgccgctgttcagagaggtggatatggtcgacataacggaggacttcctggttcaagccaagacctacctgggggaggagggcaagagggtgaggaactacttctgttgtgggctccaggacttcaccccggagccggactcttacgacgtgatctggatccagtgggtgataggtgagggttccaccgcccttccctgctcacctgtatgtctcctgccactcgcgttccccataaggtgtcaggaccagggctttgcactcctgcagcaagtgggccagtgaggattccccaccccgcccaggcccacccccaccccgtacttcccaggactgagggacaggctcggcctaaaaggtagatttcttccttctaggttttgtttcagttgaatacctgctaccatccatttgggtgcagttttttgttgaaaaaattttaatggccaataacttactgcattcaaagtgaggagttttataagggttttatttttaataagatgaatagtttaagcttcgtgtctagccctgcaccctcttagcctaacagcacacctcgagcgctgtg

SEQ ID NO: 5587 - DNA, 1679 bp, Homo sapiens
accagcttggagaacctggctgttaccaccaggcctacaaagcagagccgccagagctgctgtgtagcgcggcctcccagccattctgagagggtgcgccccgttttatggtcccttcttacagaagaggaaactaaagcccccaacagcttcagtagcgtgcccactagaacaccccgagggccctctagtatctggtgaggacagctctgtcctaacccttgatggtgacaggaggctgggcctgtgcttctggacactttaggtgggagtttggggctgggctctgggtccgggggccccataagaatgcggacagataggacccacatgagctgtgtctgcaccttcagacccagtcacctactacacggccttgcacatcgccgtcctgcggaaccagccggacatggtggagctgctggtgcatcacggggccgacgttaatcggagggaccgggtaagtgccaggtccagcttgctttgaagcagggttgggcaggggcctgagcagcttcccaagccaacctggctgtgcttccttggctcagatccacgagagtagccccttggacctggccagcgaggagcctgagcgcctgccctgcctgcagcgcctcctggaccttggagctgatgtcaatgccgctgacaagcatggtgggtgcctcctgcaggaaagcaggacagctgggcccccaggcaccttgtgggggacacccagggtgccccaggacaacagctaggtgggcagactggatgctggccctggctggtggcacagcatggctgggcacacagggattctgctgacttgctgagctcagaggcttcagagaggcagtgcagtcattgtccctgtgctggccctcaagggccttctataggaagaaatagggcatgtgtgcacttagtttccaagaaacaatggcttcccattgggagaggcccagccaacatctcaggtagcatcttggggtccagaaaaatcctacctttcctggcctttccgctcccacttctctgggtggaaagggaatggccagaagcctgtcaccctcagccctcacctgagctgagagttgtctctgaaagttcatcttctgatcctctgagtgtctggatttctgccacctcctctgggttgccctgacctgggcttcctggcctcctgctcctccttgctctccctccctccctaggaaaaactgctctgctccatgctctggccagcagcgacggggtgcagatccacaatactgagaacattcgtctcttactggaaggaggtgaggctggcgcgctcctaggcctcgtcctctcacccgccccttcgatgtgtgctgttgctttgccagggttgaaggccttctcccagcatctcttgttctatggctcttctaggggcagacgtcaaggccaccaccaaagatggggacacagtgttcacctgcatcatcttcctgcttggtgagaccgtgggaggggacaaagaggaggcccagatgatcaaccgcttctgcttccaagtcacacggctgctgctggcacacggggccgaccccagcgagtgcccagcccacgagtccctcacccacatctgcctgaagagctttaaactgcacttccctctcctgcgcttcctcctggagtccggagccgcctacaactgctccctg

SEQ ID NO: 5588 - DNA, 1323 bp, Homo sapiens
tttttttttgagacgggagtctcgctctattgttcagactggagtgcagtggcatgatctcggctcactacaacctccacctcctgggttccagcgattctcctgcctcagcctcccaaatagctgtgattacaggcgtgcaccaccacgcccggctaatgtttgtatttttagtagagacagggtttcaccgtgttggtcaggctggtctcaaactcctgacctcaggtgatccgcccgcctcagcctcccaaagtgctgagattacaggtgtgagctaccgcaccccgccgaggttagcactttcatcaccaaagaccccgtgcctctcgtggtcctttgagggatcccgccgccaccacccttgtattttatcacgtgctcttcagggcatgtggaattcgttgagtttgcttttagagccaagtttctttccctgtgtgggtttttgaggaaaacctgaggtcccctaatctgtggccaccaccccccccccccgccacgccttagagcagagcagcccctcctctcatttggtgcagaaacagtcaagaggaaccattggcctagagctcctgtgaccgagagcgccacggaagcctggggatgacgtcgggcagctttattctttgcttggctttggtaactaggtggtcccctcaagcatcctcagttcctcttgctgtttatgaatctaagacaaggaagtcctatagaagccaaagggacagggacggaaaggacaggtcccaagggatggggctgtctttacttgtggaaaccaggaaattgctcctctcagccaaccaaggttgaccacacaccacccttccggagcagctcagtcagccctcggggacgagaaaccacaagcgcagagacgctgaggcccaggcaggtgaagaggaagtggctttgggtttttaaagtaggtgagcgtgagcctctctgactgcttcttccccgggggggactgcaaaccgctcagggttgcggcagagccatggacttccggtccctgcaacgggtgacctaagcgtggtgcacccatcagtcacgcaggaggactgacttgacagacgaaagacaagcccggatgacacagggtgagaagagtcagggccgcacctctgtccctgcaaaccaacaggtgcatggtgagtgtggcagtccccacagctccacaatgggctcccccgccaacggggacgacagggatcttcaggaacttctgacctcaccaagtcaagtggaccactctccactccacgaggatgtgaaacggttctttaaaatgggattttagagcctcgggaatgcatg

SEQ ID NO: 5589 - DNA, 1317 bp, Homo sapiens
acagatgagataagactgtttcagaaacaaagatggccacagccttcctaacaagcaggtcatctggccatgtctgtattgtaactggtaaaaggcttcaagtcagattgatgatcaagaaaagtcaaaaccccagcccaagattgggaaagcaggtggtggttccaagcttttaaaaaattattgaagctctccatcctgttctgtgagtgtgtcttctctttctccttcacgtcatagccgtgacccaccgttcatctctgctcttgcgtaaagatgaccgatggagtccaaagccaagtggcttcaccagctgacaagccaccctcctgcagcctgagtttcacagtccactgggttcgttgtcatgcggtgtttgaatggttaagcccttgcagtatttcagatcgggcaaaaaatatcggatgcacatagcagaaccattggtggtatttatagctttgctttgtactcctcactgtttctgcctacgcaaaatatccatgtttcctctgagaaatctgttgtggactgaaagcgctgctggctgtgaaatttaataaagtgtgtatgctttgctagaaaattatttcttggacaataggaacagtcattgatctgtaaatcctggctcttaacagtgagtggccaaggacttgatcagcccatttcttggtccctcagtgctttaaaatttaagtagcactgcattttgtaatgttgaatatgactctagtgacttgtaggaggcacttgtgaggagatgcttgcttcagtgtaaaagatgctcatggcctgagtcagttgagttttctttcaagaaaccacttcagagtgaaatatccagggtttccccgccctggacatgtccagcctgcccaggcagcacacagccctgtaagtccacctcgtgtgggtgagatttcctcctgcgtgatgacctcatcgccatctctgctgtctcattccacagcctccctccctcttctctcctcctctgccctcgcccttcccccttccccatcccctccccctcctcctctgccctcgcccttacccctcccccttccccttccgctcctcctccctcctccacctctttctcctcctccttccctcctcctccctcctcttcccttctctgccatctttctccccgtgcctattgatcccacataggctcattctgggtacaccggctaaaggctttggtgcattgcagcgttttctcccagcagctgtgtgaaagatgcattttctaagctaaggagaattttctcaagagtggcatactcatgccaaatattattgctctgg

SEQ ID NO: 5590 - DNA, 2516 bp, Homo sapiens
agagaactctgccttgccctcgtccctcgtccttcggcagccggagaggctgtgggtgggccgagggtgtctaggggttctgcctggtcaacgttatttgtcgtcccatcttttggcagcaaaaccacctgcgtggctaggatgattaattatgaggatgatgattttttttgtgataacagtattgtgctttttgtggggaaagtgaggtttttttttatatacatatataattgatatctttaatttattggttgttaactgttgctgctgcctggtgtgtcctcagctcccagggctgcgggcccaccgtttacatgtgcacgccctgacccacctgcccacgccgacttgggaggatggtggcctgcagcggccaagaagccaaaaaaaattttttttttttcagatactgtgcttgatttttggagaggggagaggtggaaattcctaaatggctaatgcactgttccctccagcccgaatgcctcctgccaaaccccttttccctgctgcctctgtccccgcatccttgttctcccctgggtccgtaacattttttccgaggatgaacaggggacatctttaggtttctcaactcttgctttggtgtttgccgcagcatggaaaacagggcgcctaaggctgggagctggaagaaggggcattgggtacccaggcagagtcaggagaggtggtctttgaagtaagttagcagaaatcaaggggacccccgcctccttgggctggggaggggatttcaagatagttcatgactctctcccgctctgccttccctccttcctatctgctttttccagtaaactgcatggtgtccttccctggccttctcttggctcaaaggctgggagggagggaaggagagaagagttccaggcaatcccatcaatatagtccctacacctggggctgcggcccacatgtcttcacggaggcttccagcggtgcctgccactgaggcaggtgcggccccaggaccatcaccaggaatgcgaggccaccctggaccagaggtaggagcccaaggtccggcccttgctctttgattgtgggcagcctcctgccctctctgggtctcagttgccccatctgcagagcgaggaggcccgggctggttggtcttgaaggcccttttccatgccgacatcatgtcactctaggcctggggttcagtttcctgtggctggtgatgctgtggttaagtttgcttgaccccagcagcccgagggactgtctgagtcacagcacagcccctattgcgtggctgctggtgtgtggggtcagttccagcagatgaatgtgtcatgtggcacaccttgtcccttcccgcagcatttcctggttccccccagacccttgagcgctctttgggacccagaaggagtccttgcacagggaaggcttgaggtgagaagccgcttcccagactgtcagggccaggcctgggtctagaattcttgctgctgctttgcagagtcaacagcccatcagcccatgttttagaggggacactttggtcctcggttcccaccctcagcaagcaggcctccagcccgaggaaggcctctgccgtagtgacgttgccgtgtggggctgcgtggctgttccccttggctggagcattcagccaaccccagcgtcccccctgaggcgttcattggcagccccctaggactgcacgctggccccacggtaaccccccctcccccaccaacatcctgcagggatggggtcagtggttccaccttcacaggccactttgaagggtggattctttgaggcccctgccagtcggctccctgctcagctgctggcccgggcgacctgggactcagcaccaacggctgaagtttctcagctgggctctgacctggggtctggggcagggaacgaacatggtggctttgggctgagaggatgagggaggtctttcccaggtcaaattactttcctttggcctctgcctgaggctcgatttgcctctctggtccaatgggactgacactgttgtacaacctgacctgtggctgagggtgtctgggcttaagcatgtggaccccttcggtgtgtccggccttcctccatcgtcctgccctttggccttttggtttgaagccacaggtgtggcttctggccttagcagatggtatgcttgcggaccgcagcccagcatgccggtgggcccacagcccgagccagcccagagctgccggaagggccgcccttcccggccctggcggggtgctggacactggccattttcactagagtttgcctggcagggaccgatctctgccccctcctctccccaggcctctggctgcagtgatgccgcagaatcctgagccaggtgcctcctgagcagcccgtgcgcctctccacagcggcgtttgccacccaatgcggctcgcttcagatgctctgatgcagagggcacgcccatagtccctctgcagagcctcgcactggggccagggcaggcaccagccccaggc

SEQ ID NO: 5591 - DNA, 1182 bp, Homo sapiens
aaacaaattaggatttactagtctcttagctttatctgggtgaacgtttttattttctgagtggaacaaaaacctcttcccttaatggagtggctgcagacagccacgttgatgtacatggagtaggcagaggactgctgcagtatgctgactttcacaaccctgggtcctgcggactcttccttggcaggacgtggacttgagctgtcctgccaggaccagacatggatttgcacccagctccacccatctccttacctacccagaggcacacatctcacaggcaagatgagtgtttggggttcaggtatgagctagggtcatggaacaacgcagtgctcctgggccagcaggaggctccagctcacttcctcattggcttcagcttctctaatgtctggcacatgagttctggcttagagtgcaaggaagactgcaaagggaaatgacagagaagagtattgaaggtcaccttctgctgggatgtatgaatagcctctgagtcccaaagcgttctctgcaaaaatgtgtactatgtgtatgcatgtaggcgacagcaattataaacaggaaggacaccaatttgaatatacttaggatgtatattctgtagtctccttttcattcatcccgccaatcttgcagtgacctagcttcgtgatatatttctttagctaggtcagggggttttggtccaggtttccccctccctggtgaaacggcagaagacccactttcatgatttgccatgtggtgcctcagtgattctcggtaacaacggcttcatctggatttacccaacacctgagcacaaagaagaggaagcagggggcttcattgcaaacctggaggtgagcaaacactgtggccattttcagtgggatggagggggctcagtctttgctgtgtttttgtggccagtgaagttggttgtttttagctatgttactggtgtaggctgagtcactttgactttccatcacggtatgttcatgaagcccatattatcttctcttctaaggagatgaattcagtgaatggtttggtgtttgttggtggaggtggcaaagttgcagggtaatagccgaagagccagtgaagaagccattctttttctgtttttttgtttgtttgttttgttttgttttgttttgagacggagtcttgctctgtcgcccaggc

SEQ ID NO: 5592 - DNA, 1190 bp, Homo sapiens
aacctcgtctttaccaaaaatacaaaaattagccgggtgtggtggcacaagcctgtatgtagtcagctactcaggaggctgaggcatgagaatcgcttgaattcgggaggcggagttgcagtgagctgagatcgcaccattgcacttcagcctaggtgacacagtgagactgtctcgaaagaaaggaaaagaaaaggcggccggacgtggtggctcatgcctgtaatcccagcactttgggaggctgaggtgggtggatcacaaggtcagatcgagaccatcctggctaacatggtgaaaccccgtctccactaaaaatacagaaaaaacaaaccatagcctggcatggtggctggcacctgtagctctactacttgggaggctgaggcaggaaaatgacgtgaacccgggaggtggagcttgcagtgagctgagatcgtgccactgcattccagcctgggtgacagagtgagactgtctcaaaaaaaaaaaaaaaagggacactatatgcaagcgctgtcttcacatatgtggcaaacttgtttgtttgtttttgagacagagtgtcgctgtgtcgctaggctggagtgcagtggctcgatctcggctcactgcaacctccacctcctgggttcaagcaattctgcctcagcctcccaagtagctgggactataggcatgcgccaacacgcccagctaatttttgtgtttttagtggagatcgtttcaccatgttgagcaggctggtctcgatctcttgaccttgtgatccacccgcctcggcctcccaaagtgtttggattacaggtatgaaccactgcacccagccatattttttgatatttatagacgtcttttttttttttgtttttttgagacggagtcttgctctgtcaccaggttggagtgcagtggcgcgatctcggctcactgcaacctccgcctcctgggtttaagcgattctcctgcctaagcctcccgagtagctgggattacaggcacgtgccaccacgcccaactaatttttgtatttttagtagaggtggcattctaccatgttggccaggatggttttgatttcctgaccttgtgatccccccgcctcagcctgccaaagtgctgggattacaggcgtgagccactgagcccagctatagatgtcttaacatcattgttttctgttcttttgt

SEQ ID NO: 5593 - DNA, 1214 bp, Homo sapiens
aaaaactgaacttcatatcttgtccccagatctgatatagtcacttcttcctttgttcagttaaacccagcttcatgtttctgcttgcccagggccaataactttgggatcttccttgactcttctttttctgtcaaaccccgtaccagtctttcaggtaaccgtaacttcagagtctatccaggtcacctctgcttgtccaagcccctgtcatctctcacttggatgatttcattagcctcttggccagggtccctgcttctgctggtatttccttagtttcttctccctacagcagccagagctaatcattttaaatgtcatatttctgtctcgcctcagctgcaaaccttccagtaccttcccagctccttctaaataaacaccagaggccgggtgcagtggcttatgcctgtaatcccagcactttgggaggccaaggtgggcagatcacctgaggtcaggagttcgagaccagcctggccaacatggtgaaaccccctctctactaaaaatacaaaaattagctgggcgtgatggcgcctgtaatcccagctacttgggaggctgaggcaagagaatcgcctgaacccaggaggtggaggttgcagtgagccaagactgcgccactgcactccagcctgggcaacaagagtgagactctgtctcaaaaaatataaataaataaacaaacaagcaccagagccctggcagtcacctgtgaggcttcaccccgtctccccacccactataacctctgacttacctccttttacactccttcttgctgactctgttccttccacattggcctctttgctcttgcttgaatgatccccagtcatcctccctgcccagggcctttgcacttgctgttctctgccaggaaggtgcttcctccgtagttcactcttcacctcctttgggtctttgctcagttgtcatcttcagtgatggctcttctgatcaccttatttaatttttattttttaattaaaaattttttttgtggagatgtcttgctatgttgcccaggcttatctcaaactcctggactcaaacgatcctcctgcctcagcttcccaaagtgctgggattacaggtgtgagctaccacacccggccccgatcaccttatttaaaattgcagctcccagcccccaaccccagcatacccattcctctttttttttttttgagacagaatcttgctct

SEQ ID NO: 5594 - DNA, 1116 bp, Homo sapiens
cacgccccatcactggcaccaactcccctgcctccctcttgtgtatttgccattaatctctaatgattgatggggcccagctggataacccaagaggctcttcctacctcaggtcagctgattaacaaccttaatgtcccctgccacagaacacaccatatttatggattccagggattagaatgtggatgccttgggaaggctgttattctgccatcagaccaccgtatctgatgaaacccccgtttttctggtcatagctttgtcatggagggcttcttcagtgccacagggccatagccactgtcatggcccagagaatctgtgtttcccatcagcccctcacccgccaggccactgcaccctaagcccagggccatggcattcttgcaaaaggaaggaggttcttgatcattctgacctctccaccccacagtgaggggaactgtggtctcctggcgactgtctcagccccagaacccagagcctagagcccatctttagccccactgtggctgattcaggacctgccagcacccccgaccagctctgccctttccctccctccctctgccagagaggccggggagatgatgtcacaggtggctgaggagccgtgtgccctgcagccaggaagtcaaaggcgtcgggcccctcgtggggcaggcgctccaagctcagaggcccatgagcaaaaaactcactctgttccatggccactctgctggcatatgtaagaaaaggggcttattcctgaaagaagcgcttgctgggtgttgggcacactgcaggggtgagatggatggacggcctgtcctcatggtgctctcaggccggcccgctcccggggcaccctgagcagctggaggtgagggcatggcaggggagccaggcttctgcctgttgcttacggtggggacacagaaacaaacgtctgggctggctggtgacagcatcagagggaatgaacacatcgaccctctggccagcatgtccaccttctgtattctgcctacgagcactcagtggggcaaagagcaggagctgagggaagataagtatttaggccgagcgcaatggctcacacctgtaatcccagcactttgggaggctgag

SEQ ID NO: 5595 - DNA, 1324 bp, Homo sapiens
ctccaagccaagttcaggctcactgacctggctctgacgaggaccccaggccactctgagaagaccttggagtagggacaaggctgcagggcctctttcgggtttccttggacagtgccatggctccagtgctctggtgtcacccaggacacagccactcggggccccgctgccccagctgatccccactcattccacacctcttctcatcctcagtgatgtgaaggtgggaaggaaaggagcttggcattgggagcccttcaagaaggtaccagaaggaaccctccagtcctgctctctggccacacctgtgcaggcagctgagaggcagcgtgcagccctactgtcccttactggggcagcagagggcttcggaggcagaagtgaggcctggggttttgggggaaaggtcagctcagtgctgttccaccttttagggaggttactgaggggaccaggatgggagaatgaggagtaaaatgctcacggcaaagtcagcagcactggtaagccaagactgagaaatacaaggttgcttgtctgaccccaatctgcttgaaacctgactctgcttctctcatttgtcttcctaccctactcacataattcactcattgactcactcattcaccagatatttattgacctgctattataagctttacatcctcccatgttgtcctggcatgtgcagtatacacggtctaactcatctctccccagatctctcagaaccttgagcttgggaattgaactggggtcacctgtgtcctttcttatggactcgcaggattttagaaccctaatgcaccctggagggtagctgggccagacttctcatttcacaggtgaggagactggtgccccacagggattaagtgccttgcccaaggtcaggcttatctccagagggaggtgccctggactggggcccagatgttcagggaccctgcctacacctcatttccagtgtgggctgccttagttagttatgagaacagggaagggctgggaagagacagcctccaaggtcaacacttggagagggtttcacttgctctgaagaccctggtccaggattcgccctctcccatgccttcaagtcagcatcaggcttagggcaaagaccaggcctctgaagctgcctcttgtaattcatgcaggaagatgtcaaagtcagccccatcttggctgatcagggtgttcagccttaaccccacctgtgttctgaagtctcttaccctacctgctcaggactgagacagttattcactgaacatatttattaagcacttgctgtaggccaacagttaagaatccaata

SEQ ID NO: 5596 - DNA, 1126 bp, Homo sapiens
tgaattccacttagattcaaaacttttttagtagagagtgttaggttttccagctcttggggttattatttctactttcatcatgtcttgttttattgcactgttgtcagttttactttacagaatttgggatttttcttttcttttttcagacagagtcttgttctgtcacccagggtggagtgcagtggcacagtcacggcttactgcaaccccaaactcctggattcaagggagtctcccaagtagctgggatccaggcatgtgccaccacacccagctaattaatttttttttttttttctgtagagatggcgtcttgctgtattgcccagactgatctcaaattcctcacctcaagcgatcctctcacttcggactctcagagtgtggggattacaggtgtgagccactgtacctggcctgaatttttcttaaagtctaatatagtcacttttagaacatgtttgctcatctacgttgaccgtctctatcttgatgggcttgatctaccaaggtggacaggcttctgtttgttctaatgtttgtactttcattgtgggtggtcctcttggccctttaaaactaccctgctctgctgcttgctcttttgtgtctgtctcctttgattcaacattttttttgtgcgtttcatctgtatagttgtgtatgtttatttgttcttattgtaggatggtttttggttatgtggatgtaattatccatgtgacagactgagctcatttccatagttcttccaaacaatgctgccacagtgcgggtatgtgcgtgcgtgcgtgcgtgcatgcacacgctgttgggtatatacctaggtttggagttaactgggtcatgggtgagcatatggtggctgcatgggcagctgccagctctcagtgatggcaccaggtacatgagggtcatccttgctctgctgacgctgtaaagatgttgcttctttgcaaattaaccgctggattccctgtaattctagtgaaaatcccagcagcttttcttttgttttagctgtttatttcagaaattgacaaactcattctgaaatttatatgaaaatgcaaaagggccaagaataatcaaagcattctctctctctcttttttttttt

SEQ ID NO: 5597 - DNA, 1189 bp, Homo sapiens
acttgattatttctgaaggataatactctggctgccctcctttgatttggttttgcttgcccttgagatgaacagccgtggtgtaagtgggttgtgtacctcccctattctgctagccttattttcagtgttatacatggatgtgttaaagtactgagcatttatttttccatcttgagctgtccttgacttggagagggctctgttgaagtttacatgtcagtgtggttggtgtgcagtagactccagccaactcagagtgagaggaattaacagcaggtgggggttgggggggtactccacagatcgcctcggggtgtctacataaatgccctgtaaatgtgaatgaacagcctgtgggtggtgagagcagttttctaaggacagtccaaagccatcttcagatcttcaaggagatccatgattcgtgaaggattcactcctctggatcagaggttctgctgtagtgacactcttttttttttttctctctctttttttttttttcttctctatttcaaaggcagatcgggagcggtgccgagaaaaatttccttactagatgacatttcatcgcaatgtccgatcgtttggggcaaattaccaagggcaaggatgggaaaagcaagtactcgactctcagcctgtttgataagtataaaggaaaatcagtagacgcgattagatcctcaggtaaggcccagggttgaaggccagttcctcaaactttctccgagtgacatatcccagaaacccagagtccctcacctggttagacagatgtggtccgtgcacaccaggcttctgggtgtgcatgtagaatcactctctacttcctacttgaggtatgatttcagagccttgagcatcctgactctttctgtagtggaattttctccatctattaccttattgaagctggggagatatatctatagatatctatagatagatagatagatatctatctatagatatctataggtgtgtgtgtatgtgtgtgtgtgtgtgtgtgtgtgtgtgtgtgtgtatatatatgttttggagacagagtctcactctgtcacccaggctggagttcagtggcatgatctcagctcattgcaacctccaccttctgggctcaagcgagtctcttgcctcagcctcccgagtagcaaggattacagatgtgtgccaccacgcccag

SEQ ID NO: 5598 - DNA, 1229 bp, Homo sapiens
cctggcgagttttcagcagaggtgacctcctagggttctcaggaggggagctgtgccttgtagagtcacggtcactacagaaagtgctgcagccagcccacccagatcaagatctggcatgttggccttctttgttcacgttcctcattagcagctgcgcagttttaaagacacatgccggaactgggccttagtctttgtcgctggagcaaaataaagtagctctctgtggacacgggaggttccagagcaccgaatggagagaaacaggtttgggtcctggctttgctgtgtcactgtctgtgtgacttgaagctggtcactccccaaatcctgctccttgtctgtagagtgggcctggcattttctcgtccctgggaccgctgtgtggagtgtgcgttacagggaaggttcagggctttgctgctgctcagaaagtggtggtggatggatccgtatagggtttgaatctaaggtgctggcctctcagcaccttgttgtaataggctgttattgtacagtggaataagggagctggccctcttctgattctcttccttctttcagaatacaaattcagtgccaggtggaccaaagtcatgggcacagctgaatggaaagccagtaggacacgaaggtggtaagtgcgcacgtgtgtgtgttgtttggggacgctggggagagggaggtgaatgccttttccagaatgtctggttgggtctaggcacccagaagctttgaggactctcttccacaaagaggtaccgtctatggagcccttgcctgtgcacagcgggcgctgactctgtagaggtgccagctctttggtttctttggatgtgtgctcttgctgagacagaggagtgctgactgggctgtgctgctggtgatttttgatgatagcttgaatgtttctagcatactgtgcttcagaccaaactaggcagcagctctgagtgggaaggagagtggtcgtggtgtgggcagacgattcaaaggaatgtactggggaaagcccacaattcactttctcctgtaaagcagcactggctgccctttattaccctttgccaccatcctgatatcgccttctgcttcctgcactacccctgccagccaaggcttcaccagacttggtctttagtagcctgtattagaaaaccagctgcacatccttcgttacctgaacctcacccccagcctgccatgcctaggaggtcctgcccctt

SEQ ID NO: 5599 - DNA, 1167 bp, Homo sapiens
gcccaggccggtcttgaactcctgagttcaaatgatccacccaccttggcctcccaaagtgctaggattacaggtgtgagccactgtgccaggcaaaagcagcatcttaatccttttggggtggactggggcagggatggcagcacactctgtaggtgttgcctccacaggaaagcagttgccttcttggcctcccctgggctgattttataggaggctgtgcttgtctgtggccccaggcagtcagtagaaccttccctgctggggcaggctgtggcctggagcggctgtgatgtcttacctctttccatttgtaagcaggcactggtccttgcaggtcagctgggaaggggcatgatgctgtcagcagcagtctcccttgccaccctcagcaccctcgtggcatctgccagcacagagcacccttgtgacaagactcccttcaaaagcccacttccaggcaacacggctttcaaggtgtggagctgggaagcagacgactgttgactccatctcacttcctccatgtctaccccgtcttcttgacaggtttaaggggctcaagccgactgttatccttctctcccgaggaatttccgacgctgaaagcagctggagggcaggacaaggctggcaaagaaaagggcgtcttagatctgtcgtatgggccaggaccaagcctccgccctcagagtaagtgactgcagcctctgggcactcgatggagtaacagaacttcctcctctcatctctctgcactcctaaaagggtgctgatgccactggggtctccggttcgagctggaaacgtggctctttgactcgccacgtgatctgtgcatccattggacttgctgcctaggccattggattgggccttgtgccttttttgtctcttgggttgggccaggcctgtcccctccccctctgtcatccggttgttaattttgctgtgcctggtggctgtggcaaggatggacaaaggaccaattaacttaggtccccggttcaagagcttgttttctaaagctcccaatcctagctacatctagtcggaatcactggggagtttgtgaatgagtctgatttccagtcctcccctcccccagcccaattaggacctgtatttttaacccattcctctggggattgttacataaatcagcct

SEQ ID NO: 5600 - DNA, 1795 bp, Homo sapiens
gagcgatcaagcctcgggctgtcaaagtggaggagagtaaggcctgacagtgcctggctgccacctcgcctctccctactgaggacggtgccgccatgcggcctcgacacagccgacactcgggagcctcaccagatccaccgtccaaatgcgtggcccagactgagagacctccctcctctccactcccgaaagctccgttgtcaaccagcttgcacccgtggatatatggcattgacccgcttgctttgatacgaaacaaaaaagcagacgactccttcatcccatctgctcctaccgtgactgtggagtgacgcctcctgtgcagtgcagatttgccctccctgcctcctccctgtcctgccgcgcagccagggcgccttctcagcagtgcttccggcccagccgcccatccctaggcacagtgatttggcagcagggtcattttactttgaggctttttgttttaaaatgtagccaaggtttttacaaaggggaaaggaaaagaaaacaaaaacgcaagctccatgtgtatagctgaacttttatatgtttcttgccagcccctccgctcccttccatctctagcctctgtcctgtttagtttgatacgtcactgcagtaccttaagaggtgactcttaagaatgcatcccctcctgattcctcagctggttcacccttgaggttatttgcaaaaagaaaaggaggttcttgagggcaccgattgcgagcattctggtgcctggctccccgcctgggaagcgatggggtgctcagagcagcaggcaggttgggggagggggggggtcatagttgggttccagctcctggcttgatgagcccagggcgcttacaggcagcccatgaagttgatgacagttttagcatgagaatcacacagggtccctgtcctgggctcctctaaagccagtggatgtgctgggcaccagagacaaatcatggagatggctgctggtggctcccaggttggcccagatggggtgagctgacataccacaggcccatcccaggccccgtgggctctgcttctggggctccataccctgccctgcaggggtgctgtgtttttcacacatttctttccctgaagccttctgtaacctgtcattttccttccttcctcttccggagcctgctgctttctctggacctgtctccacctcccacacagctcatcgtgaacaccacttggtgatggagggagtggacccgtgtgtggtccccaagtgaggccactgggagtttgtccttttcctcctttgcttcactcccagcagcagacccaggttgtcaggacaggagggcctgagctaagcagtaggcatcagtctcgtttgtcttcagacggcgggggcaggtccagggtgaggctgggtggagggctgaccaaggtccaaagggcctgcgcagcctccgggagggcagcttctccagccagaggcttgtgtgagccatcgtgtgctgggcttgtttttaagtaagaaacaaggaaatcactccagattctgtcattccaaggaaagggaaggggacagttcaggtttctcagctgttcttaggggtcactgagcgtctacctcctcctccagaggaggctggctcagaacacctagaggagggggccggggatgcaccccccaccagaggctgccttcagcgtctcacgggtgcaggacagcgctcaggcttgggctctaagctctgtgtctagtgtagaacatggggaaggagcatcttaggaactgctgaagtaacttcttactgctctcaca

SEQ ID NO: 5601 - DNA, 1324 bp, Homo sapiens
acagccatgctgtggtctggcctgctacggcagcatggcagctctggtggagccttctcccttgccatttggttcccctgtgccaagtagctgcaggctgcccctcaaatcttcatttgtcccttttcacttcctgcagaacaagcctgggttagagggtctgctggaaatggcctttgaagaccaaggataccaggatgtgtgcactctgtcgtgttctgtgatgaatgggaaacgtaggcttccagaaagccagctctcttctgaaatgtgacggacctaagcaggaagtcatccaggacaggagtggctcagtgttggggatggacgctgtcgcccagccatgctccaccagggccaccaatgtgtagttggctggtggtcttcgggcatgtgagacctgctcttcactgtttccaccccacttggtggcctccaggatggtagtggcaccctcagagccccatcttcagcatgttctgaagcctcagagtggaaattcctgctaaggctctgtgtggacgcctttctcccgtgatctaaaggggacactgtactcaagcttttgacctcatgccttgtgtagtaaaaaaggatttgggggttttgtttggttcctgagagggttgtgttttgtttttgtttccttttgtttatgttttggcctttcctctttgtctttccatgtagaccagatatttgaaagggcagacgatggctagaggtgtaatgtgcagcttgtttatacggtattttgggaaacttaccttggatgggaaatcgaatcgtggattcaccaggccggtgctggcacactcaccctcgccctttccctccggttcagtacctattgtttctcctttcaaatatgtgattgtactagctctttccatatgaaagaattctccttatttaaataaaaaaagtttaaaaagataaagctgaacgtgctttctcaggttgtacatccctcgtttcttggtcatttgaccagagagacctacagatcaaagaattctaattttacagagttcacacggaaattaggagtggcacggctgaaatgccttaacagaagctgtgtgggtagagaagggattgaaacccgtggctaagaagcatcttccaaatgcggcagcatcaagcactccaccctcttcccacggatggcatctggttgtgcacagtgcctgcctgtggccccgtcacttgccgtgagaaacgagctggtcagaggaggtaagcatttgatgtggcgtgttgtgttgtcacttctagcggtgcttttgcaggaagtggaggaggattatgctgtgctttgggg

SEQ ID NO: 5602 - DNA, 1836 bp, Homo sapiens
agaatctgccctgtgccgcctggttccgtggcctccagcatgagcctgcaggcagggcgctgcgggaacccagttgtgctgccccagcccatgcctccgggtctgctgtgcatgaatgagtgctcacttgtcccgggtttaggacgtggtcaagtgaacagcagggtctaactgtgcttacttagcccagttcaaacagaacaaaggaaaaatatagaaagcaacatctgttgatcatttaggtttttttttaaaccaccatgtcactttgagtccttcatgggtttttgaacagcatttatcaagaagaaaatgtgggctttttcccctctcccgtgttttgtttgtcctgtagatagagggaggaaagccgtgcagtggcaggcgggaccccctctggtggcgggaccccctcttgcggtggtcttgcggggccagccgggacctgtcactttattatttaaggagtgtgtgtgtagagtcgctggcttattaacagtattgtgtgtgggttgggtttttagtttgttccttctttttgaagtcccttcatttcaatccttgactctctctccccttcccttgcccagctctgttgaatgctgctgtgcgcgtgtgagggccgctctgcacacagggcccttgggttgtgtgaactgaaattctccctgtatttgtgagactcgcaggagtccccatctgtagcacaggcaatgccagtgccatgctgcagcctcagaaaccaggcctctcactccagcagcaggcagaaccgtgtctgtggtcgggtgctgtccacagctctgtctgccttgttcttgggcttgagctggatagaggtggggtctcttcaccttccctgaattcagaacagaccctgtgcctggccccagtgtgcccaggcaattccccaggccctcactgggagcccttggtgttctgagcagcagggcccaggcagcacatgagcagtgcccaggggctccctgcgtgaggacggcaaggtgcgatgtatgtctaacttattgatggcaggcagccccctgtgccccctaagcctggccctggttattgctgagctctgtgctcagtgctgcggcctggccgtggctcgtctgttcctttggggggcccgggcgggttgtgggaatcagtcttcacagacagacgtgagccaggcggaggactcgttccttgcagaggtcagtcctcacctgcaggtgtcggggtgtgggggggcaaggaggggcaggcacacaccatgtctgacctgaacccgattctggggagcatcttcccgctccggccccacgacctccacagggttacattgtaatatatatgccccagctaacctgtctgatggtggcatcttcctgcagacatttcaaacatgtaacttttatatgaaaaaaaataaacacagatgaaagctgcccaatgccatgtccgcgcccagctgcatgtgtgcaactacagtgacagcccagcctgctccatgctggccttgccatctcttttctgagacccctgtcgcaggcggggctcctgggaggctggggtcattcagctccactcccaggcccacttgctgccattggggtagtcgtggctgagtgaaatggacgtcaccagaactttccctcctaggccttgtgccctagaagcattcaactggacaaagaattgctcgtgctccagaggtcggttcatgcacaagagcccctcaccccagtgtcctgatgaaaagggcattcctcgggtgggattcgggggcacaggctctagaattgctccttcggggcccggaagcactgtctttatggcgtgcctttt

SEQ ID NO: 5603 - DNA, 1179 bp, Homo sapiens
acattgactagagcagtgattggcaaaccaaggcccactagcctactacccgtttctgtaaacagagttttattgagcacagccatgcgcattcatttccatattacatatggctgcttttgtactacagttggagatgcacagaggtcaggcattgcggcagatcctgtagccagaaaagctgacaatatttactccctgggccttcaagaagatgtttgttggtccccaatttagaggaccacctctagtgtcccaccgactgggttcaaatccacctccccatcagtagctgtggaccaagttacttgtgtgctgttttcccatctgtaaaatggggataacagtatctgcttcatgggtagtcatgagaataaatgaggccatacatgttgaatcatttatcgtctgcctcatagcaaaccatgacaaaacttggctacttacaacaaaacattttatttactcacgattgtgtagtctggtctggcccagctgggtgattctactcctgatcttgtcagtgatcattcagggagttgtattcagttgtgtggttggttgggagctgattctctttccctgtagcctcagagcccctccctctccgtgtggcctctgcacgtgatctcttgagcagaagagctggacttcttaggtggcagttcagggttcccaagagtgcgaaagcaaaagctgccaagcattcttggggcttaggcctggaactgacaccatgtcaattctgccatgttttattgtttaaagcaagtcacaagactgtcccagactcaaggggaggagactccacaagggcataaatactgggaagtgttccaccggggaccatgagtgaaacagactaccaacgtggaagaacatgggaagtgcatgataagtggtatctaccacttctgctactgctgctgatagaaacatatacatggcgggctggacgtcaggggagggtctggggtagtaagtgcctttccctaggtgctttcctcctgactggagtcccttttcttaccctgtctaccacttcaaaataaagtaggaagaaaatggagtcagttgtcaaatctggttggaaattggaggactgtttttgttagagagtgcgttgcctccttggccgccgtgtgccccctctccctgagctccgcttgctggcttggg

SEQ ID NO: 5604 - DNA, 1103 bp, Homo sapiens
agctgcactgttacgactcataatgacaatggccggcacttattgagcacttgccatgtgcggggcaccatgctaggtactttgcgtgaattaacacatctagtccccacaagagcctggaggcgtgtgtactattattattatcgttctcacttgagagctgaggaaactgaggtgcacagagcttcagttacacagcttcctcttcactagcccctgagttctcccgcctctcagcagagtgcccgacacatagcactcacgtggtaagtgacaggtttgatgataaagttaaactgtacggcaaatctcttaatagtgttctttgtggtttctttgctttcaagcttgagaacttctccatctagaaatcgttaactctttattccattgggagtcattttggtttatggaattccttgcaattttgaagtccaggttcaaggcaaagagaccaaaatcatagtgtttaattgcatttgaagccataatgaaaccaggttgacctccatgttcttgtcgtagccctgccatggactggctggcttctccgctctgctgcctgttctctaccagcaggcagagtgtcatttagcaaggacagttaggtcctgtcactccgttcgaagccctgccacggcacccatcttatccagaggaaagcttacaatggccgccctcacccacctcagctccttccttcttccctgtctcctgctgattcaaagccattccaggcacactcccatctccaccttagagcttctgtgctgactcttctgcccccaaatatgccaaatacctagattctcattttcagatcacattgcaggtgtcatcttctcagtaagcaccacatttaacattgcagcccactcccatgccctgcacatttgaaaaaccataacatgttctatcttctaatatactgtatattttactttaaaaagagtgcttactgggaagtagcctttgtttatttcagtgatatttctcgagtgcttagaaggatgcctggcggccgggcgcggtggctcacgcctgtaatcccagcactttgggaggccgaggcgggcggatcacgaggtcaggagatcgagacc

SEQ ID NO: 5605 - DNA, 1163 bp, Homo sapiens
aatggcgtgaacccgggaggtggaggttgcagtgagccaagatcgcgccactgcactccagcctggcaacagagtgagtctctgtctcaaaaaaaaaaaaaaaaaaaacaaaagttgaagttctccattataggttgtgaccaggtcttatttttaggaatgggactttatcattttttatttgaatttattttttcctttcatccttgtctgacgagtaatgaatcttgagaatatgttcatacaataatatgtattatttgttcagaaatgaaagctggaactctatgcttcccaagcagtgtctctttggggtgtaattatttctcccttctcattgtttcaaggaaaaccagcattggaatcagctgattcaggatgctcagaagcgtggtgccattattaagacctgtgacaaaaactatagacatgatgcagtgaagattctgaaactcaagcctgtgctgcagagaagtctcactcaccctcctaccatagccccagaggggtccagaccccagggtggtttgcccagcagcaagctagacagtggatttgccaagacatctgttgctgcttctctataccacacaccctctgactccaaggaaattactcttactgttacttcaaaggaccctgaaagacctcctgttcatgaccaacttcaggacccacgactgctgaagaggatgggcattgaggtcaaaggaggaatattcctttgggatccacaaccctcgagcccccagcatcctggagcaacacctcctacgggcgagccgggcttccctgtcgttcaccaggacctgagccatatacagcagcccgctgctgtagtggctgctctgagcagccacaaacctcccgtgcggggcgaacctccagctgccagtcccgaggcttccacgtgtcagagcaaatgtgatgacccggaagaggagctctgtcacaggagagaggccagggctttcagtgaaggggagcaggagaagtgtggttccgagacccatcacaccaggaggaactctaggtgggacaagaggacactggagcaggaggacagcagttccaagaaaagaaagcttttataggaaagcccagtgacatgggccagcagccacagcatattgtaaactgaagatgaccagctcgtgggacca

SEQ ID NO: 5606 - DNA, 1177 bp, Homo sapiens
agctcttaaagggttcaaggaatccaacagtacaaagaagaagtctaagaaaaggaagcttacgtctgtcaaaagggcacgagtgtctggtgatgatttttcagtgcccagtaagaactctgagagcacactctttgattcagtagaaggtgatggcgccatgatggaagaaggtgtgaaatctaggccccgacaaaagaaaacccaggcctgtttggcaagcaagcacgtgcaagaggcgccaaggtaacgagggagtggtattccagctgctggtatatttctttcgtatggattctgccgatacctctttatttagcacagacttttttttatttttaattttatttttatttatttatttatttatttttgaggtggagatttgctcttattgtccaggctggagtgcaatggtgcaatctcggcttaccgcaccctccacttcccgggttcaagcgattccccagcctcagcctcctgagtagctgagattaccggcatgcaccatgcctggctaattttgtatttttagtagagacgacgtttgtccttgttagtcaggctggtctcgaactcctgacctcaggtgatccgcctgcctcagcctcccaaagtgctgggattacaggcgtgaaccaccgtgcctacccttagcacatacatattaaatggcaaaaatcatcaagaggtagaccctcattgtacagaatatcgtacatctttaattgtgtaaacttggcaggtagtttaatttcttcatgtgtgaaataagacagattcgattttcactaagaactattccagccctagaaaatctatgagtaaatttaaaagcccaaattacctttgaaaaatataaaagcccaaattacctttgaaaaatagtctgagcaaataaccagtggaaatggggcttagggctgcacttttagcttctaggctccctctgagatatatccaagtaattcaagttccagtaaaaagtttgaaaatcacagactgagtcaactccaagatctcatcttgctttaatattctagtagcctaagtgagagccattttaagaaaagtttaaggccaggcgtggtggctcatgcctgtaatcccagcactttgggaggccaaggtgggtgagtcacttgaggccaggagttcgagaccagcctagccaaca

SEQ ID NO: 5607 - DNA, 1143 bp, Homo sapiens
cggtgagccgagatcgcgccactgcactccagcctgggcgacagagtgagacgctgtctcaaagaagaaaaaaaaaagaaacacacatctttgtttattccgatccctgaaaataaatgcaatcccaagatttcatagttagcagatgatctccctttatgactggagatttcattagcaagtgttaatccagatagcagctcctcagaccggcccagatcttggaaagcagagagggaggcctgtgggcgggggaattggaggcagcattgtccttaccttgagaagccgctagggagagagcagcctgccgcctcctgccccagctgaccctcgctagcagatgggcaccaagaccacgatacccctgtgagcaggggatttaacagggctttatttagggaagaatgggctgattagctgataaagagcatgtaagatggtatggggcagcctttgatgtctggctggcgcggcagggagccgggtggtgagtgacagcagtgtgtcacaggattactccgcccgtgacaatgccgctctctgttcttgccatgtccccactctgttacagctactttttccgttgctatgcccttcttttgaaggcatttctcttcacactccttagatcctccccccacccctgcctttcgaaggcagacgggcactcgaggatacagtagttacctttttttatttggggaaatcttgtcactcctggaggaggaatgactttgcagctaatctgcacatggaccgtataattgtggtcagggtaagcggcagagaaaacttgacagattttccacacctcagtcagggtttgagcaaatgccagttgctgctttttgaggactggaaagaaaagtccattaaaccccacaaagtgcttgagttatgctgtggtcacaattactgttctgagctgaaacgtctcctctgaaatccgtctgtcaagaaagagaatgggttccttatgttttgtatgggtgaataaaataatggcactaaattctctaaactattctgcattccattttacggtgtttactgcctagaataattatatattatgtgcaaacctgtgatatctgcaaaccaaatccatcagactaacagaagcctgtctcacctgtcata

SEQ ID NO: 5608 - DNA, 1099 bp, Homo sapiens
ttatgccagatagaattctgacctaaaatgcaatgggtttgaatcagaataattgaaaatggactaacaagctgctctcaaggtgtgatctgccgacccctgggtggttccaaaactctgctttggcagaactcttgtggggaacccagcaggtcaaacctactctcttgattttttttttttttttttttttggagacagggtcttgctctgtcgcccagggtggagtgcagtggcacgatcatggctcactgcagccttgacctcccagactcatgcaatcctcctgcatcagcctcgctagtagctgggactacaggcatgtgccatgatgcctggctaagttttttttttttttggtggagatgaggtctcactatgttgcccaggctagtcttaaactcctggactcaaacgatcctcctacctgggcctcccaaaatcctgggattacaggtttgagccaccacacctgaccaaacccaccttcatagtaacactaagctgtcatttgcccttcccactgcattggcatctgcaatgatggcacaaatacgacggggggtgaaatggtggcaacttagcctgaatcaaggcaggcattgaagtgtcctatcccaagaggccttgcattcttccctgacatcttctctccattaaaaacaataaaaactaaaaaattttaaaagttgagtgttctgtattaagcagtaaccattattaattttattaaatcttagcccttgagaacatgtatgtgtaatattcttcgtggcaaaatagaaaatatgcataaggcacatgtactgcataccagggtatgatggtgacctctggccctcatgcagttatttgaattgagaggtgaagtagctgccttttttcatggaatgccagttttatttgaaagaactgctgtcttacaaactggttattcagacttgggtgtttggcaggcagcttctcaaatgatgagctgagtctgtcacttcaagataaacaactgacagtatttgttgccaacaataaaagtcaactctcaggtggaaatcaagatattaaaaaacgtgtatatactaccatgaacttgatagctgcc

SEQ ID NO: 5609 - DNA, 1177 bp, Homo sapiens
cggtttctaacgcaggcactttaaaaagaaggcccaggctcgatcccgtctttctagttttgtttcacaatgtgaaaattactgctattctttgtaagtgtgcagatgctatgtactcatgtagaaaactaaggtaaaatggaaacacattttaaaaggtaatgatcacccgagtgaatttgatgatgtccgagacctactttaagatgcacttcgatgaaatgcagttaaccatgtgctgatcattgctgaagctggtgacgggcttgtgggggttctttacactggcctgcctgcttttgtgtcagtttggtgtccaaccttaaagacgtaactactacaaatattttgagaaatacctacctaagggtgttctgtgccaacatacagaggtagttctagaatctctgctttgtatgtgtgtgtatgtgttttaagactttatttttttagagcaattttagaatcacagcaaaataaggcgcagcgatttctcctatgccccccagccacccccactcagcctcccccgtgatcagcatctcagtagagtggggcgcttgttaccagtggatgaacctatgctgagacgtcgtcacccagtgtccgtagttgacattggggttccctcttggtgttggacattctatgtgtttggacaaatggaacccttggctttaacccctgtgtttcatgacaatgccatttggtgaggttctttgttcattcatctacatgtggtcgagatgcttgtgagccaaagagtcatgctctgttgggtggcaggacaggtgtgtgatgggacctttgcagccagccttctcgatgggagtcccagctccttcccaggagctccgtctctgggcaaatttcccagtccctgtggtttcagctgctttattagaaaatggtcccttctctgtaggattagtttgagcgttaaataagtgaatcgcatgtaagcagatgtgagtgagtgcagctcttgtccctgttttgacaacggattgcgttctctcatgcagctgtgctgggtgatttcaccattgccagctgctggacattagactctgtccagtttttcactggctggacagtgctgtgcctgactcagtgcacttttggggccaccagccccatgacaggtgccctttcctgcactccagcctctaggacc

SEQ ID NO: 5610 - DNA, 1099 bp, Homo sapiens
tcggcaggagcacaaatcgagcccagctctggtttatagcaggctgtgggccagaggagatggtgggaaatggagccaaaaggaagtgcttgccgggtgccagggttcaaggagtacaggcctccctggaacgggcgccagagccctggggcaggcctgtcctttcctggtccttggatcccttgtcctgagtagggcaggattctgggaggtgacctggattctagaaagcctgttccaggtgggcagccagcactgcagtatgggcaggacggggtgaccctctgccagctcaggccaagccggggggttctggagtcagtccctgtttaaacaagagtcatcaggttttgtgaggacctcagcagagtctgtcctcaggcaggagtcattgagaggggtccttggagttctggagctgtattggaggggatctgaggtctgtggctcaagacagtccttgtatgggctctcaagcggtaggggtatcctgcagggcccccaggagcatccctgatcacccctctgcccctccccaccagagctgaagatccctgaaaacgccaacgtcttctatgccatgaactctaccgccaactatgactttgtcctcaagaagcggaccttcaccaagggagtgaaggtcaagcacggagccagctccaccctccctcgcatgaagcagaaaggactcaagattgccaagggcatcttctgagggcatcctcccagggtctggctggctggtagccaagcacttatggaccagagtggcccaggccagctgggcgccttcctcccacctgccagcccagggtaccccagactccagtttcatcctgaacctctcccgctgctgggattgacgcctgccattggtcaggctgacctggcctcccgtggaccactcgctgccttaggtgccttctgctctctggaaccagaggactagctgacttttgccaaggagcagtgccaacgggcatggcatggtgccctgcctgcccccgggcgccacctctgtacacttccctgacaccttcccaggtgtgggtcactgccacctgtgcccatgggcaccccagagcacccactgtga

SEQ ID NO: 5611 - DNA, 1470 bp, Homo sapiens
gcttacaggaggcctcaggagagggtcttgcatgcaggaggcgtcccatgaatgccaaccccagttgctaacagtgtgaggcagagtcaggcccgcccgatctgagggcattgggcaacacatcctgtgcagggaactttatctgtgccttcattaggggggcatgtgtatctgtgtttctgtctctatgtgtgtgtatctgtgtctatgtctctatatctgtgtgtgtgtgtctgtgtctatctcaaacttgttttttccctttttgtggagaatggggtcttgctatgttgcccaggctggtctccaatttctgggctcaagaaatcctgcctctgcctccctaagctctgggttacaggcatgagccaccacacccagcctctgtgtctgtctctatgtctctgagtaggtatgtctctgtctgtgtgtctctatctctgcgtgtgtgtctctgttccaatgtctctgtgtgtgtgtctccgtctctaaatgtgtgtgcctgtgtctgtctctgtgcgtctgtgtctctgtgtctgtctctatgtgtgtgtgtgtgtgcctgtgtctctgtctctatgtgtctctgtgggtctgtgtgtgtgtctgtgtctctgtctctatgtatgtgtctctgtgtgtgtgtgtctgtgtctctgtctctatgtgtgtgtctgtgtgtgcatctctgtgtatctttgtgtctgtgtgtgtgtgtgtctgtgtctctgtctctctgtgtgtctctgtgtgtgcatctctgtgtatctttgtgtctctgtgtgtgtgtgtgtgtctgtgtctctgtctctatgtgtgtgtctctgtgtgtgcatctctgtgtatctttgtgtctctgtgtgtgtgtgtgtgtctgtgtctctgtctctatgtgtgtgtctctgtgtgcatctctgtgtatctttgtgtgtctgtgtgtgtgtgtgtgtgtctgtgtctctgtctctctgtgtgtgtctctgtgtgtgcatctctgtgtatctttgtgtctctgtgtgtgtgtgtgtgtctgtgtctctgtctctatgtgtgtgtctctgtgtgtgcatctctgtgtatctttgtgtctgtctgtgtgtgtgtgtctcatgtacagccagagcagtgatcaggcttcccagaagttgggaggtgagtcccaaaggtaggggaacaaggcaggaagaggaactttgtaaaaacagacaccggccagagggactggctaagtaacgccctcccccgccctggctcctgtagatgatatagtcagatgggagggagccaggccagccgcgttggggggtttagtgtgatgaattctttactcttcaccactccagcctccttggggccacccctcgccccagcacccaggaccttcaaggccagaatagtggtgattcctctatgtcctcatgagtcacttgtccttctgggctataaaacgggtgggcgcttgttcccagg

SEQ ID NO: 5612 - DNA, 1350 bp, Homo sapiens
gggaggtgatgagtgcagtgagccaagatcatgccactgcactccagcctgggcgacggagccagaccctgtctcaataaacaaacgaacaaacaaacaaacaaacatcatgggagccattggaaggtgttcccattggaagatgctcccatatgccacagggggccgatatctgatttttgcttcattttcaacccgttcatggtgcaaatgaggaaaccagaccaagaagggagtgactttccccagatcacagcaccagtgcccagcctgtccgacttgtattccgggctgtgtctcgcccctgtgagaagtttctttcctcacagttgtaaaggccagaggtccaaaatccaggggtcagcaggaccctgcagtctctgaaggcccttttccttcctaatccttccatctctaagtctgtgaggcagctaacaggttttgtagtattgtctcacattagcgtggtgatgtccccaggaagtagacgttagaaccatccccattgtgcaggtcaggagactggggaggccctgaaaggcacaatggctagtttggggtcacagaactggcaagaggcaggagcttggtgacccagatggcttcccctctctgagcctcaggggctgggagcatgagaacacactggttggctgtcccagctcccagggtggctgtgagtacctggaagtgccccttgtctcccctcacacatctgccatcactctccccatttccttaacccccagcactgctgccacttgatttttacgaacatctgaatatgacgaacatacagatttttacgaacatctgaatatgacgaagtagcaaaggtggatattcactcattcatttcgtatctgtctcctgggcccaggccatgccggggcggggggtgggggtaacaagaatccggggagttgccaggggaaggggaagtgctcatctggggagtgcgtgggcacagagagattccagaaggaggtgtcctgtggtcgtggttgattcgtggaggggaggtgtggtgatggcacagagggtgatgactgggaccagtgtctatcgggtcagcttcctgggctgctgtcacaaagtgctgggtggctcaacacaacagaaatgtattctctcacagttctaaaggccagaagtccaaaatccaggggtcagcaaggccatgctgtctctgaaggttctaggagaggatacttccttgcatcttccaacctctggtggctgccagtttccttggcattcgttcctggttttgtagacgtgtgactgcaaactgtgccttcatcagttcgtgtctgtccgcctgtgcgtgtctgtccaattttccctgtt

SEQ ID NO: 5613 - DNA, 1177 bp, Homo sapiens
ctccatttcaaaaaataaataaaacaggaccaaagtggtgatgagatgggagtgggtccactgagattctggaggtgctctgaaggcacagctgacaggatttgctgaagcattggatgtggggaataagaaaggagtcagtggtttcaaggtctggcccaagcacctggaaggatggagccgctttaactgaaaaaagggttgacagtgagaggaagagatggggcttggggggtcagatgcccattctgaactcagtaggtgatggtgttaagatacccagcagttcaggggagtcagcagcagcgtcacgcctatcctccatgaaacatcacctctaggctggtctgaatggcagtgggatgtcagaactaattaaccttagtgtcactatagttggcattcgacccccacactgctaaatttgactgccttttttaaaagtgaaaaaaatacatatatcttgagacagcctggcactccaggctagaatgcagtggcgtgatcttggctcactgtaacctctgcctccccggttcaagcaatcgtctcttctcagcctcctgagtagttgggactacaggggccggccaccacgcttggctaattttaaatttttttgtgtgtggagacagggtttcactatgttgcccaggctggtctccaactctagggctcaagtgatcctcctgccttggcctcccaaagtgctgggattacaggcgtgaaccactgcgcctggccaaaaaaatttttttaaatcacctcatggcagaagttaggggaagaaagtttagttctgtttcaaatacaacagttctgtttctaatatatatatcagcagccaccttttcaaattgtaatttaagactcttaagttctcccttctctaccaacggggtggccctggaaggggctctgggtccttaatgagcctgtaattttccagtgcaggaactggggtgtggtggtcccaagcctcaggccatgacctctcttttctcctgcccctagtgagttattataaagaccacatcttgtgttaaaaatcgcagtgtgggctgggcacggtggctcatgcctgcaatcccagcactatgggaggcggaggtgggcggatcacctgaggtcaggagttcgagaccagcctggccaacatggtgaaaccccgtctcta

SEQ ID NO: 5614 - DNA, 1517 bp, Homo sapiens
cttctcaggacaggacatccagcccaaaagagacctcacccgctttgtgaaatggccccgctatatcaggttgcagcggcagagagccatcctctataagcggctgaaagtgcctcctgcgattaaccagttcacccaggccctggaccgccaaacaggtgaggttctgtggcgtggaaaggagtttctcaggcaaggattccttatttcatccagaacatgagggggatggtcttaggcttcttgaactgcagttgtcattaaattatagtcatatagcaggaccgcagtccagcatttgttattaagtgttaagtgacaaggattagaaccttgactccaagcctaaactgaagagtgtttttccagctactcagctgcttaagctggcccacaagtacagaccagagacaaagcaagagaagaagcagagactgttggcccgggccgagaagaaggctgctggcaaaggggacgtcccaacgaagagaccacctgtccttcgagcaggtgagtaggccccaccttagggtgaacactgggggcgggctgttgcagtgatgtaaaatttcttggcctgaaattactgtgaagagtaaaaccgagctttttaacactgagtcagcagctgagcccagcagcttcttgtgactagagcaggccctgtgagtgctcacaaagtggttgtgtgttctaggagttaacaccgtcaccaccttggtggagaacaagaaagctcagctggtggtgattgcacacgacgtggatcccatcgaggtgcgtttgcctgttgactgctaacccaagggcttctggcagtaccaggaagagagagtagacctaatgccaagtcagtgatgggaccgaagtgggtgagggcagtactgacacagatccaacacatgcgtggctcttgcaatgatgtgaatctctcactgaattcaaccttgaagtgcgaatccatgagctttttaaccctgagcaattgttacaagctaactgaaatttgctgcttttggtcaaaatacagtcttcagctaatgctttcttccagctggttgtcttcttgcctgccctgtgtcgtaaaatgggggtcccttactgcattatcaagggaaaggcaagactgggacgtctagtccacaggaagacctgcaccactgtcgccttcacacaggtgaactcgtaagtacacagcctggccccaaacttccccccagttcatttaatccatgcctcacagttgtttccttttgccttaaaggccaatcttttagtttaagaaatatatttatctgaacttttgccaatgatggttaagaatttcttcacctgaataaaccatgtggtcagcattgcatctgaggcaaaagactgtcttgagctaaaaggtatttttgcattctaaaagggaaactaaggcaaaaaacccacttttgtttcccctcctgccttttagggaagacaaaggcgctttggctaagctggtggaagctatcaggaccaattacaatgac

SEQ ID NO: 5615 - DNA, 1517 bp, Homo sapiens; identical to SEQ ID NO: 5614

SEQ ID NO: 5616 - DNA, 1517 bp, Homo sapiens; identical to SEQ ID NO: 5614

SEQ ID NO: 5617 - DNA, 1517 bp, Homo sapiens; identical to SEQ ID NO: 5614

SEQ ID NO: 5618 - DNA, 2676 bp, Homo sapiens
tccctacttgcaccagcagccgtctcagcagtagctacatcagcctgatggatagagacttcatgacgtgcagcagctggaacttttgtttataaagcatctcttttcctcacatttattttgaatttcttacgtttcaacctatgcagattgtccagaacatcgtgggcacagctctgatgattttagtggccattggttttaaaaccaagctggctgctttgactcttgttgtgtggctctttgccatcaacgtatatttcaacgccttctggaccattccagtctacaagcccatgcatgacttcctgaaatacgacttcttccagaccatgtcggtgattgggggcttgctcctggtggtggccctgggccctgggggtgtctccatggatgagaagaagaaggagtggtaacagtcacagatccctacctgcctggctaagacccgtggccgtcaaggactggttcggggtggattcaacaaaactgccagcttttatgtatcctcttcccttcccctcccttggtaaaggcacagatgttttgagaactttatttgcagagacacctgagaatcgatggctcagtctgctctggagccacagtctggcgtctgacccttcagtgcaggccagcctggcagctggaagcctcccccacgccgaggctttggagtgaacagcccgcttggctgtggcatctcagtcctatttttgagtttttttgtgggggtacaggagggggccttcaagctgtactgtgagcagacgcattggtattatcattcaaagcagtctccctcttatttgtaagtttacatttttagcggaaactactaaattattttgggtggttcagccaaacctcaaaacagttaatctccctggtttaaaatcacaccagtggctttgatgttgtttctgccccgcattgtattttataggaatagtgaaaacatttagggacacccaaagaatgatgcagtattaaaggggtggtagaagctgctgtttatgataaaagtcatcggtcagaaaatcagcttggattggtgccaagtgttttattgggtaacaccctgggagttttagtagcttgaggcaaggtggaggggcaagaagtccttggggaagctgctggtctgggtgctgctggcctccaagctggcagtgggaagggctagtgagaccacacaggggtagccccagcagcagcaccctgcaagccagcctggccagctgctcagaccagcttgcagagccgcagccgctgtgggcagggggtgtggcaggagctcccagcactggagacccacggactcaacccagttacctcacatggggccttttctgagcaaggtctcgaaagcgcaggccgccctggctgagcagcaccgccctttcccagctgcactcgccctgtggacagccccgacacaccactttcctgaggctgtcgctcactcagattgtccgtttgctatgccgaatgcagccaaaattcctttttacaatttgtgatgccttaccgatttgatcttaatcctgtatttaaagttttctaacactgccttatactgtgtttctctttttgggggagcttaactgcttgttgctccctgtcgtctgcaccatagtaaatgccacaagggtagtcgaacacctctctggcccctagacctatctggggacaggctggctcagcctgtctccagggctgctgcggcccagccccgagcctgcctccctcttggcctctcatccattggctctgcagggcaggggtgaggcaggtttctgctcataagtgcttttggaagtcacctacctttttaacacagccgaactagtcccaacgcgtttgcaaatattcccctggtagcctacttccttacccccgaatattggtaagatcgagcaatggcttcaggacatgggttctcttctcctgtgatcattcaagtgctcactgcatgaagactggcttgtctcagtgtttcaacctcaccagggctgtctcttggtccacacctcgctccctgttagtgccgtatgacagcccccatcaaatgaccttggccaagtcacggtttctctgtggtcaaggttggttggctgattggtggaaagtagggtggaccaaaggaggccacgtgagcagtcagcaccagttctgcaccagcagcgcctccgtcctagtgggtgttcctgtttctcctggccctgggtgggctagggcctgattcgggaagatgcctttgcagggaggggaggataagtgggatctaccaattgattctggcaaaacaatttctaagatttttttgctttatgtgggaaacagatctaaatctcattttatgctgtattttatatcttagttgtgtttgaaaacgttttgatttttggaaacacatcaaaataaataatggcgtttgttgtatgcagtgtgatcctatagcgttgcccagcctgaatggggctcccctcaggatgccagtgagcgaggttacttctctaggcttctctgaagaccactcagaagccatgtccagagagaattagtccctcagagtccctgctgcttcctgggtgtgggggacagactccctcagccctgccttagagggcagcagatgtcatgagacaaggataagtgggtagagaagacact

SEQ ID NO: 5619 - DNA, 1179 bp, Homo sapiens
cctggagaaactcagcaggggcccttgccaggggccccagcaggggaggcagcaggctggacatttggagcatgtctgtatggtgtgaacactcactctcttgtccatgggcaagttgctcacccatctgtgctcagcccatctgtaaaagggaaatggactccaagcactttactcttctgtttgtcctcagtattctcatgtctagaatgaagcaaggttatggttactaccaggatggagtttttttatagagaacttaaaggttgatcataatgaaagcacacatttaaggccaggcgtggcagctcacacctgtaatcccaacactttgggaggccgaggcgggcagatcacttgaggtcaggagttcgagaccagcctggccaacatgacaaaactccgtctctactaaaaatacaaaaagaacaacctgggtgtcgtgacgcatgcctgtagtcccagctactcgggaggctgaggcaggagaatcacttgaacccaggaagtggaggttgcagtgagctgagatcacgccactgcactccagcccgggtgacagagtgatatggctcaaaaaaaaaaaaaaaaaaaaaaaaaaagcacacatttatatggtgctttcccaccaggcacagctctgagtgctgtacatgttctaacacaaaagccttcctaacattcttaacaccagatttctctccgttcagggtccctgcgaccgcaggctcagctcgaggacctgcagaaacagggaaatgcctcctggggcactcctctcaggagtaggagccttgggtcagaaaggtctccctcgtatccagcccaaatctgccttgctttaacgtctagccattggtcttagctctgtgctttggggtcagggagaagggatctgctccccttccccgtggatgtgggagagatccaaaggcagccgccatgccccaaacagccactcaccaggagcagcgtaagccttgctcctcctctcagttgctccggggttgctaactcagagaagggaaataaatagtaacaaaggcgagcatttattaagtacttatggtgtgccgggcctcgaaacatcatcggatttcattctcagaccaaccctaaaggtgctggtgttaactccccattttaaagataagaaccagccgctcaaccaggataagg

SEQ ID NO: 5620 - DNA, 1369 bp, Homo sapiens
acatgcgttgtgttttttcagtaaacgttctgtatctttttgatattccatgacccagtgcacgctgtggcctgtcaccgccaccgtggccccgccagctggcctcccctttggcccacgccggccgcccccattctctgctgcgtagatgccctggcccagggccctgactcctccattcccgccagtagctgttcctagtgtattttcgtctttctggaaaacagcattgagtggttgttttctgtgtaaagagccgtttgtgtcttgggagtttgtggcccacatgccgatagcacggtcatcgcacatgactctcccgtttgtctcagtgtccctgcaacaagcagcaccgcagactgtaataaaaggtggggttttgtgaatggttgtggcaagtgcgtccttgtgaagctcgtctccatgtggctttcttggagaaaggctcccctggggcaagagggtggaaggtttctttggacaggaggtgctgaggctggctgcacctgctctctgaagacgccttcctctctaggttcattgttcagtgttgctgggggcggggaacgggggtggggaggttcttagttgcgaaggagccaagctcctgatggacttgcgttgggatgtgggggacacctgtggcatggtaaggctccctgagtcccttactccaggtcagatgccagtgggactcatgcgccctatgagggctgcagggccagtgctgcccctcggactcctcgaggggttgggtgctaagcgcgagcctcgccgtccctgctggagccctcgcctgcctgcccctctgcctgtgctcctggcagtgtggcttcccggtgctcacctgcacagcagttaacagcagaggccgagcgggagcctctggggagcgaggctgaaacctgaacctgcccatggagacagttgtggtgagggttgccacacacagtgagggcggagcagggtggctgagggcacaggtgcctgggtctgtcccacggggcagggctttggggctgtgatgctctgggaagccagcttgggtcctgggtctacagagggccctggccccggagcccagccagctctgcctctctcagggcctggagtcctgggggagctcagccagctctgcctttctcagggcctggagtcctggatgaatcctgcaggtttttggttgcaccggcccagggaggaagcggggggtttgtcaggtgggctctcctggaggtcctcgagtggcaggggtgaggaggggattatctgaggcatctggagatgtatatcctgtggtttcccctgcccctctgtttccgatgaggtgtacggatgagtgacctgcactaagaagtgagttgccaca

SEQ ID NO: 5621 - DNA, 1199 bp, Homo sapiens
caagaccacgcagagcttgcgaaaacggggctgagccggcgcggcgcatgcgcgggcggcgtcccgcgcaccacagggtcctgaacacccgcagttcccggggcagggccgcgtccggaagtccgtggaacggatcttccgatccttgttctctgattcgttaccaaccttccacttccgtagacagttcttcccgccttccgccgtctgctaggcgtgtcgccgcaggaggtgcgcgcccgccctgttttgtttccgggggaatctacttctctgaaggacgctcgggacttccgtttgttcccctcagcttctaattggctacttttatgaatatattagggcacgaaaagtggtagatttttttcttacacgttcaaattttaaaaaagacgattaattgaatgcgaacatttgtggtttcccactgaaccgtgacatttttataaatgtacctccatggatagcgaacaagaagtcaccctcaccgaaaggcgagtggagctttcgtccttaaataaagtgcgcagggaagccgaggcgtgttgtatgaaaggagagaaggttagcactccccttgacaaggatggaagaggccctcgggcctgacaacacgcatacggttaaggcattgccacctacttcgtggcatctaaccatcgtttttttttttttggtgttttgttttttatttttcttcagacggagtcttattctgtcgcccagactggagtgcaatggcgcgatctcggctcactacaacctgcaccccctggattcaagcgattttcctgcctcagcctcccgagtagctgggattacaggcgcgcgccaccacgcccgactaatttttttgtaattttagtagagacgaggtttcgctatgttggccaggctggtcttgaactcctgacctcaggtgatccgcccgcttcggcctcccaaagtgcggggattacaggcgtgagtcaccgcaaagccccggggcatttttcgttttatcttttatcttctttccttgggacacgggcgcgggtcgcacttgtgcacgggcgcgccgttccgccgctgcttggggcttttccgttcatcttcaccgcccgttcttggcattgggtcgtgttcgcgtctcgacacccgacagggcccgtctcccgagggcgcctcggtcgccgcatgaggcacagggcggctcggcg

SEQ ID NO: 5622 - DNA, 1227 bp, Homo sapiens
cctcccccgtgcctccactctgcctcctccagccgccacgctctggtctggagggtaaagaggctctgtgtttacagacacctcccgcccggcctccggcgccagcggaacatgagtcaagcatgacttcgtctagaaggtgattgtgctggcaaagcataaatcccggcccctcctgccccccagcctataaataaagcgatcatatttataatgatgctgggcagagctgccaggcccttcacagcttcaaagtgcttcacaaaacactcgctaattaattctcggctgccctggcggaggaggcaggtgccaaggagcccagctccaggcacctggggagaactggcagcaaggcccctcgctcagggccacccttgtctggggctccccatgccctggggctacctctgagcaggagaaaatccctggcaccgggccgggctggcgcgtggggtgggaggctccggtgacagctctgagcacctccaggccccccgtgtgctggcgcttcctcttggagccatcctgggggtgggcgctgtcattttcatcttacggatgagggagccgaggcacagagaggtcaggggacttggccggggccacacggctgcttgggctgtggcaggctagcaggctctgtggggctggggttgtcggatcccagggcctgcagctttaggctgctcactgtcttgagcgctcagccctgcccctttggctctcagagcctcagcttccccactgggaagacagcagtgccagctatgtcttggcactgagactttagaattctgcccttgctgcccatccttagggtctcagggacctgggccagtggaggtgccgtacccctcagctcagatgctggctgagatctgcgtgtgcgggggcttcctgccccgggggctgctcagcgtgggtggggtcggctctataggctcaggaccctgtatggagggtcgtgtcagtagtgaccccgccccggatgagcaccgccctctggagggctcatggaagtcccatgtgggggctgaccggagccttctgcagcctctgccagacccttgccatttgcccaccagccctgctccccatcctgcccccacccaccatcaggtttccagtagggccaggcctgtgcatgccgactgcggggtccctggctggctcctctgcctggttggtgtatcctgaagctggggatgggcctccccgcctgag

SEQ ID NO: 5623 - DNA, 1176 bp, Homo sapiens
ggacacacccagacatgtgggagcaacagggcctgggtggaggactgggggactggggtcttgccgggaaggtgcagggaaggagagagggaggcacggggcagacagggaaggggcggaagggtggggctggcgggcaatgggcactggagatggaggcaggctctgccagccacgagggcggggaaggtgaagtggagtcagcgtcctctgccagtgcctggaatcctgcaacctggaggcagccttgcgatgagctctgctgcaggcctgtggacgcgagccccactgcttcatggtcgcccactccctctgttagagtctgacctgagtccatttgtactggcagcttccacaacacccactgagacccacgccaacgcgccccgcccacgagaacccaggtcactcccgcttggtgactgcggaagaactttccgggtgtcacgttggtccagtcccaggtatagtccagacccagtgtctgggaatcagtgggcttcacaggcacacaccatggggtgtgcaccccaaagcaccgcagcttgtcacaagtcgggggaccctggggtctcctctctctctctcccccgctccccaggctgtccttctctcaactaagtttccatctggattccagcccacccccatgcacgggacgcaggagctctgggtgcccaccactccatgaagggtgattgtggtgatgtatttgaccttctggcagcaatttaatcaaatctggaaatctgggccggcacctggttcgggactcatcccctgttgctaggaaacccaactcctgcggatcccaccctgctccatccggagacagtgggagagaccctcctgcagctgaggccagggctggggaatggctggagatggatggggacagcagtggcctttgcactggctgacttcacagcagaactcccacgagtgccgagaaacagcgtgtaggggcgctgctctccctacaagcccttccaggcgctgcaggtccgcccctggccctccccccaactccccctccacctctcacaccccctctacccaccctctccctccccctcctccacctacttccacagactccaatctgtttctcctgctccaggtcacttagaagcttgtggcgcatccctcggtacctctctctgcctgcgcaccata

SEQ ID NO: 5624 - DNA, 1180 bp, Homo sapiens
acctgggggtctgtctcccagaaggccctggccacctcctcaggctcttcctcctacccagcctcctggaaaatgttccaccacccacaggggtcccctccttctcccatctccccaatagcagggtccctccagggtgggctggggtgcctggaggaggtgtcggaggcagtccaggcccaagcacttcacaccctgaggcagctgccctctccaggcctccacctttcccactgaggtcttgccccgtcccctcctctgctcagtgggcagtgggccacagcagtggtgacggggaagccactggggtggccgggggggtgtgccccctgtgggcctggcagctgctgctgcacctggctgtggatgggaaatgggccggctgtccaccttgacccttccctgcactctgcctgggcctgggaggggcaggtcaccctggcactggagacccaccatctccccagaaggaagaggccagctcacgggactccatcattacccaccatgctgagcaccaccggacccgccgtagaccctcagtgggggcgtgcaacggagcaggcaccacccgcctggcctcactgtcccctcctgggagtggcccccgcactgtgccacagcctcagtggcaccctccctctactggcacccgcctgtccctttgctggtgccacccagggctggtgcccagaggacccacctgcagtgggagcaccacgagggccacgcagatcatgatgaccaccagcagctgcgatggccagatcttgggcgtgacgtcaccgtagcccacggtggagaaggtgacgatgcagaagtagaaggaggtcaggagggacaggttctcgcccgcccgctccaggtgctggatgccgcaggtcctgcaacccctggcagtgaggggcggcctggggcccaggagctggggggccgtggcccctcagagatcctgcctgcccacgggaccctcactgcccaggagactgagctgtgcatcaccaggcgagccccgccctcctgacagctgggtggcatcaggccctcagccctgcccatctgtccccaagctctgccggagccacctcctgcctgacgctggctgacaatgcagcttggccacagcatggcggcctctgttcacggcgaattccccggagcctccctgcctgccgggtgg

SEQ ID NO: 5625 - DNA, 2558 bp, Homo sapiens
tgcctggctccctcttctgtaaagaccatgggtgttcaccctctgttatcacttctgattttcatgtcagaaagaggatgctgggctccctccccgggctgatgccagccctgcccacatgctgtctccgctggtgtccccaggcactacatggtcctagcctgtgctggtttcccctcagccccattaacacactcagggctcccatgtctaccttcttactgctgttaagttaggacagtcatcctttgaggtcacggtggaggtcacgaaatgatttcagttgtctgtgttcacagagtagtctgagatgctacagttagttgcctttgtaagtacagaagacagtagaattattgaaaagcctagagccttttcacgttgttagttgctcatttaatcaatcaatcaattattttttttgacacttggtctccctgtgttgcccaggctggagtacagtggcacagtcatagttcactgcagccttgaactccttcctttgggtcttgtgtgtggcactcacctggtcatcccctccctgtcttagataacatccctgaggacctcagagaccctttctacgttgaccagtatgagcaggagcacattaagccgcctgttatcaagcttctcctgtccagcgagctgtactgccgtgtctgcagcctcatcctgaaaggggaccaggtggccgccttacagggacaccagtctgtcatccaggccctgtcccggaaagggatctatgtgatggagagtgatgacacccccgtgacagagtccgacctcagtcgcgcacccataaaaatggtgagtggtctgcggtggccgcccccaggggccatcctctggagccgtgggctctcgtgtggcgcacctggtgcatggatggtgtgaacacggtgtgcggcgaggtggtggagacccgtgcttttgcacactggcgttccttaggaaactgcatatcttttaaagcacatgactgttgtggagaatggggaaaagagagctttcattgagctctttttctcattgggaatgctctgtgaatgctgagattggagtgaggcctgttaataaaaatacttgaagcagactttttacagatgagaaatgtaattgttgcacccattctgttaggttgtttcatgcatactttgtgctaaaataactcagtctgcctttttctcccccaagtatcccacccccatctttctctgaagccttgctactggtgtgccttttccagagcgttctgggtcagggccattctcggtgcctcctgcactgcctttgtttggttgctcccatggcgttcccggtgagactgcgggtgccgtgcggtggttgaagagagtgtcattcctgtcgaatgaggaagctgcactaaggcgtggtgcagctgtagcaggtagagctctggactaggagccagaggcctctggtgggcagttggcctggggcaggtctcctgtctgccttcccacaaccacgacctgggagctgcaccgcctttcctgggagtcccacagggctgttgaggagataagaaaggacagtgtgagacagtgcactgtgggccacagggctggcctgcctgcctgagaacggactcctggttccagacggtcttgaggcttgaccagaaatgccaggcttggaacagtgatggtgcgggggaggcaggtctcaaatctgagtatctcttcagacggaaagggcgagggatgaagaaattaggccagaatgctgagtatgagcaggttccctgcatcagaacctggtaagaggggtgggtttgagggattatagctgctgcctctgcccctagagtgcccacatggcaatggtggatgccctgatgatggcctacactgtggagatgatcagcatcgagaaggtggtggccagtgtcaagcgcttctcaacgttcagtgcctcgaaagaacttccgtacgacctcgaggatgccatggtgttctggatcaacaaggtgagtgccctgcctagatgtggtgtgtgactctgcttctgtggccggtctccttttcacttgagagcagcacaccttgtctgtcacgctgagacccagcccttcatttgggaccagtcatattttgtgtccagaaatgtgtctgctgtagttaaaaagaagcaaagcaagcaggtgtttctcccgcaggccgagagtagagggtgatgaatttatatctgaaaatgcagcacatgtcggtactttgagtgcctttaaattttttttttttttttgagacagggtctcactttgtcccccaggctggagtacagtggcacgatcatggcttactgcagccttgacctcccaggctccaagtgatcctcctgcctcagcctcctgagtagctgggatcacaggcacgtgctactatgcttggctaattaatttttttattttttttaatttttagtagagagggagtctcactgtgttgcccaggctggtctcgaactcctgggcccaaacagtcctccctccttgacctcctgaagtgctgggattacaggaatgagccacc

SEQ ID NO: 5626 - DNA, 1099 bp, Homo sapiens
ctgtaagttatcctggcttgaatccaggcgccccagtttcctctgtgttgccacattcgtcaccttttgaaaaacttgatattttacagttccttctgaccactcatccacaagccccccctgttcggcagcctctctgcggggtgggggccctgcccagagaccgggagggtcatttgccgtcgggggtgtccatgagcgaggggccgctcaggctgccagccgcctccatggcacagtctgcagggctgaagggtccctgcgcctgtgtgtgtggaccttcctcgcccgcgcctcatctccccattcttccttctctctcctgttctttgattcgggttttacttcctccttggaggtttctgtctgtctccgacatgctcagatggcagatctgctccatctgcatgctgtcgtctcgtgtggcactgatcgtttccttggggtgtgtgacattgtgctgtggcctcacctgcggagctcgtgttttccatggagttccatgtggccaggctgtagacatccacctggggtgattctgagtttgcttctgctggtgatgagtggggcccctgccccaccatgtcccgcagtgtaacccccggcttcgcagctcaggtcttccctgcacagggttccgtggagacaaatgcttttctttgtttcttttaaaatttaatttaatgttaagttctgggatacatatgcaggatgtgcaggtttgttacataggtaaacatgtgccatggtggtttgctgcacgtgtcagcccatcacctaggtatgaagcccagcatgcactagctatttttcatgatgctctccctcccccagaccccctgatgggccccggtgtgtgatgttcccctcactgtgtccatgtgttctcatttttcagctcccacttataagtgagaacatgaggggcttggttttttgttcctgtgttagtttgctgaggacagtggcttccagcttcatccatgaccctgcaaaggacgtgatctcgttcctttttatggctgcatagtattccatggtgtatatatcccacattttctttattcagtctatccggtttcttttcttatccgtgggc

SEQ ID NO: 5627 - DNA, 1177 bp, Homo sapiens
gagagagacaagtaaatgggggccgttgggacggcgggtgcctggagggcagctctgggctcagcgggcagtgcttagagcacaggcccctctgttgggggatggggaggagagcagtctgcccttgggagcgtaggccccagggagacttctaaagccccccctgtcgtctgctcttcacccagcaccacagaggcacctgctgcacacacaagcatctcactcggcccacggagggggccaggcttcctttgcctgaagctgttttgggaagggtctccacacaggcactgatctcccaagcttttgtcatgatgtcttttaccatttgataattttaaacattgtttttaaacccaaaacatttagtggtccgttgcctctgaagatgtaaacaaacaaatacactatttctgggaacatttatattgagattctttgtggctattggtgtgtctcacaggcaaaatttgatttggctaaaataggctcagatgtatttgtgtgcccgtgtgtgtgtgtgtgtgtgtgtgtgtgtgtgtgtgtgtatgagagagagagagactttgacggttgtagatattttttccgctttgcctactttatgttgtataatcatgtgtttactaacaagttgatgacatggatgtattcataagaccatgtaatattgatgtgattgttgtcgcttgagaaaaaaaggcaacagctgattctttcaacaactgtcacagaatggctgggctgagaacgctgcccagggccctgcagctggcgggagaggtgtctggtgggagcggtgtctggtgcgtcagcctgctgcttcgtgtctcactcgagagttgcttctggtttcacactttttaacccctctgtgctttagcagccgtgaccttgccttcattgcttcatccagtgcaggcctgggttattgaagacaccaaagtgtttctcttccagtttgaaaaccaggcaggtttacacgtgggtttcagtgtatttgcctttgaacccttcaaactaaactttagccttttggctggtgttgaatgtctttagctggggtgacctggagtgacctgggacggtgttgtggtttaccgtctccagcttcagcctttccagaaacccttgtggagggcagtgttggctgcaggtttcatcatattgcagtttg

SEQ ID NO: 5628 - DNA, 1131 bp, Homo sapiens
aaaacagggctgtccacagggccctcggctcagctcaagggtctgaatcccagctcttttttgctccagcatgaccttgggtaggtcacacatgtctctaggccccactctcctgtgccctgggccgagtccagcagaaaactggaagcaggacgggagccctagtcctgggctgtgggggtcaggtgtcgggaattccagttgtctgtcagacagctgtccgtctcctgggctgtgggggtcaggtattgggaattccaggcagcatcggggacccgggaggtgccatctccaccaacattgcgtctcttgttaactcgttcagctgtgagcccagcatttgcagacctggaagaggccaccagccgtgagatggacaggctggggccgggcaggggctgccagcgccggtcgggaggtggacggggcttggaaccatcacaaacacccttcagccctggggcccggaccaggccctgtgaggctgggtcacggggtggacctgcttcagctgggccccttggggggccacaggagaccacgccctccagcctcccttgtttgggtgtgtggactgaggcccagggcggggttcattccttcgagttcattcacacagcagacaccggtgagggctgtgtagggcatggacacagggagctcatggcagggctgacacagggtgtggtgggcacagggacaggaggcacgggaggcttcccgggatgtctgggaagtgttccaggccaaggctggggaggctggcccagggcaggtgacggacagaggcctggactggggtagcacccatgagaggggagaagtccggggcagtcggcgggtgccgagggtgagtgacacgtcctgggggaggggtagccgggtgccgagggtggatgacacatcctgggagaggggtagccgggtgccgagggtggtgacacgtcctggggtaggggtagccgggtgctgagggtgggtgacacgtcctgggggaggggtagccgggtgccgagggtgggtgacacgtcctgggggaggggtagccgggtgccgagggtgggtgacacgtcctgggggaggggtagccgggtgccgagggtgggtgacacgtcctgggggaggggtagc

SEQ ID NO: 5629 - DNA, 1179 bp, Homo sapiens
aggccgccaactgcactgtgtccacccagtcctccaggatcgatgaccagcgctgcccgccacctgacgtactgccccggggccctaccatgccggacgaggacttcttcagcctcattcagagggtgcaggctaagcgcatggacgagcagcgggtggacctcgccgggggcccggagcagggggcaggcggcccgcccgagccccagcagcagtgccagcctggtgcgagctaaggccctgtgcccaccgccaggcccaccctgcccccactcctggacgccggtctcacagtcacagccacgtcctcccgaggccattgccgaggacaggcactgggcatgcagccccacggcctccccgacccagggcgacaggctcaggccaagctgcccgtggtgggagggcgtgcttccatcccgggctggcccccatggccctcagcttcctcccttctgcccctgccgcaggccggacggggccttcggcatgtcggccccgacctggtgctgtcagactcccgcatcctctcccccaagcccttcccgttctgccctgccctgccaaatgtgaaaccctgctgtctcccccaccctccccaaaggtgtctctgagccgcctcttggggccaccaaggacagggccatgttctgtccccccagagctggtcttgggatggccgtgtgacaggcatgctccacccctccagcttcgtcctggggcagggctccctccaagcctgtctccccactccccggccagaggtcagcaaccacagaaggccccccagaccacgcatggcagaccaggctgcagtggcagccctgaggtgccccccgccgagtcccagggccctgcaggggcctcgacaggagccgggcctatctctaaagcagagggaatggctgggcatgaacttcgacattccaaaaccccaagccaggaaaaagggcagggcctggtcctagggatgcttactggcagcaagagcagtgcccagtcagggtgggaggtagcaccaggctctgtgaccctcacccaagtgggggggtggtcagtggaagctggggaggcttcactcagctcaaccctgcagaccccccatatgagaacccccctcctcccaccagctgggggagatgacatcactgctctctccatggggagggggctcacagg

SEQ ID NO: 5630 - DNA, 1127 bp, Homo sapiens
gtgaaaccatgtttggaaccctggaaagcatgtggagctggggcccccagagaggcctcctcccctggtgccagggtgcccacttgcagcagctgggaggctggcctccctgagaaaccaccagaagcaggcagcctcagctggacctgtgggcctgtcatagggagtgtggcagagggccttccatctctccccagggttgtgtctcgcaagtccctgggctgaagtgtgggaggaagcaatgtccaagagttggggaggaccccggccagccaggggaagaggccctctgtgccccatccatgtacagcctcctgccctgcctgggtgtgatggctgtcccatgggggagtgggaggcccaccagagggatggcttggatggggtcagagcccccgagggagggagtgcacagtcacgtgtggccccaggagtgcctggagcagctcccgcctgagctgagggtgccctgtcccaagtgggacactcacccacagggcccctcctcactcccgtcccttccccgtccatcatggctcgggggtgtcactcttgtccccactgcctggattttctttcagggagccccagactctggtaaatgctctgcttcctcctgcctggatacttctaatgaccctgacgacctggacgtgctcagaacccggcatgccaggcacacccggaagcggaggcggctggtgtgagcagcaggtgagtcctgagtggggaggccactgccctacaacccaggggacagagtggtgtccagatggcagggggccttggcctctgctcggctctttggcgctcacagcaggtgtgctgggttaggtgggcaggtccagggtcatggaggccctccagggggagaagcatttaacccacatccttcctgctggccacccatgcctcgggccttggcaccactgtgcccctgaccataggctcattccctgcctttggggtctgggctcctccctggccgctgtgctctggtggtgccctgttcccgtgcattgctgcgtcgtctcccagcttgtaaaacgatcaccatccccaaccgcagccaccaggctggctcttcactgctggagccctggtgccctggcctggcccttggcgca

SEQ ID NO: 5631 - DNA, 1460 bp, Homo sapiens
atccggccagcagaatttatgcaaaggtaaatccacggcactgtgggcgatggctctgtgggacgtttctgttccggcctctgcagcctcctttggaggaatcgtgcatgagtgtggcagagcaggcaggcgtcagtgctggggagcagctctgggctcagaagctgctgggctccttccggtagagagattgggcctttcttcttgttgcgaggcagaacacagaaaggaagatgcgctccgagtcagaagcatggcctccattgttttttttttttttttttttttaggaagcctcgaggcattccctgggacttgaccacaactccccaccctcccaaaccggcgggtatggcctggagtatcagcagccatttttcgaggatccgacaggggctggtgacctcctggatgaggaggaggatgaggacaccggatggagtggggcctacctgccgtccgccatcgagcagactcaccccgagagggtccctgccggcacgtcgccctgcagcacatacctttcctttttctccaccccgtcggagctggcagggcctgagtctctgccctcgtgggcgttgagtgacactgattctcgcgtgtctccggcctctccggcagggagtcctagcgcagactttgcggttcatggagagtctctgggagacaggcacctgcggacgctgcagataagttacgacgcagtaagtgagcctcacggcgccctctggcacagcgcctgtccgagcggcttctcccggggagaacctggagccatcctacctcttgggtggcctggtttgatttccaggacaaggcgatttgcgtgacagcctgctatccactttccctttgactttgcttctggttacacgtgggaatagaaccggctaaagaggactggtgagctagaagctgtgaattggatgcagttgggcacttacagggctgtaccctcagtaaaggcaggctgcagtcgccagcttgctaagtattccaagaggaggaaaatttttaaaaaattataatcacctaaaaggttataagctctgaataaaaaaaaaaattttttagctgggcgccgtggctcacgcctgtaatctcagcactttgggaggccgaggtgggtggatcacctgaggtcagcagtttgagaccagcctggccaacatggtgaaaccctgtctctactgaaaatacaaaaattagctgggcgtggcggcaggcgcctgtagtcccagctacttgggaggctgaggcaggagaatcgcttgaacccgggaggcggaggttgcggtgagccgaggtcacgccactgtactccagcctaggcgacgggcgaaactctgtttcaaaaaaaagaaaaattattttcttcctgagacagtgtctcactctgttgctcatgctggagtggagtggcacgatctcggctcactgcaacctccgcctcccga

SEQ ID NO: 5632 - DNA, 1223 bp, Homo sapiens
gaatcagtgtgaccaggacctatgggagtgtgggggttcaagagatgagtttggagagggagacagaggccaagtcacaccccgccttcggaccaggttaataagggatatggcttttatccaagacttcggtggtgctgttggagggcagagctgttaagtgctttatgtgtacaaactgcacttagagtgagttactgttaataagccctgtttttacagagatagcaactaagacccaaaggacggaaccagcttgctccaggtcccgtggctgagcctttgttgtcagcctctgctttgtcttccaaagtctgtagaaataagtcctgtagaaaggcagatgctcacttttaacccagacaaaacataactaaccgcacctaacaggtcatcacaggtttgttgtctcaagcctgttgtaactgggccgctttctctgttttaggtttggacctcctgcgtacagacggtttagtagtggtggtgcctatcccaacatccccctctcttctcccttacctggagtacccaagcctgtttttgctacagttgatggacaggaaaagtttgaaaccaaagtaaccacattggataatgggcttcgcgtggcatctcagaataagtttggacagttttgtacagtaggaagtaagtactgttgtgttgtcgtgggtggtcccgcagttttaacatgcacatgctttagttgactgttagttgtaattagcatgccaattatgaattgtaccctgagtggaaacaaagtgtacgatttcataaatgttgagctacacatatacctgtgaaaccatcagcacaatcaccctcatgtaattaaatctgattatcatgtcatattgacatcttaaaatgtttctcttgattaaatcttattttgaatatctgatgtaacctgtcaattttctttttactactagttcttatcaattcaggatcgagatatgaagcgaaataccttagtggaattgctcactttttggaaaaattggcattttcggtcagtacccagttttgtaattttttagactatacttttgaaggatgtttgagatttttcttgtctataatggttattttaataaattatcaagttgctaagttaatgttaataaaagacttttaagttaaaagataatttttgtatgtgtgttaaaagcaaaagtagattttaaaaaaaaattgtgtttcagggatagcct

SEQ ID NO: 5633 - DNA, 1178 bp, Homo sapiens
atcagcttcaccttttttggcacttccttcctcttcatcacgtcccacttcacctgtaagttgcttggtgcccgcaccgcaggtgctgtgtgagaacagcttcctctcctgaccgggaccctgtccaaggcaggggtcctgaccgctggcttcatcttccacccagggccgtggggtgggcaccacgcttgctaagatgcacgccaaggacccccggcagaccccggcaccgagggcgtgccgtgctgggcccgtgctctgtcctccgaggcggaaatgtcactggctgggcccggcagcggatgcccggtggggttgcgtctgccgggggtgcgcagtcagggcacagtccagaggtgcggcgctttagggagactcgagcatccggaaccctgtggtccctaccccatttctgttcccacagcaggtgacgggaaggtggcggagcggctgctggactacaccaggactgtacaagccctggtcctgcccagaaatgtgcccgacaccaacccctatcgctccagcgcaggtgagggcgtccacgctgcgtgtgggtggtgccgccgtggttcgcacacgggcgcccgtcgtttttagggcagttctgaagaggcagcgtcctgagctttgggaagcgagggccgaaacgtccagtgcccccagcgcatggcccctcgcggttctttagcacggttagtggggtgggcggatcctgtccactcggcgtggcccactagcctgggtcctggtcctcgccactgcccgccccgccgcctcccctggctgtgtggagaggagcagggacgtggccatcgcctgccatgggcatcgtctgctcctgaggctgctccaggtgccttctggaactgtcccagtgcgaatcccacccctgagggcccggccccaccggctggcgcccaagacccacttcccctgagagccactcccaggccatgttctggggaaggggaaggacctgccgtccctctgcctgtgcccacacatggcccactgtgccgcagcggacgtcaccacccgcttcgatgaggtgttctggtttggagacttcaacttccgcctgagtggcgggcgcacagtcgtggacgccctcctgtgccagggcctggtggtggacgtgccggcgctgctgcagcacgaccagctcatccgggaga

SEQ ID NO: 5634 - DNA, 1201 bp, Homo sapiens
gggtgattttgtgtacccaaagcgctggggactgcccaccgtgtggcccagtcactgggaaggagccccagagagccggctgtctgacatgatggctcagggtggtcatccaggttgaaaactgaccgtgtgatgtttgatttgggcttcatttcgtgtgtaggagcacggttagactcactgttaaggaagctggatgcacttctctaaaaggctgcactttccgtgagcacttttcgtggtacaatccacatgacccactttctcccctgggggacgttggttcagaggttggtagcacttggggagagtatcttaacacagtttcttgacagcagctctggaacttagtatttctgccccgagttttgccacactgagactttgagtagctcctggtggactcaaccctgttcaactcagagacgggcctcctctcactgatgcaaagctttaaggcttctctgactgttctgaaactcttcgtattcttgtcaagtctaaagagactgaagaaaagatttaaatactaataaaaatcagtagataatttctgtaggttctgctggaggaatacaaactgtttggtgttttaaatttaagtgtagaaattgtagaatgtggaattagcacagatccttcctggctttctgtttcacttgatcatttagcccagaccacccaggatgttttccaaaatgttccacaggcgtgtcccgctggatccatttgtccttgtcacttggagaaaggccagtccctgtgacggggcagccctctctgtccctcggtcagctcgtgtgaatcctgggacctcttccggtcggctctgcccgctgttctggggtcgactgccacgacttttgattcaagaagcttcctccaggcgggagcggctatttttcctaaatgagaattgttacattgcaaattgttgaataaaatattttgcgctccttcaagcaccttcacctgtggttccctttggtttgctggaagcgagtgagtgcaggtgtccgcaggcctcggcgctgtcctggaccgcacccaggtcctctccggggacctgcacctgcctcgctgggacctgccggactgcggggctgccgggttgggaggggcgtgggagacccgtccgggtccggtgcggcgcagtcctccggccgccaggggccgctgtgggcggggccggggcgcgggg

SEQ ID NO: 5635 - DNA, 1348 bp, Homo sapiens
ttttatttttttatttttaattttttttgagacagggtctcactcttgcccaggctggagtgcagtggcgtgatcacagcttaatgtggcctcgacctcctgggttcaagtgatcctcccatctcagcctcctgagtagctgggactacagctgcatgccaccacgcctggctaactttttttttttttttgtagagacggggtttcaccatgttgccaggctggtctcgaattcctgggctcaagcaatccgcccaccttggcctcccaaagtgctgggattataggcatgagccaccgcgcccggcctgatcagtatgagtctattatggatgttttataactgattgaagtcatgtaacctgttagcttttattaacatctttctctactgtaacgtttttgcctcccagccagaagttctaaattatgccctggatgattttggtgaaaggggaggctgccttactggagtcactctccgtgttgacaggatattcgcggaggcctcctgttagaactggggagttgactcgagcgtgtttcccagtggatggggcggcgtggtgggcagcgctgcgtgattagccctgtttgtgattagcgtgcttgtgttttatgctgaaaatggataaaagcagcaaatatctacaaatacccactaccacagggactttgaaactcaggaaaataatgaatcgctacgtgtctttagtctccaaatggtgaataagtgtgtttttgaggcctttgggttgtttgtgtatctgctgctgcgtgaggacacatggcctgtcttgactcatgtcacgtgagcgccgccgataacccaccaaggtccctgaaatgccttttgcaggatgctttggagtctgcaatgaagaatggcctgtggggtcacgctctgctacttgcaagtaagatggacagccggacacacgcccgagtcatgaccaggtacagtcccacagtggcctggtccagtggcgagccctgctggctccctgtagcacgcggcgtccgcaccctgggggcaggcggcaggcggatctcacttgactgtgctgtgctcccacacgaactcgggcttccttggcctcgaggcttccttgggtcgtgttgtggagagcttaaaaagtttttaattaactgcatggtttttagtacttcatgtaaaatctcagtgaattcctcagtcttcatcttttatagctttttttaaattttgagttttgctctgttgcccaggctgaagtgcaggggcgcgatctcagctcaccgcaacccctgcctcccaggttcaagtgatcctcacgccttggcctcccaagtagttgagaccacaggc

SEQ ID NO: 5636 - DNA, 1099 bp, Homo sapiens
gaatatttcagacaagtgcaaatagttctttcgaaccggtaaaatctcacttagttggggtaaaaccatttgaggcagatcgcgccaacgtggttggtgaagtaagggagacctgtgtccgccagaagcagtgcagaccagctgccgccctgcccgatgcttcccctggcaacctggagcagccaccagacaacatggagaccctctgtgcaccccaggtctgtcccctgcctcttaactccaccacggaagctgtgcacatgcttccgcacgcaggggcaccgcccttggatactgtgtatccagcacccgagaagaggccttcagccaggacccaggggcccgtgaagtgtgagagcccagcaacgactctgtgggcgcaaagtgagctgccagattttggaggcaacgtccttctggcccctgcagccccggcgctttatgtgtgtgcaaaacctcagccacctgttgttcagcctccagaagaggcgatgtccgggcagcagtcacggaacccaagctcggcggccccggtgcagagccgaggtggcattggtgcttctgagaaccttgagaatcctcccaaaatgggagaggaggaggcccttcagtcccaggcgagttctggttatgcaagtttattatcctcaccgcccactgagtctctgcagaatcctccagtcttgattgctcagcctgatcacagctataatctggctcagcccattaacttttctgtgtccttatcgaactctcatgagaagaatcagtcctggagagaggctttggtgggggatagacctgcagtcagcagttgggctctcggtggtgattctggggagaacacttctttgtctgggattccaaccagctctgtccttagcttgtctctgcctagcagtgttgcccaaagtaattttccacaaggttctggtgcttccgaaatggtttctaatcagcctgctaatttgctggttcaaccaccatcccagccagttccagagaacttggttccagaaagtcaaaaggatcgtaaggcaggaagtgctcttcccggatttgctaatagccctgctggaagcacaagtgtggtgttagt

SEQ ID NO: 5637 - DNA, 1220 bp, Homo sapiens
tggatggtggggccacctccacactcaagctttgcccgtccatctgtgccaggcccgggagccagggtgggccagggagcactgtgggggccttgcagagcagctgcttgggaccccaggatccacagcagggtcagggatggcagctggggaagatcaagacctaggggagagctgggcaaggtggctcctgcctgtaatgccaggccttaatgggagggtcacttgaagctgggagttcgaggctgcagtgagctgtgactggaccactgcactccagcctgggcaacacagcaagaccctgtctcaaaagaacaacaacaacgaaagagctgggggatgaaccagagctggccaggcggaaataggccctggcccaagcccagtcggggctctggggagcagaactgggtaagtccctagcttggtgtcactgtccccagctggggtcagccctaggcccgaggccagctgcagcctccctcctcctggctgtcctccgaggccccgcccatgctgggcctccctgcatggccctgccttgggcacgttcaccccagacggagccatccgaccttatcctgccagaacaacacccaccccccattgtttctctgctttcctgtttttcatcttgagcaagtctgccggaaacagattcagtgcccaggacaagtggtctgagggggcggagaccaacctgggcctggagggctccccacaccggagccacgccctctgctccaggacccccaggaccccactgctactggaggtctgggcccttccccagctgctgggggtcctccctctgtagccctgcctggggcggccatccgtgagtggatgccggggaagcaggagaccagggcccacccatcctgaaagaaccagaaaaaacgacctcagctgcctgggctgtgccttgtcctcgttgaggagctggtggccccattttagggaggagtcccctgctcacggcctaagccgggctgcagcccacgacctctgatgggggctctggcttgggcaggtgggggtgtggccaggcgctgccgggaggaggatgtgcccagggcagcctctccctggccgcaggtggacaggaggccacagggagtgcttggagccagcagtggggcctctctgaggggaagctggcccccaagcctgggcccttcacccttcagctgcaggtcagggatgtctgaacccctgtg

SEQ ID NO: 5638 - DNA, 1132 bp, Homo sapiens
atttgggaggctgaggcaggagaatcgcttgaacccgggaggcagaggttgcagtgagccgagatcgcaccactgcactccagcctggacaacagagtgggactctgtctcaaaaaaaaaaaaaaaaaaaaaagtacagtttcgggatttcataaattgggttccctgagggtcatttggtgaatccgggttaaagaaccctggtctgcatcactgtccttgtttgtttttcagatgcagaggccaggatgtgggcccagccctgtgccaggaggctggctggaataaaggtacagatagaggcctcaccccctctgggaccactggcactcagggtgtttgcagcctcagagcccacctgcccccagggccacagctgcatctcctgccctgctgtcattacagggatgggcaggctggcatgggggcagccgctgcccctgcctgggtgttgctgtgtattcctgccggccaggggccactgccaggaccacgcctcccttttcatatcccgattcttaagttctgctattgtggtattctggtggagaaaaaagaaccgcgtggctgtttttgaactgcctggaacctaagaccctgaattcttttcccccccaaggggaaaatctatatggaaaacatttattttaaaatacaggatgaagtgaattaaaagatttaaatgcacatttctttaaggataatatttctgtgttggcaaaatttgagagtaaattggtcttgaatggaatggattgtcttgactcacacattgcggagcagagcccgccctgaagaaaggtgttgctgtggtgggatcttcccacgagggtccttgcctgttctcctaggggatggttgctgggtgccctgggctactggggagagcgtacggggctggagaagatggccattcctgggctgtttcctagggaatgagttgtacatctcatggctggattttgtaaaatcagtttttaaaataccgcatatatctgttttcttactggaacacctttttcttggtctgttgtgcacagcccaggtttggggggtactggtcattgactgtttcagaagccgctgtgtttggggaactgccctggcggcttcagaggtgtgtgtgggttga

SEQ ID NO: 5639 - DNA, 1224 bp, Homo sapiens
ctgccccgtgaacgtttgaatgtttgatagtctcacactcctgttttgtggacaggcatctgttttccttcgctggtatctgggagagagggtgggccctgtgagtgggctttctaactctcgcgctgggctaggctggcctctaggggtctgaagggatagtgggaaggtggagggtgccttcaccaggagcagccttcatgagtgagttttaagaacctgtgaggatcggtcaggtcaggtgaggtacgcgctggatcatgccgtacaccgtgtcaggatcacgcaggacaggactggggaagggtttgctggcgtctcggttaatagcagtaacggcagccgcttgtgttcttgattctttgccaagcattcttgttatttaacacgggaaggaggtgacttcgcctgtgatggacttccagtgtgagcactggccagagtgaccaggctgaccagcaccagccctgatccaggtaagaggtgaggcggaggcttgccctccttccctgcctgccgggtgcgtgtgagcggctgccctgcggatgctgtcctggacctgttggcaccacagacagttgctctgctgtgcctgtggcctcggggcaaagagaaagtggcgatttctacactcagtgctcgggaaccagtgggcactgagaatggtttatggcctgacattacttgcaaccaaagccaggcagcatttggattttcgcttttggaaaccaccttacctggtttgctccatgagggaggggcagcaacatcgctgggaaccctgaggtgtagatatgtataaatgagctgtgtgtgtatctgaagctcgggcacttgtggggttaccaggagtgtgcgtctcactcccaggcctcgttctggaaacgattctgtaggtctgtctgggaggccttaggcaagtttgattaagaacagtcgagctggataaacaggctgttccttgtccagcactagtcatcccaggggggcgggggcggggctgcaactcctgtgcacaaaggaagggccctgggtaggggtcaggagctgccttgcccagagatgtgtctgggtcactttggaaacaggaatcctctccccaaaatgggtagcaatgggggtacagaggccaaagacgcagctgcatgtcctgcagtgcctgggacgccccgtagtgaagagtgatgtggcccaaatgtcagcagtgccagtgtcagactcctg

SEQ ID NO: 5640 - DNA, 1224 bp, Homo sapiens; identical to SEQ ID NO: 5639

SEQ ID NO: 5641 - DNA, 1224 bp, Homo sapiens; identical to SEQ ID NO: 5639

SEQ ID NO: 5642 - DNA, 1209 bp, Homo sapiens
ggctatccccgggtacaggttgatggggacctcggctctttgcaggcaccggcatggcctttggcttgcagatgttcattcagaggaagtttccataccctttgcagtggagcctcctagtggccgtgggtgggtactccagggcccctgcctgggctctttgaggggtgggtttctgctagggttggggctgtggttctgcgtccctgactctgacatggagccccaggtctcggcgggagccccacctgagcccacccaccacgtctgtcaggaagtagcctgtgcccggttctcttagcctgggaagcacagaggccccagccctcttccatttcctgctccacagttgcaggctctgtggtcagctacggggtgacgagagtggagtcggagaaatgcaacaacctctggctcttcctggagaccgggcagctccccaaagacaggagcacaggtgagagagcctgggggttagcgagaagtgaatgccacctctccagcacccagagttttgggcagccaagcctgggtgcaccatgcgataggctagacaaggtccctccctctggcccggcctcctcagcatgtgactgccagatgggttggagctgggggtgggcgcagtagacagatcttggagagctccctttgaggagaaagaaccaagaggggctggggtgcccctgagattgagaggaagggtgcagagtgaagggtgtggcaaggccacagcagccacgtgggcacccgagaggagtgaggctggactgagaagccccgcattggacccaggcctggcctccactgcccgttgtccttgttacggaacccagtttctgccatgataaaatgggcacagggatgcccagccacgatggatgtggttcgagcttgtctctctttgccttttacagatcagagaagctaggagagctccagcaggggcacagaggattgggggcaggaggagtctggaacacagccttcatgccccctgaccccaggccgaccctccccacaccctagggtaccccagtcgtatcctctgtccgcatgtgtggccaggcctgacaaacacctgcagatggctgctgccccaacctgggacctgcccaggaggttggagcagaaagggctctccctggggtggtgtttctcctctagggtattgggatgcatgttctgcactgccagcagagagggtgt

SEQ ID NO: 5643 - DNA, 1166 bp, Homo sapiens
ctcggccgggagaagcgcggagcctcctggctgcccccagccggtgcggccgccaccgtggccgtgagggcgcctgggtcccctctggaggttttgccgcagcgctggccggcgccgagatatgaccagaggcgttgaaagttggcgcgttgaggtacctaggatgggcgaggaaatgaacaagcttcaggggagaagaaatgactgtgggaacaggtgccttgaggtagagggaggggactgggccaggagagaggagccgggtggggcacagggacagcccagggtccctcagagcttcgaggccgggcgccctctgcgttgggagcttggggtccccctgacagaaaacctggggggggcgttgcgggagtgagaggaggctgcagacctgacacagatgggggagcgggcgggaggcccgagacctggggaagtgggaggagcctgcagacctgctccttggttgcctctgctccccaccaacccggctcccttccctggcttccctggctctcccctcctggaaacgtggaggacggccagggcttctctctcccccgtgcctgtggtgggttcaccaaggcctgtgtgagaagctctcggggtctgcccaggtccgagggcagctgtctcagtgctggctgctgcgtccgcacagcttctcggtcattctcgatcctgttcttccagcacctccgcaggctgggtgttcttagtccagtcgggtgccaggtccatccccatctccacccgttctgagccacctcccgcctttgctaagtccgtgctcccctcccagctgccctccctcccccatcacattttcaaaacaagctgggcagtggcctctccaacccagccccggagcaagcaggcccaggcccggggctacccggcacacacgcgttgtgcgtgagctgggatgcaggccccgcgttctgcagaattgtgcactgaagacgccagggctcgcagtggctcacgtctgtaatcccagcactttgggaggccaaggcgggcggatcacgaggtcaggagatcgagaccaccctggctaacacggtgaaaccccgtctctactaaaaatacaaaaaattagctggacatggtggcgggcgcctgtagtcccagctactcgggaggctgagacaggagaatggcgt

SEQ ID NO: 5644 - DNA, 1133 bp, Homo sapiens
ccaggagatgtctgcttaagacaaggctctccaaacagcccgcttcaccggcagccgcagaggcaccccagggtgtcctcggctgccccggtgggcagggagcctggaggaccagccacagggtcgacaccaaggggcacagaggacagtgcggaatgagggtggacacagatgaagccagaggtggttttgtagggatgcggacatggggtgctctgagggaaggcagggacaggcaggggcgttccagtgtggggtgcggtcaagtacctgccgtcagggagagggacgggcgggggctgcaggctgaggggtgcgaaggccctcgaggcacttccctctagctctgcatgcacgaggcatgcttctgctgggttggatgttggaaatgagaagcagccaccatcctcgggcctgggcgcacagcacctttccagggagggacagggcgtcgcagggctgaaactaagccaggtcctcacctgttctccgaggaccttcaattacattctccgggagcttccaaaagtgcccacccacgtgccagtgtgcgtgctgggaaactaccgggacatgggcgagcaccgagtcatcctgccggacgacgtgcgtgacttcatcgacaacctggacaggtgggtgcggtggccctgctcccgagggaccctgcccggtgctccggtgtgcgggggagggtgctgaggcagaggcccagggaggggttaacgttagcatggggcccggcggatgtgggtctcgccgctgagtggggctcactgaagcctgggtctccccgatggcagggccgggaactgtgtgctggggaactgtgtgccagggtgaagtgctggcactgtggggtcacctgcagaagggcactcggcttagctgcttagcagggctcagcagggtcctgtggcctcaggagcctgcaggaggagggagggcagtgcggacccacagctgtgggcccaggggtgatccttggcaccagggcaagggtctttctcttgcatcttttttcctttctgaaagcagacctccaggttcctcctacttccgctatgctgagtcttccatgaagaacagcttcggcctaaagtaccttcataagttcttcaatatcccatttt

SEQ ID NO: 5645 - DNA, 1169 bp, Homo sapiens
aagagcaaggacaaggaggagggcaaggaggagcggcgacggcggcagcagcggcccccgcgcagcagggagaggacggctgccgatgagctggaggctttcctggggggcggggccccgggcggccgccaccctgggggtggcgactacgaggagctctaggccggcgtgggcagtggccgccctggggcggggggcgtgcctgtcactgcctggggaggcatttgcctctgtaccatcgcctttgccgctgccccgtggctgccgtgtgcgcttctgagctggaagaggccgggcattggtggtccccaggctgggccctgcaggtgctgggccttcaggcccagtgtgagcctgctctgcaagaagggaggggacagctggcttcagccaggctcggtggacaccctggccctctcggggcagagccgccagtgtttctcagggatgtgactgaggcccaggagggacctgtgagggtctgtttacagaggctgggcaggggccgcttggctgtggggtgtgcgctgccccggcacctgcttgccctccgcgctcatctggggccgcagcatgcctatggttccgcttccggccgggagccctgaacacgggtgtgcagactcaccctaaagggcggcccaggccccacgctagaaggctggcgagaccgaaggcagcatgtgaggcctctcctgggagtgggggttgtgtttcccacagtggcctcagctgcgcccccgctcaggtgagcccgaaggcaggagccgggaggcactcctcccaaacactccactcagaccataaagcactcctgtttcactctgcgtgtgtctgttcttctgcctgtacctctgctcccgctgccccgggcccaggctgccgtgggttggcaggaggctgcccagcagtggtgtgaggacgtcccaccaagtctggccacaccctgggtacattccagcccacctgtgccagggctcagcagctgcacgcagcacgcttggcgacctcagccccaggaggtggaagtccactctgcaaggctcccaggcagccgcctgcagccctgccccccgccttcaggctcctgccccctccagctgtcagcagcgcccagcctccacccccacagctactgttgccatgagaaccctgcagggcaggcagga

SEQ ID NO: 5646 - DNA, 1099 bp, Homo sapiens
gggcggtggagagcggggaggggggaggccttcgggcggtgggagggggagagagggaggcctttgggcggtgggggccacggggagggtggtcttcggactacgtgcgggacaggaggtcagggctggcaagtccctcaggcctccctcgttgccccagcctcgcgggccgcctaactgccccgttccaagggtgccaccggaccccgctggagaggaacttctccgttggctggatttcatcaccacccattcccgattccacgtttcctttaagcggggctggcggagccgcaaggcggcaaggaactggattgcgattggtcagcacgtgcctcggtcggcggtacaattggctgaggcgctgggccttgggaagcattccccgacgggattggtcgtcgctctcgcagagcccgcctcccgcagtacaagcggcccccgggtcgggtgggaggaggggactccgggaggaggaacatggcggtggcggacctcgctctcattcctgatgtggacatcgactccgacggcgtcttcaagtatgtgctgatccgagtccactcggctccccgctccggggctccggctgcagagagcaaggagatcgtgcgcggctacaagtgggctgagtaccatggtgagggcgggacctgcgggcatgccaggggcacgcctggcgaggcgggggcggggctggcgggacggagacggggctgacgaggcaggggcggggctggcggggcgggggcggggctgcgggccgtagcggactgcgctctgctccgagtcctgcccctgctaggtttgacccaggctgaggtcctgggcgggaagggcgtgacacggcctgacaccctccccagcagtctcccagttcccgcgccctccccggttccaccctccttcgctcattcatccctgtcccagcctcaaggggcttcgtctctcctggggaaggggctgttcagagctgggatttcagaccccttcggctgggagttcctcccgcggcctccaagggcggccagggcacgtcctgaggccgccctcccatcccagcggacatctacgacaaagtgtcgggcgacatgcagaa

SEQ ID NO: 5647 - DNA, 1213 bp, Homo sapiens
aaattagctgggcatggtggtgcactcctgtaatcccagctacttgggaggctgaggcaggagaattgcttgaactgggagacggaggtgacagtgagctgagatcgtgccattgcactctaacctgggcaacaaggaaactgtcttccaaaaaaaaaaaaaaaaagatgctttttctataccaagtgatatgttcatgtggtttttctcctgtacagttaatatggtgacttatgttgatcttcaaatattggaccaaccttgcattcctggaataaaccctacctggttatggtgcactatcacttttatatattgctggatttgatttaaattttttttgaggattttgcatctctgttcatgaaggacatttgtctataattgtcttttgtattgtctttgtctggtttttggtatcagggtgctgtgggcagaaaatcgagaccaggagtgggtttgttgtcatcacaaatgctcgaaaaatgtggaagcagctttggaactgggtagtaggcagaggccagaagagtttggaggagcgagaagaagcttagatgccattcatggagtgtaaagggtgattttgttgagggctcagaagagaactgtagggaaagtctgaagcttctttgagaatacttaaagtggtcatggtcagaatgttggtagaaatctggacagtgaaggccattctggtaagatctcagacagaaatgaagaacaaggtgtcagaaactggaggaatgaccatcctagttataaagtggcagagaacgtggctgaacggtgtccatgcccagtccttcctttgtggaaggaactgggatatctggctgaagaaatactcagggtgtggcatgttttcttctaactgcagagagtaagatgtgagaagagaaatgaattaaagatggaatttataattaacaaggaaagaatagggatcgtaaggattttcagcctgcccatttagggagtaaataagatgtctttaggagaacagaccaagtgtgtggccaagcaacttagtatggacagaacgaagccagaggctgctcatcaggacagtgggaaaatggccccagaggcatttcagattcctggtgctgcccctcccaccacaggcccagagtgccaaggcctttgggaaggaaatatgtcaaaagagaggtgtagggtgtggaccttagagcctgctggccagggccac

SEQ ID NO: 5648 - DNA, 1140 bp, Homo sapiens
gtccaggcccagcctgcaggagggccggggcgggccagcacaagtgtcctcagccccagcagggggtggcacaggatgccccataagcctgacctcccctgtgcacaggcccagctgtccttcaacacggacacgctctgctgaccacccagagctgggccagggaggacacgctccactgaccacccagagctgggccagggactcaacaatggggacagaagtcccccagtgcctgccagggcctggagtggaggttcaggaccaaggggcttctggtcctccagcccctgtactcggccatgccctgtggtcactgcggttgccgcccctaattgtgccaaaggctgacccggcccgggctgcgtacacccttgccctgctttgccttaaagcctcggggtctgcccggcccctcgcccctgcctggcactgctcaccgcccaaggcgacgccggctggaccaggcactgctggcctttctcctgcccggcctcggaaccagcttttctctcttacgatgaaggctgatgccgagagcgggctgtgggcggagctgggtcagtcccgtatttattttgctttgagaagaggctcctctggccctgctctcctgcagggaggtggctgtcctgcgggaagccatcagcttgggccagctggcaggtggcaggaatggagaagctgaccctgctggccaggcaaggggccagaccccccccaacccccagctgccatcgctctcccacccagcttggccccctgcccgcccacctccctgggagccgggcctgtacatagcgcacagatgtttgttttaaataaataaacaaaatgtctgcgggtctgcgtgtgtgggttgggaagggtggggaggatgggcgcatcaggtgggttagcgctccagaaggccctgcccctcaggcacaggtgctggcagggggtggctgggtcggtctggaggagggaaactgaggcagggtggttcaccatggttcactgtccccctcatcccaccctcaggggttgctcccggcccccttccccttagccttcatcttcccgtccacctgccctctctaagcctccttcaccccttgctgcccacgtggggcctgcagcagcctgggctaggctgtc

SEQ ID NO: 5649 - DNA, 1107 bp, Homo sapiens
atggagatggcctacaacgagtacatcaacgagtactacgccaagattggtgagggggcccgtggggcggggaaggcggtgggggccccgcaaggcccagagcacaggccctgagctgtctccccgcaggccagtttgacaagatgaagtccccgttcgagtgggacattgtcacccgcggactggtggccatggcggttgagggcgtcgtgggcttcctcctgaccatcatgtgccagtacaacttcctgcggcggccacagtgagtggggggcggggtggggcgggggcggggcgggagcagggatgggttcgggggtggggcagggtaggggcgggggtgggggcagggatggggcaggagggggtgaggcaggggacagcagaggggcctgcccacccttcttacatgccacagccagaggatgcgaggctggtggcagggaggggcagtgggggtggcgagctgctggacactgtccaccctgtcccccaaggcgcatgcctgtgtctaccaagcctgtggaggatgatgtggacgtggccagtgagcggcagcgagtgctccggggagacgccgacaatgacatggtcaagattgagaacctgaccaaggtgggctctgggcatgtagggtggggcctgggtggggtaggccagggccaggggggtggggccccagcagtggaggtggagcctgggtgggcagggccctgagctctgggggtggggcctgcatggggtggggctgtggggcacgtggccccctgggctctggaggtggggcagggtctgggtggggtggggccagaggggcagggtgggggcaggatgccccgctgagtgggcaggctcctggccaggtctacaagtcccggaagattggccgtatcctggccgttgaccgcctgtgcctgggtgtgcgtcctggcgagtgcttcgggctcctgggcgtcaacggtgcgggcaagaccagcaccttcaagatgctgaccggcgacgagagcacgacggggggcgaggccttcgtcaatggacacaggtggggcgggagccctgggtgggcggggccgccgcgtcctcacgcgctgacagctgccgtgtccc

SEQ ID NO: 5650 - DNA, 1099 bp, Homo sapiens
ccctggaggaagtgttcctcaaggtgtcggaggaggatcagtcgctggagaacagtgaggccggtgaggggcctggaccacttgctcagcccaccccacccacaaggccccagctcgggcctgcgctgtcactcctgcctggtgtctgggggcgccaccctggtcctgggtggaagccaggggacgccccggggttagcctgcggtcctaggtgggtggtcctggtggccagaggtcccggacaggtgtatgagcctgggaactggggtcaagaccggggatgggggtcctgggcaggcctaggggccagtagccctgagtgtcccctcggcccttccactgcggcagatgtgaaggagtccaggaaggatgtgctccctggggcggagggcccggcgtctggggagggtcacgctggcaatctggcccggtgctcggagctgacccagtcgcaggcatcgctgcagtcggcgtcatctgtgggctctgcccgtggcgacgagggagctggctacaccgacgtctatggcgactaccgccccctctttgataacccacaggacccagacaatgtcagcctgcaaggtgggggtggcagggtgaggctgggacagcaagggagggggagcagggttgcgggggagcggcatgagggcagccagtagggagagggtagcgtgcaaccacctgctcagcctctacctctctgcacagaggtggaggcagaggccctgtcgagggtcggccagggcagccgcaagctggacggcgggtggctgaaggtgcgccagttccacgggctgctggtcaaacgcttccactgcgcccgccgcaactccaaggcactcttctcccagatcttgctgccagccttcttcgtctgcgtggccatgaccgtggccctgtccgtcccggagattggtaggccaccggctggacaggggtgctgggcttgcctccccccaccgcccgctgggagccctgatgatgcccactcctgagcttcctgactctgggcctcaccccacacctgaggctgggcacgcaccggggttcatccgggagtcctgtctcctcgggtcccagaccccaggcgtgg

SEQ ID NO: 5651 - DNA, 1129 bp, Homo sapiens
tggatccagggtgaggagcaggcccggaagaccggctggaggattcatgggggaggacaggtgtgaggacgagagggcctgcccggcacctgatggctgcccccacccacagacatgatggagcgcgccatcatcgacacttttgtggggcacgatgtggtggagccaggcagctacgtgcagatgttcccctacccctgctacacacgcgatgagtgagtgctgggcgcccggggctggggctggggctggggctgagtggcgcctgagcgcggcctccccgcagcttcctgtttgtcattgagcacatgatgccgctgtgcatggtgatctcctgggtctactccgtggccatgaccatccagcacatcgtggcggagaaggagcaccggctcaaggaggtgcgcgggccgggactctccctggaggcgcgggctggcagggaggggcggcgtcctccccggggcctgccccaagcccctggcccacccgcaggtgatgaagaccatgggcctgaacaacgcggtgcactgggtggcctggttcatcaccggctttgtgcagctgtccatctccgtgacagcactcaccgccatcctgaagtacggccaggtgcttatgcacagccacgtggtcatcatctggctcttcctggcagtctacgcggtggccaccatcatgttctggtgagcgcgggccatggtaggagggacctggggcaggcacttgcccagcaagctcaccccacatcctctcagagccccctggaccctggcacgggcctgcccaggaggccgggcgtgcgggtggatgacggtgcgcgtggcccctgcccacccagcttcctggtgtctgtgctgtactccaaggccaagctggcctcggcctgcggtggcatcatctacttcctgagctacgtgccctacatgtacgtggcgatccgagaggaggtggcgcatgataagatcacggccttcgagaagtgcatcgcggtgagggtcgcgggcaggcgggcggctggggtgccgggccaccccacgtgctgacaccactgccttctcagtccctcatgtccacgacggcctttggtctgggctctaagtacttcgcgctgtatgaggtggccggc

SEQ ID NO: 5652 - DNA, 1149 bp, Homo sapiens
ggtggcaggcagtgaagtgggaggtggtagggagtgaaaggcccggccacctaaaggcacagctggtgcctgggtcaagctgaggcggcatctctctgcctggccttgccttctagggctggggtgcctcggcttctgggctgagtctgggctgaggctgggctggcctgggctggggctggagcggcctggctactctcccttcatactccttcaggctcttgcactcactctgctaaccagctggccagaggtcagaggtcactgcccagagggggtcctttgtcctcccctgggctctgtaggcagtgccacacctgaaacgttttcggggggagagtgccagggcatgtgggcctgcactggctgaaaggaaaggaatgctctgggagttatggcagaaggggtggtgagtggctctttgacctctgacctgctggagtcattcgccccagaacgcttggcctgtagcccagctggggccagggctctgtgccgccttctccctaacgctgcttctccttcctgactttctctaaatttctcctctcggcctctgtctccctccccttctggattcctctctctctctctcccctttcacccccgaccctgccctctcccgtgggtctgccagccttctacacagcggcgcccctgacgtctgccggcatcctgcctgtcatgcaatcgctgtgcccggacggccagcgagacgagttcggcttcctgcagtacgccaactccacgtgagtgcccacccgcccctcggagcacccacccctccccagcccatccagtgagtgacatccgccatggtgcagggtcacgcagctgcttgagcgcctggaccgcgtggtggaggaaggcaacctgtttgacccagcgcggcccagcctgggctcagagctcgaggccctacgccagcatctggaggccctcagtgcgggcccgggcacctcggggagccacctggacagatccacaggtgtgccctgtgcagggaagttggggggcagggctgcgggcaaagctctgctgtcactgggctgaagcccacatccactctgggcccctccacctgcactgagttcccagccacgcacaggctgcagtggcagagctgtggtgttgggctcggctccgagc

SEQ ID NO: 5653 - DNA, 2065 bp, Homo sapiens
gaggggggtgtgccagccaccgtccagctgctcttgttcctgcgacctcttttcaggaggaggaagtgggggatggaggctcctgggctggggaaaagggctaggaggggcctggaacccagaccctagagccagctttgtacctcaggcccctgcctttggcgtggtggacggtggggtatcagcacaggagcggggactgcctcactccccaggtgccaagttggcgggtgggcccaggtggacctgctggcacaggtttaatgtttaacgtgcccaagtcccggcccactgatactggaggctgctgccccaggttgtggagggtgtgcggtgcctggcgttggctcctgtgcccacctgccactgcggctgctggaactgccttgaaggaaggcggacagcctgagggccctgagtgtcaggttaccaaggaaaccaaaccagccaaccaaggtctggagaaggatgatgccccgtgtggcccccgtggccctgcctgcagtgtgcagtgtggggctgggcagagaggaagagtcctggttagccagaggtgccaccgcagactccccaggcagggttgatggccctgctggggttcccctggctccactggcttgctgtgactggggacattccttagctttgaggcaactcagctatatcccagaggggaaactgaggcagagggccattgccccctcgccccgttctccagcaccaggataagactgattagccacatgtgtcagctggcaccgtggcctgggcccctcatcagcgagatgaaagtgtggttaggaactagggaactagggcctggcctgccatccccagcactgccaacctcggcctcctgaggccctcgggtgccacctggcccctgactgcagcccctggtgtggtggctttgggagtgacctgcctgggttctgtgtctgaggccagtgaggtcagcagactccatcttaggtgtcctcggtgcctgggggacaagccagaggctggaggagcagcatcccttccaggctgcacacttgtcagtgccgggttctggggagagccgcacgggaaggagaggtcgctggcggcatcgtttgctgctccccagagacagacctgggcccttccctctgggactcccaatctggacggggttcctggcttgctgtggggcatgttgaggccggaggctgggcttgtggggctgcacggccctgcccaggagaactcagcactgcctggacggcgagactcagcttctgagctgagggctctatcaggcctggaagtggaccctggggaggggtggggcagggtagttctgataagtcctaggactgttcgcttccgggttctgagccctggcgtcagggaggaagggcatgtccagaacaatggccagaaccaggcccggccagctcggggggtgacgggggcgggtggctggggcagcgctgccgtgtgcaggggccgagccctgcggggccgtgagccggccctgccttctgcttccttcccagatgtagccgcctgtcccgggagcctggactgtgccctgaagaggcgggcaaggtgtcctcctggtgcacatgcctgtgggccctgccttcagcccttccaggaggaccagcaagggctctgtgtgcccaggatgcgccggcctccaggtacgagagcaaagggggaagtcgatggggggatgtccctgcatgaacctctccctgtaagaagcggccggctgggcgcggtggctcatgcctgtaatcccagcactgtgggaggcccaggctgttggatctcatgaggtcaggagttcaagaccagcctggccaacatggtgaaaccccgtctctactaaaaatacaaagtagccgggtgtggtggcacacacctgtagtcccagctactcaggaggctgaggcaggagaattgctttaacccgggaggcggagcttgcagtgagccgattcaccactgcactccagcctgggcgacagtgcgagactctgtctcaaaaaaaaaaaaaaaaaaaaagaaggccgggagcagtggctcacgcctg

SEQ ID NO: 5654 - DNA, 1152 bp, Homo sapiens
ttgccgggcgccgccgccctcgtcctgcccaggcccgcaggccctgcaggcctggtccgctggtggcgggggccccgcctcgcccacgatggaataaacaggcctggccggagggcgcagcgcggagcctccaaaaggccgcgccggatggggcttctgccggttcccagaggcgtaccttacattcatggcttcttccgccgggagcgcgtctggctcaggcctccgcgccgcggccatctggctctgggcgggcccgccgggagtctgcctgtgtgcgtctctgtgtctccgtgttcggggctcctgcgggtgtggggctggccctgagtgcccgccggcttcgctgccggtgcgcgtcccggggtcggggcctcagtgctgctctgcctgtcctcacgccttgggtggcgctgggcaccggccttgtgcgccatggtgggcgctgaagttctgggggcacttatggcgcaggctcggggtgctgttctagcttcaataggagggagactgttgcagcctcagagcctccgcctgcatcccctgccctcgagggcactggcattctgtctttgggactgagggctgcaggtggactccggaggagggtgataagcccagggtcctgggacaccctctcacctgcacagatgggtcctgagggtccagagagcagagctccctgcaggaacccaggatgcaaagctgacgtttttctggggggactgaactgggagactttgcgactgcattcgtacagtactcctggcagccctgcagaagaggtgctgtgagcccgttttacaggcaaggaatccgaggcatggagaagttaagtggattgtggcacagctgaggcgctgtcctgggcagcctggttctgtgtgtgtggcctcaaggggccagagtgaggccggcttcctcctgggctcagtgcccctggatgggaggtgggcatgaacaggagaggcttccgagaatcagagtgtgctcagccaggaaaggcggaggccacctattcaggaaacggggctgcagctgctgtgctgagcccgggtgggtggcaggtgccagtcctcagttcaccggcctctgcagcttcgtgtctgcctcaccgggagacctggcagggccctccctaggcaactcctc

SEQ ID NO: 5655 - DNA, 1176 bp, Homo sapiens
cagcccagggcccccgatgcggggtcagtgcgtggggggcgcagggcccccgatgccgatgcggggtcagtgtgtgtggggcgcagggcctccgatgcggggtcagtgcgtggggggcgcagggccccctcgtgtccagggcactttggtacactgtcccacaaggcacctgtctcagaggaggggccctggcaggcagcgtggcaactcccttccggagcccagctccatgctaacctgcccacagcaaccccacagagccacattccctgctgcacctggtctgcaggggtgtcccaggacaggcccaagtcagcccagcatgcagctgccctcctaccctgaagatgggagtgggctttccaggggacataaggatgtcaggcctggacctcctgggcaggaaagggtgcaggtcctgagggcctgtgccccacagccccagcaccaggtggactgcagcgcagtgggtgggccagtggcagccagggagaagccccccgtcagcaggctggggtctgcccaccagggcctccccacgtctgcctttgagggtgcctgccatgccctgggggatcctggcatctttactggactggaagcaggagacagaacagtgtctgtcccggggtgacttcatcaggagaccgcccacatagagctggaccccgcagctgaagcggaaatgtgagacaggctggcacctccggaaaaactgcctttcagccttggtgttccgtgcaaggtgaaaagaaataggtcctcccagtttacagcttgaaatcaggctagtgagtggccctggagaccacgaggggagaatttaaaggccccggctggcagggtctaggtggctggcagaggcacatgcagaccctgcctggagcctgccctaggacgctgggcgggtcagtctccgtgcaggatgtgagcagcgtccctgggctctatccgcgaggtgccagtagcgtgtgcaggtacatacacgtgcgtgcacactgtgatgacacccggaaatgtctcaggatgttgaaatgtgtccttgggggcagaagtgtccccagttgagaatctgccccagaggaacacacccacaccaggcctcaggattttgtgttgatcaagttccaaggaaaaggaacatctcagccgggcgtggtggttcacgcctggaat

SEQ ID NO: 5656 - DNA, 1915 bp, Homo sapiens
gtcatgaccagcgagttcactctggggcccacggccgagttcttcagggagcacaacttcttccacctggaccccgccaacgtggtcatgtttgagcagcgcctgctgcctgctgtgacctttgatggcaaggttatcctggagcggaaagacaaagttgccatggccccaggtgtggcccgttcctgagacggggagggaccgcccagactagaactgggagcgtagttgggggtccacgcgcccgggttcgcggctgccccgaggctgtgtggtcctgggttaggcgcctctttttctgggccttgatcgtcatttgtcacatggtacaccaactgggctgtctggttagtgaccagggctgccttaggcacaaggccggggcttcccccgcctccagcacgtcctagactcccagagcgatccctggcgggagccctcgcgatgcccattcccttctccgtctgcagacggcaacgggggcctctactgcgcgctggaggaccacaagatcctggaggacatggagcgccggggagtggagtttgtgcacgtgtactgtgtggacaacatcctggtgcggctggcggaccctgtcttcatcggcttctgtgtgttgcagggcgcagactgtggcgccaaggttagcgcccgactgcgcggcgccccgcacccgaggctggccccgcccctcacggagccccgcccctccgcccagccctcggaacccatccctggtcttggctgcaggtggtggaaaaggcataccccgaggagcccgtgggcgtggtgtgccaggtggacggtgtcccccaggtggtggagtacagcgagatcagtcctgagaccgcacagctacgtgcctccgacgggagcctgctgtacaatgcaggcaacatctgcaaccacttcttcacccgaggcttccttaaggcggtcaccaggtgtgcggcagcaggtggctgcggattgccggccagagccgcctgcgttgaccagggacccgcggggtcccagtgagctgagtgccctgggccacagcggctgtggtcaggagtggctgtggtcaggcacggctgatgggtcggggtggagaatggatcctgagcttgcaaaggcagaggtgctggagatcaggcacaagccgtgctcagcaggcagctgctgtaaggctctgtgatcaagtctgccatctcctccttctggggacctgccctggtgcccagggtgctacctctgctctggggcttgccagtttgtttgcctgggcagggatgtggctgatggtgcctggcacttggcacagggatgcagggaggaggcctgtgcctgcttctccctggagatctggccctactctgccgcttctgtgccctgtagtgtccttctgccatcctgtcccacccagctgggtgtgctcagaagtggggacagagcccccagcggtgccatatctgatctgtttctttcctcccctctgctctcccgtgccccagggagtttgagcctttgctgaagccacacgtggctgtgaagaaggtcccgtatgtggatgaggaggggaatctggtaaagccgctaaaaccgaacgggataaagatggagaagtttgtgtttgatgtgttccggtttgctaagttagtagtagaactcatttattttccccttcttccttctctcagttttggtggtgggaactgaggcgcagctggtagggaagtagaggcttgagggagccaagggccccgcgggcaagtctcagggagaagaccagagggtgctcttggccctgagggtaagcagcccctgaggtgggggcatagggagtccttggggctgtggacttgggaggacagtagtgccacctcccggaccttccactgcccccacccatggttaggagaggtctcctggc

SEQ ID NO: 5657 - DNA, 1207 bp, Homo sapiens
ccctccccgtgcccggtgtgtagcaggtcctcgggcggtgtgtgggggccgggttggagggcctggtccaggcagctccgctgttccatgccaagtgccctcgcgtggcctcccctcccagggtaccagggccgaggcagcgctgggctcccacgttggctgcccgtgcagctgcaggctgagggcagggcctgggatctggggctgaagagaccctctgattccaggaccacctggtgtgcttcctgccagggacgctggctctgggcgtctaccacggcctgcccgccagccacatggagctggcccaggagctcatggagacttgttaccagatgaaccggcagatggagacggggctgagtcccgagatcgtgcacttcaacctttacccccagccgggccgtcgggacgtggaggtcaaggtgggcctgggcctgggtcagggtccatcaggaggagggtgctggcagggctggccttgccctgagctctgctccgcccacagccagcagacaggcacaacctgctgcggccagagaccgtggagagcctgttctacctgtaccgcgtcacaggggaccgcaaataccaggactggggctgggagattctgcagagcttcagccgattcacacgggtgagcacctgtcctcgccccgcgtggtcacggccaccgggccacaggcacggctgggctgtggggctcaggctggctccgctcttggtggtggctgtgacctggatccgggaggggcgggcttgccgcagcctcggggtggccacactgcagcttgggggccctggcatccccatccccactgagcttcatggttgtgggacccagagtacttggaggggctgggcacccctcattttcatttctcagggcctgtctagggagggtctctgctgtgggcccagcatccccccagtttaggaggcacacgcacccatgactggggcaccatccccactgtggaccaggccctgttttaggtcacgccctccacgccagagtgtcacttcctggctctgctgtgatcttggcctgaggcccccgctgcctccgctcccaccgtctgccctgtgccctgtgccctgtgcggcaactgtgaggccccctgagcccaggttctgggggaggcggtttctgtcgtggtcacttgagggttgttggcatttccaggtgggctccggtggaacc

SEQ ID NO: 5658 - DNA, 1576 bp, Homo sapiens
tctcacgctagggttgctgctgccagtgataagtgtgggcactggcgcgtgtgagaggcacgaagactgcaggggggccgggacgtcgccttttgggccatcacccaccctgcaggttttgatgtgctccagcctccagacgcaggtggccttcgggctcccctcggtcccggccgacagggtgggtggccgtgaggctcctcccagcctctgagtcagcccggggctcaccatgcctccctgcagctcacactagcgttctcctgacagtggatcgagcgggtggtcggctggctcggcaaggtgttcctgcaggacggccccgccaggcccgcatctcccgaggccggcaacaccctgcgccgctggcgctgccacgtgcaaaggttcttctaccgcatctacgccagcctgcgcatcgaggagctcttcagcatcgtccgaggtggtcctgccccggccctggggtccgctctcccgtctggggagtcttcccagggccttccccgtgtctcctctgtgtctgcatctgggctccctgtgccttcaccgtgtctgctctgtgtctgcgtctggggctcccagggcctttgccgtgtctgctctgtgtctgcgtctgggctccctgtgtctgcgtcttgggctccctgtgccttcgccgtgtctgctctgtgtctgcgtctgggctccctgtgtctgcgtctgggctccctgtgccttcaccgtgtctgctctgtctgcgtctggggctcccagggccttcgccgtgtctgctctgtctgcgtctgggctccctgtgtctgcgtctggggctcccagggccttcgctgtgtctgctctgtgtctgcatctgggctccctgtgccttcgccgtgtctgctctgtgtctgcgtcttgggctccctgtgccttcaccgtgtctgctctgtgtctgcgtctgggctccctgtgtctgcgtctgggctccccgtgccttcaccgtgtctgctctttgtctgcatctggggctcccagggccttcgtcgtgtctgctctgtgtctgtgtctgggctccttgtgtctgcgtctgggctccctgtgccttcgccgtgtctgctctgtgtctgcatctggggctcccagggccttcgccatgtcggctctgtgtctgcatctgggctccctgtgtccacgtctggggctccctgtgccttcgctgtcgctcttgcaggggggtgcaccgggcagtgctgggactgtccccactgcggcgtcccccgtgcctggatcagggcaggtgtggcagatgctggacagtgcttctgggtgtccactgctgtgctgccttggccttggctcctgctggggactggcccctgggtgttgctctgtccaccctgtggcattgtggtcaaatgcatcagcacgccagagtgtcggggggatgtctggtgcctagcaggtggtctcatcatcgtcctggggctggcaagcacgtgtcctttcccacaccgcacacactctgcaccagcctgcacgtgcgcacgcatccatgtctgtccctgagggatgttcttcttcttgtagacttcccaga

SEQ ID NO: 5659 - DNA, 1199 bp, Homo sapiens
gactccgagattcgctcggcgcggcgcgcggcgatgacgcacgtctgcacgcgcagccatgacgcgcacaaggcgctcagcgatgacgcgctagttcggcgcgccgtgggggagtcgtgcgcaggcgcggacagcgctgcttccgcggcggttggggtggtggggccccgggcggcgttgaccatgacccagcagggcgcggcgctgcagaactacaacaacgagctggtcaagtgtgagcggcgcagccgggacggggaggtcgggagggccgcagggccgggttcccggctcgcagcggggtgcccctggacccgcctcgctgcgggcatcgcgcggctgagcagagccctccgtgccggaggccgggtgtccgtggcccgagccctcgctggctcgcaggccccgcgccgggcgctcgggggtggtgcctgactctggcttcctcgggtggaaggaggcccgccctccgccgccgcgctcctgccctgggcccacagcgccgcccctcccggcccccaggcatagaggagctgtgccagaagcgggaggagctgtgccggcagatccaggaggaggaggacgagaagcagcggctgcagaatgaggtgaggcagctgacagagaagctggcccgcgtcaacgagaacctggcacgcaagattgcctctcgcaacgagttcgaccggaccatcgcggagacggaggccgcctacctcaaggtggagctcgggaggccaggccgagcatcaggggataggcacggcaggggtgttgccacggcaaggcgtcaggaccggctggggctcccggctgtgggcagtctgtgcctcgctggcatttcgggcaggggcagcgtggccaggcccattgaggaacccaggctgctgtgggagtgactgtggggctgtctgtggggcctggggcatcctgggtcctggtctttatccggttctcgctagccatgtggttatttctgctcagtgtgaagagccaggtcttgggcagagcacccagcacgggccagtgctaacccagcctggctttgagggtggagaggaagtgttttgggtcagattccggagggaagagggccctgccaccccgtctgccagtccccttgggcttccgccttcccccacacaggatcccttggctacagcacccccagccaggtcccagcacctgagtgtgaggac

SEQ ID NO: 5660 - DNA, 1182 bp, Homo sapiens
ttctctgagagcgggtctttcccttatggcggatttagggaaggaggtttgggaaggggagttcagtttagcacctggaggaggttggaacctgaaagagaagacggtctggctgctcacataaatccctctgccctgtcagcctgagtaaaggagaagggggtcaagttttgggaaggacgcccggtccttacagccggaggtcttacgtgtgtgtgtctttttgttgaggtgaatctgattaacgagcccctggtgatatttgtttgtgcaactacaggccaaggagacccccctgacaacatgaaggtaaggctggcctgatgtggctcctcagatccctgccctcgaccctcaccccgttttcattgcctggcgtctaggtgcagtaaatagctctcctttatctcatgcaccttcagaggtggatttgagagaacgtccgtgagtggggctgggggctccggttgccctctctaataaactcgtcgtagccaccaaatagccttattatccgttttaacctttcttatttttccagggctatctatatgtgcatctagtctgggtcttgtgtgtatttctagactgtatgaccctcagggaacgttgctgaattctctgaccatcttttaagcacatattctattcttggcacagtctggtgctggggatccagctgtgaacccagcagccatatttccatcctggcagagttcacactgtagcagaagcagctaacgggcaatgacagtgccagcaaacacctgctgctggggaaagtagcatatgtcacaggagcactgataaggggcatcgagccttatctcacccaaccttggggcccaggcagaggtttctggaagaaaagagtgtaagctgagtcacggaaggatgcgtgagggctagtcaggcaccgaggaagaaggagcagtcagcgcagaggaaaaagatgatttggtttgtgtgaaaagtggaaagcagctcagggtggccaagctgaggagtacactggggcaagaggggaggagaagagaggcaggaagccaggcccagtccaaagagcctgagtaaccacagcaaggcagatgggcttgaaatgaagggttgtcggaactgtaggggtgacacagtcatgttcctaagctagcaaaaccgcactggtctgcaggacagcaggaa

SEQ ID NO: 5661 - DNA, 1175 bp, Homo sapiens
gtccttgggaattggcagtggcccccccggggaggggtttgttaagctgtcaggtttggcccctgacttaattcgtagcagggcaggctgccgtcttttggctttgaagggtccgtttgctctacctccagggtgaattctgtggtcagctcacaccatgtcactcggcttttttcgcatggcggtgaccagtagtgctgtctacctggctgacaaatgattagctgtgttctctcacaggtcagagtggtgctgggaacaactgggccaaggggcactacacagaaggcgcggagctggtggactcggtgctggatgttgtgagaaaggaggctgagagctgtgactgcctgcagggtttccagctgacccactccctgggtggggggactgggtctgggatgggtaccctcctcatcagcaagatccgggaggagtacccagacaggatcatgaacacgtttagtgtggtgccttcgcccaaagtgtcagacacagtggtggagccctacaacgccaccctctcagtccaccagctcgtagaaaacacagacgagacctactgcattgataacgaagctctctacgacatttgcttcagaaccctaaagctgaccacgcccacctatggtgacctgaaccacctggtgtctgctaccatgagtggggtcaccacctgcctgcgcttcccaggccagctcaatgctgacctgcggaagctggctgtgaacatggtcccgtttccccggctgcacttcttcatgcccggctttgccccactgaccagccggggcagccagcagtaccgggcgctgaccgtgcccgagctcacccagcagatgtttgatgccaagaacatgatggctgcctgcgacccccgccatggccgctacctgacggttgccgccgtgttcaggggccgcatgtccatgaaggaggtggatgagcaaatgcttaatgtccaaaacaaaaacagcagctattttgttgagtggatccccaacaatgtgaaaacggctgtctgtgacatcccacctcgggggctaaaaatgtccgccaccttcattggcaacagcacggccatccaggagctgttcaagcgcatctccgagcagttcacggccatgttccggcgcaaggccttcctgcactggtacacgggcgagggcatggac

SEQ ID NO: 5662 - DNA, 1199 bp, Homo sapiens
ggacaagggttcaggggccgggggtgggaactgggagccaggtttgagttggggctgctacctgggtggggctcccagccttctctttcggcagcccgaacccctggcccagccgcctaccacgtggaggactgcaactcacgcttcccttcggcgcctggcgtggtcatccagggtgtacgcagacccaagcgccacgacacaggccccttctgcacgctctagagccagctgggcacaacctgcttggcccggccaccgagtggaaccatggcctcccccggggctttcccaggcctcccctgggacttggggccccagcctggccttctgaccctctgggcaccccgatgcacccttctggctggccaacccttctatgggctgtggacaaggctggcccagcctggatcccccatctgcccatctccccgctacactgagatgctgttggttttcccgagctctgtggtgtgcagttgtctgtccttcacccgggggcggtcctagagatatggctgccgctgggtcatttccggctttccctgttgaggggtctccattcagctgcccctgaaaggtgctctcttctctagggtggcagcctgtgactgaccctgagctctagcctggagcgagatgggaggtgggctctgtgggacacccccacccagccgtgtcactcaggggcctggtctagctgctgtccacctgagggtcagctgcttgccgagccagggaactgggaaggaggcgtcaaatgccctgagccgccacctccaggtggggtcggcctggccagacctcaggaagggcccagggatctgctcaccagggcccagccccacttcccctaggccttgagctgaagacctggctgggcttagtcacctgtgccctgaacactctggcccagggccctgcagactccactcccggggccttcacctgctgggaccctgcactgcccctgcctgcaacttcgcctggctggggcctcccttgtcatcactggcctgccctcctacccagggtcgggccccaaggctgccaccttgcaggagccttacctgcggtgccgtcacccgcacctccccaggtcctccccagacccaggacccagaccaggcccagagctcaaccccttcaaaaaggctctgggcagctgcttctgtggcctcagcaccaccccctttctc

SEQ ID NO: 5663 - DNA, 1214 bp, Homo sapiens
agagacggggtttcactgtgttagccaggatggtctcgatcttctgaccttgtgatccacctgcttcggcctcccaaagtgctgagattacaggcgtgagccaccgcgcccggcctggtttttttttaaagatagaagaaatagatgtttctgggctgatgggaatgacccagtagggtgaggagtggaggatggtccaggggctgggctgtcactgaatgagcaggtggccggggtctcagcacagcaggggtgtcctcagaggagggctgatgggcgcagatgctggggtgacggctgaggagacactgggagtccactgctgctgcctcccattttctcaggtcttgggctaggaggcaggatagggggaagtggcaggggagaggacgagtagaggacttgactgtaggaggaatggtcagtgagtggacccgggtgcctggtttggtcactgggcagcgggcgcgtcctgtccagggcgcctgcagggggtgccaggcctacgggtggggagtgaaggacagagagtgaggagcccgtgggtgagggactggtgaggtggagggtgtgaattgcaaggactgggatgggaccgtgcgtggacggctgagcctcgggggcgcatggttactgtagcgaaagcctttaggggcagaaagagcagagctgcctgagcgactgggtgtggacgctgctgggaagttagggagaaggacttggtaggggaggaccgagggcccaggcacgggaggcatcgtctggtgaagtgaaacctatggggaatttgggaggagaagtggggaggctgcccacggtttggggaaaacaaccttgctggcaagggctgggggaagcagtgagggtgaagtcctttcagaggctgagaacatgtactgtgtttgtgggtgatggacatgaattctgggcgcagcggcagggctgggttgggtagggaggcgggaggggaggcctcctggaatgggaatgggtgtgattgggggtggccctgggtatcacaggagatggtgatggccctgggagctggggttctggggctcccttcacccctgtagatgggagaaagtgcagggggtgaggccttggcccaggcctcagattcacctttgacccatagggccaggtcttggggcaccccttgagcgagtccctttcctgcagagggctctggcctgaggatttgctgggccagc

SEQ ID NO: 5664 - DNA, 1143 bp, Homo sapiens
aggagttcaagaccagcctggccaacatggtgaaaacccgtctctactaaaaatacaaaaattagccaggcgtagcggtgagcgcctgtactcccagctactccggaggctgaggcacgagaatcacgaacctgagaggtggaggttgcagtgagccgagatcacagcactgcactccagcctgggtgacagtgagactccgtctctaaataaaatattaacttaaataacaaaataaaagtctcttttgtttattgtgaagtgcaacccatgtgtaggaaggaacgcagagcacatgatgcggctcggcacatgatcgtgaacacaccacagcacgccccgcccagcccaccctggccccatcgccagccatgcccagcatgcagcacccagaatgcggggccagtcacactgcctgccatggccacgtggtggggtacgtcctccccacctgggcatcgtcccggggctgatgcacttgctccgtcctcctacagtggacatttgagtgttctcagcctctgtatgcagcacactgtgcacgatggtgggacggttctgagcgcagacgggaacactggcctgtgccacccaggcccaggtggctgcagagacgccatggtggagcctgggcgccccacggtgttttatggttttttggtttttgtctgagacggagtctcgctctgttgcccaggctggagtgcagtggcccgatctcggctcactgcgacctccgcctcccgggttcatgctgttctcctgcctcagcctcccgagtagctgggactacaggcacccgccaccatgcccagctagcttttgtagttttagtagagatagtgtctcaccacgttggccaggctggtctcgaactcctgacctcaaatgatccacctgcctcggcctcccaaagtgctgagatgacagccggctgggttttgttttgcatgagctgcttttgttacatttctcccagggaatctgacattgctgatgctgttgtaagtgatttttgaaatggccatttctgtttattgctgattttctcattttggcttgtgctgagcattgatgccgaacccattggttaattctaacggcgtagttttgatccttcgtggctttctgtgtaatcaatca

SEQ ID NO: 5665 - DNA, 1536 bp, Homo sapiens
ggggcagaggcctccgcccagtcaccatcaggccactccctctgcaccgggacctggggctgggccgcctcgtgctccccgggactgtgtggctccggtctcgcctggagccacttcagggcacctcagacgttgctcaggttccccctgtgggttccggtcctcgctgcacccgtggccgcagaggctgcagtccctgggggccgggaggatcccgccctgtggcccgtggatgctcagcggccaggcactgacctgccatgcctcgcctggaggctcagctgtgggcatccctccatggggttcatagaaataagtgcaatttctacacccccgaaacaattcaaagggaagcagcatttcttgttaactagttaagcactatgctgctagttacagtgtaggcaccccggcccagcagcccagcagcccacatgtgttcaggaccctccctgcccaccccctccctgccgtatcgatcaccagcaccagggtggcccgtgtgcgtggggccagcgtcgccgggctgcccagcctggctctgtctacactggccgagtctctgggtctgtctacactggccgagtctccgactgtctgtgctttcacttacactcctcttgccaccccccatccctgcttacttagacctcagccggcgccggacccggtaggggcagtctgggcagcaggaaggaagggcgcagcgtcccctccttcagaggaggctctgggtggggcctgctccccatccccccaagcccacccagcactctcattgctgctgttgagttcagcttttaccagcctcagtgtggaggctccatcccagcacacaggcctggggcttggcaggggcccagctggggctgggccctgggttttgagaaactcgctggcaccacagtgggcccctggacccggccgcgcagctggtggactgtaggggctcctgactgggcacaggagctcccagcttttgtccacggccagcaggatgggctgtcgtgtatatagctggggcgagggggcaggccccccttgtgcagagccaggggtctgagggcacctggctgtgttcccagctgagggagggctggggcgggggccgggcttggaacgatgtacgataccctcatagtgaccattaaacctgatcctccaccgcggccgccgcgtgggtctgtcctctcagtgctttccaggggccttcctgtgcccagcttctgggcccactcctgtgaggtcactgctgcagggccttcctgcctggacagagttggagctaggccactagaccaccccacagggcatagccagggggaccagcacaggaggggacggagaggagctgcaggagggctggggggaggctgcagtctcggaggggggcctcgccgggtctggaggggacagcagagacagcccgttccccctgccgcctgagggcaccagggagagggctgtatgtccctcacgccacactgtgtgtgcagtcagcagtgtggccacagatgggggccactctctcaacct

SEQ ID NO: 5666 - DNA, 1131 bp, Homo sapiens
ttgggcagccctagtcccccacagaggccaggtgcccactgggtgttctctgccttcggcctgctatgaaaccggcagcggggggcccacacgcggcaggcaggctcactcagtgtctctcctagatcacctgctggctgatgcctactctggccacgacgggtcccccgagatgcagccggccccccagaacaagcgccgcctgtccctcgtctccaacggctgctacgagggcagcctctcagaggagcccagcattaggaagcccgcaggcgagggccctcagcctcgagtgtacaccatctctggggagcctgccctgctgcccagccctgaggcggaggccattgagctggcggtggtgaaggggcggcggcagcggcaccctcaccatcacagccagcccctgcgcgccagccctggtggcagccgggaggacgtcagcaggccctgccagagctgggcgggcagccgccagggctccaaggagtgccccggatgtgcccagctggctcctggccccacccctcgggcctttgggctggaccagccacctctgcctgagacctccggtcgccgcaagaagctggagaggatgtacagcgttgaccgtgtgtctggtgaggggtttgtgtcagggcatagacaggtttgggggtgcatgccgctgccagggtctgacagcagcagccactgtgaggcttggaacagagaacaggtgctcaggtcacagcatgccagcggactcaagattaaaaccggcaggcttctgctgcggcctccacaccctatgagctgtgagctccctcagctcctcagcaaaatctgccaggcctcacagtccgctttcgccctgctagcaccaggtcaatcaaggagtgcttcctggaggagggggcctgggaggatcttaagggatatgtagggaggaagcaccgcttaatcaggagactgggctgccctccgagagtcctggggagctgttggggcccagccaggcagtgggcatctttccccagggttgttgagttgtgtggtagcttgtccaccaggcagaaagtcactccactgtccccacacttgggcatcagggaaaggctgtgggggccctcggaaggggacagccctcag

SEQ ID NO: 5667 - DNA, 1216 bp, Homo sapiens
agtcccacagcagtgagcaggtttcggctgctgcacatcgcaccagcattgggctggattttcagctcagagctgtctcttgagcccagggggcattctagttcagttgtaagaggggcccttattttgtgtgcctctaagaaacaaatgttgctagttaaggcacgagacacattgatctgatctctagttgttgttttttctgagatggagtcttgctctgttgtccaggctggagtgcagtggcgcgatctcagctcactgcaagctccacctcccgagttcatgccattctcctgcctcagcctcccaagtagctgggactacaggcgcccgccaccacacccagctaagttttgtatttttagtagagatggagtttcaccggatctcctgacctcgtgatcccttggcctcccaaagtgctgggattacaggcgtgagccaccgcgcccagccgatctctagcttttaattagaattagacctccctgcttcccacacatggggctctgggtcctttcccacccggcactgccaagcagcaccccctcaggctgagcccctcatcttagcttctcccctgagcctctggtggctgtgatgccagggctgacactggcgcccctggttgagaagggccctgacagccgtgcccatgtggaagatgcatacgaacaggcatgtcaacactggggaccctggcctcttggcgtctggcacctcgatgatctgggttttggaaattacgttatctcccatcgcacagccttccctgccctgcacacgtggcaggacacagagattccactgctgctcgtgctggaggggaccgaggctcagagaggctacccgaggcctccttcagggcagatgggaggtagcatcaggccacaggcccttccccactggcaggtgaagaaggcttggcagttgtgctcaaggggagcagaccttggggttggggagtggactctcactgccttcctcctccttggtgcctggctgggcgtcggtgcctggctcggcgtcggtaccttgctgggtgtcggtgccttgttggcgttggaggtgggctgcccaggcaggctccgttactggtggtggtgttttcaggcccgaccctgctgctgactagtgacaacataaaacggcgccttggctccgctgccctggacaggtgcgtgccgccagccccgactccttcctcccagcc

SEQ ID NO: 5668 - DNA, 1129 bp, Homo sapiens
gtgttgctgagaattggaggttttttaacagctctttcccttgttccttctcaggcccgaatggaagtggatgcagatggaaatggtgctaagatatttgcctatgcctttgacaagaaccgaggaaggggctctgggagactccttcatgagctgctgtggtgggtgtttccaagctgtctctgccccccgccactgggctcctgggtgagctccgatggcacagggcgcctggagccccctgccccgctgaagccctgccttgccttccctgaatctcgcagttatttttgtgtccttcaccactaacccaaaggaacgaatgatttgtatgttgcacttcaaacaccaagtggactttctgctgggagcttgcccaggaccggcagcctctggagggacggtggttgctccccttgctgggttttgccgagcccccccggtgtgcatggtagggaccactcagatggggagctgtctcgaggccatctgcttaggtggttttgcgttccagctttggctgtctgtgctctgaagtccaggggccgggtcctccctgtgtccctgtcctgtttgggccacagatcaggtgcttgggtttctctcagcagcttccgcctgaggtaccctcatccaaaggaccaggggcccgatcagatcacatggctgacatttcttcctggaaggactttggtacctgaccagaaatgtctgtgagggtgggaggcagcgatgcagggttagatgcagggtttgctgtctgtttctagggagcggcaccgggggggcgtggccccgggcttccaggtggtgcacctcaacgctgtgaccgtggacaatcgcctggacaacctgcaactggtgccgtggggctggcggcccaaggctgaagagacctccagcaagcagaggtgggtcttctcagggcctggcgatgccagcagaggcgccttttgaggagggccaccgccaaagctcttgtttccaagagggtctcctgttcctcctctgagccctgatgcttctgtgtattttgggaatttcattgtttttccccaaagcgtggaatcctccttttcttcatgggagcgggaaggatcttgatggtgtgtgtttttgcattgctcct

SEQ ID NO: 5669 - DNA, 1135 bp, Homo sapiens
ccagctcgcagagctccacggacccggcgcgagtccccagccacactccgcactgcccctctaggcgcggcgccgctgcccgcacaaagcttcccgcgaaactgacgtcggcgcgcgcaggcaccgcccccggcctcgcccctcccccgcgctcgccccgctccccagagcgccggcgcactcgccctcctcctattggttgttgcggggcggcgcgcgccggtcggcgccgtgcgcgcctagccattggccgagcggcggcgggccggggggtgtgtccggggctgcgccccgcccctccgctccgctcgctgtggtgcgcgcggtggcggtggcggcggcggcggcggcgcgtggcaggtccggcgggcgcgaggcggcggcggaggcccgagcccggcccagcctcgtcccgcccggagcccgcctggctgctaccccgaccccggctccggtcccgtcctgtcccggcgcgccgcggcctcgccccggcccccgctcggcgcctcccgagggagcggcgctgccggccgagagcgcaggcccggccatgaccgacttcaaattgggtatcgtgcggctcggccgggtggccgggaaggtgagcggcgcggagcccgcgacccggcccgtctcgcccgtccaggcctccgcgcggggccgggggcggttgtgcgggcggcggccggggcgggggcgcggagcccgggatgggccccagcggggcgggggacgctgcgcgggcccggctgctggccccgcgcgggtgcagcttcctctcgcaggccggcgggcacgcacccctcggctctggggtgcacctggccaccctcggccctgccctgccggaggtggaggccacggccctgtcccgagccgggtgcggagatgcgtggctcgagcccgagccgcgttctcccggagccctcccagtggtgtcggcgatccggggcctagcgcggcgtccgggctgccagtgcggccacacggtttaaacacagcgccctttccgaggcagcgccacttccacacctctcgccgaggcgggtctggtgtgggctcttctgtgcctcccagttctcagcagggcttcaggctcgttttaacgctgccaggggttggccacgttaggctg

SEQ ID NO: 5670 - DNA, 1159 bp, Homo sapiens
ttttttttttttttagcttgcttgccttttgttttagcagctgcagtatctcggaagaaaaaacgaagaatgggaacctatagcctggttcctaagaaaaagaccaaagtattaaaacagaggacggtgattgagatgtttaagagcataactcattccactgtgggttccaaggtaagagacgcatttgagtgagttgccacgtgtgcgtggaaatgcgtttctgtgttcagggcctcgttatcagtaatttgggtgacctcagtccccgggaaggtgccagtgccatgaagctcctctgccataggggcagagtgttcgtgtccaagatcattgtgggggactccaccccgtcctccctgccctcctcaccacagcccacctgtctgccgggctcttctccaggtggcaggggcacctcttcgtgtgtccccgcctccccacaggcccttgcacctcccagtcacccaagactcctcagtgaaagcaagtttgttcatgatgcgcactgatcctgccttggggtatacacctgcccgtgttctagggggagaaggacctgggcgccagcagcctgcacgtgaatggggagagcctggagatggactcggatgaggacgactcagaggagctcgaggaggacgacggccatggtgcagagcaggcggccgcgttccccacagaggacagcaggacttccaaggagagcatgtcggaggctgatcgcgcccagaaggtatgtgttgctgtcttgggtgacagcacaaggaaagagcatcacaaagttggccgtggttctgaaaattaacagtctggtcacttctagaccctgataaaatcccctgtttacaattggcttagatttttgtattttatttttcttgatttattagattattttcattcaagaagtatttatgtttctgtacatcattcattgaagtaaacctcttttttttttctgtgttttctttctttcttttttttgagacagggtcttgttttcacccacgctgcagtgcagtggcacgatcatagctcactgcactcaacctcctgggctcaatgatcctcccatcccagccccccgagcagctgggaccacaggctcacgccaccatgcctggctaatttttaaatttttttgtggagacgggga

SEQ ID NO: 5671 - DNA, 1778 bp, Homo sapiens
gggtgaggaagctttggccttgccttaatttatctggcttgtgggaggtgccggtgggattcgacttggagccttggttctgttccctccccaggtttgactatggagagcgcttctgggacatcaaaggcaagctcttcagctgccgctgcggctcccccaagtgccggcactcgagcgcggccctggcccagcgtcaggccagcgcggcccaggaggcccaggaggacggcttgcccgacaccagctccgcggctgccgccgaccccctatgagacgccgccggccagcggggcgctcgggagccagggaccgccgcgtcgccgattagaggacgaggaggagagattccgcacgcaaccgaaagggtccttcggggctgcgccgccggcttcctggaggggtcggaggtgaggctgcagcccctgcgggcgggtgtggatgcctcccagccaccttcccagacctgcggcctcaccgcgggcccagtgcccaggctggagcgcacactttggtccgcgcgccagagacgctgggagtccgcactggcatcaccttctgagtttctgatgctgatttgtcgttgcgaagtttctcgtttcttcctctgacctccgaggtccccgctgcaccacggggttgctctgttctcctgtccggcccagactcttctgtgtggcgccgccgaagccaccgttagcgcgagctgctccgttcgccctgcccacggcctgcgtggctggggccgagtcccaggggccgcacggagggcacagtctcctgtcaggctcggagaggtcaggagaccgaccccaccactaactttggagaaaatgtgggtttgctttttaaaggaatcctatatctagtcctatatatcaaacctctaactgacgtttcttttcgaggaagtggcttggtgggtgcagcccccgccggttccgttgacgctggcaccttctgttgattttttaagccacatgctatgatgaataaactgatttattttctaccattactgaacattaggacaaacacaaaataaaaaacaaaacacagacaacggtgctgattctggtgtggtttctactcaccacgtgaaataaactatcaactgtataaagagaacaaagtgattttagaataaaatgcaggaaaaacttttttaaagatgttagtcttgtagcgtgaataaatttgccatcaccttttgtgtggtggcctggcaggtcatatacttttttttggcatatacctttttaaagactgtaattagtgcagtaacagtggggttttttttgtgcaactcttctaaaaacattcataatgcagtcatgtttatttttttctgttaaaatgtttttgacagttttaagagcagtcttttggctctgaccatttcttgttctgtttccaatgaaatcaataaaaaaaaagaagtactttaaatggggtttttattatgacaccatatttcagggtctctgcagaacttgcaggtccccctggacccggcccagctctctgtcccctgtccaaggaagtacagcttccttttcaccccagatctgtccccgaagaggggacgttccaggcagaggttaggggagcctgtgcatttgcgcacgtgtcgaatgagtctgtgtgtgtccacgaatgcatcgtgcacgtggtgcgaatgcgggcacactggtgtgtgtgtgtgtgtgtgtgtgtttgcatgtctgtgtctagcgccaggtgcccagctctgggcgtcattctggaagccgacaggg

SEQ ID NO: 5672 - DNA, 1113 bp, Homo sapiens
ggttttagagttagggttagggttagggttagggttagggctagggttggggtcagtggttaggggtcatggttaagggttaagggttggggttgggggttagggttaggggttagggtaagggttaaggctaaggctaggactagggttagggtttgggttagggtttggggttagggctagggctagggctttgaataaacttatatggtagccaagttgtggttacagtgggccttgggtgagaccaagttctatgcctacttcaagtgtgtaccagcatagtctcagtggtcgtggcctcaggggtgcttatgttaccccaactccagctccacatgcctcagcagagaaagagagactgctggtttcagagaaagaaagggaagagaacaagatctctacttgaaaaatcaagagaagttttcttgatgttaatccaaggccaccaaagcagtacctctacgtgtttgctactacgtattgggcttgggacctaagtctctttgaacacctggaaagtgttcccaaaaataatgggcaccaacaagcccagactgtgaagactacaataaagactgacctcttcaatgcccacatatagatgaacatctataagtatcaaggccatccaggaaaacatgacctcaccaagcaagctaaataaggcaccaggggcaaatcctggaaaaatagagatatgtgacctttcatacaggaaatccaaaatagctggttgaggtaattcaaagaaattcaatgtaacacagagaaggaattcaaaattctatcagataaatttaacgataagatttaaataaaaagaataaagcagaaattctgaagttaaaatgcaattatcatactgaagaatgcatcagagttacttaaaaaaattgatcaaggagaagatagatttagtgaacttgaagtcagactatttaaaagacaaagtcagaggagacaaaaaagaataaaaaataaagcatgcctacagaatctaaaaaatagcctcaaaataggaatctaagagttattggccttaaagaggtggtagaaaaagagataagagttaaacatttattggcccggtgcagtggctcacgcctgtaa

SEQ ID NO: 5673 - DNA, 1215 bp, Homo sapiens
agcagcaagcttaataggatgttacccgacactttgcgagactggcagctgatttgatccagatgtctctaattcttttttctttttctttttctgttttttttttttgacagagccttgctccgtcccccatgctggagtgcagtggcacgatctcggctcactgcaacctccacctcccgggttcaagcgattctcctgcctcaggctcccgagtagctgggattacaggcgcgcgccaccatgcccagctaattttttgtatttttggtagagacagcatttcaccatgttggccaggctggtctcgaactcctgaccttaggtgatgtgcctgcctcggcttcccaaagtgttaggattacaggcgtcagccactgtgcctggcccagatgtctctaattctaacatgagatgtattgcaggatcatagcagagtgagttgctgatgtatccagaaggaaacgagcatggaacactcacgacagctgtcctgagaagtgtgtgtgtgctgtgcttgaatatctcactgctcatttatacacaggctttctggtgactgagttaacagtatctgtttcataaataatgtagccctctttctttctttctctctctctctttttttttttttttttgagacagggtcttgctctgctacccaggctggagtgcaatggtgcagtctcagctcactgcaacttcaccatgcctggctaattttttctttttttttttttttgagacggagtttcgctgtttttgcccaggctggagtgcaatggcacaatctcggctcaccacaatctttgccttttgggttcaagggattctcctgcctcagcctcccgagtagctgggattacaggcatgtgccaccacacccggctaatgttgtagttttagtagagacggggtttccctatgttggttaggctggtctcaaactcctgacctcaggtgatctacccgcctcggcctctcaaagtgctgggatcacaggcgtgagccatcactcctggcctaatttttgtatttttagtagagagagggtttcactctgttggccaggctggtctcgaattcctgacctcaagttatctgcctgccttggcctcccaaactgttggaattacaggcgtgaaccaccatgcctggccagctctatttctttaagcctacatgttttgcacttgttaaaagtatttgaacata

SEQ ID NO: 5674 - DNA, 1233 bp, Homo sapiens
ataccccaccagaatgtcacaatcattcattgctccagctactgagtgaacagggtgcaagacagcactggcttgggttgtatttttgcagccagttaactttgcatcaggtctacacagtccttgcagcctttgatttctccagttgtagagatttgaaatggggtgcccgggttcctctcgtttttccttcaatctacctagcatgcattttacacacattggaggagtcgtatgcactgtttttctgttgctgatggaggcaagcaggccttctaattagtctaacttaaacggatgggattcacttaacaaaagcaagaagaaaagcacacgaacaggtgtcttaatgcatttggatagtttctttgcggggtgtgtgtgtgtgtgtgtgtgtgtgtgtgtgtgtgtgtgtgtgtgtgtcttggtgaaggtgaggggctgtattttcaccaagccttttcataatcaagtttgctttgcaaaccttatggccttgcaccccgcagaacagtcccttcctaatagcagggatgctctgtcatggttttctgtaaattatcgtgtgttgggaagttctgttgaggcttagtttgatcttccatggtggacacgtctgttctgtatgtaaaaggcattacaattgtgttttagcagatgagacttgaagcctttccacagtccttgtgctctgagatggctgttgagctctgctcaactgtcgtagctgaattctttctttgcgctgaacactgggcagcctcaccatgttgccaacgtgcttctggggcccctgtcactgccgccggatgccgcgcacacaggcagagtgccttggcaggtttgtgcaccccttggcgagccagaactgggaaccccgcggggtgaccccttctcatggggggtcggggaggggagtgcctatttttaatcctgtctgtttgttgcacaatggaaatcactgtgatttgtacatatgccctaggaaaattttactgctgtctaatttatgtaataatactgttgattccaggtttgtttaataaaactttgtatcttttcagaagtctgagtttcatctgcttctgtctccaaacaagctgtggcttttctcctttggtctaatcgagggatgggcaattatctgtaggggccacatggcagatattttctgcattgtgggacacacagtctctgttgcacagagtgcaaaaaagctgctataattaggca

SEQ ID NO: 5675 - DNA, 1163 bp, Homo sapiens
ttcatcttctagagatctttcatcttccagagataaccacgaataatacttttgtataactctctttagtcttggttaagtaaactttagtgcatggttaagactgtgttggtggtagattcctgtctagtctctgattcacttaacacacgtcataaccacttttcatcactattaaaatccttcatgggcatcatctggatgcagcgattttgcatgccctggagaacataggtcagctattttgcctcaagatgggactaaatttgaagtgcaagttgaaatacagctccaggtgggaccatatccagtctagctctctgctctcctgtccctagcctgctgtcctgcccttctcctgagaggtctccttcagaaactcatgtccattgatgatttactgggtaaagaaaatgtggtgcatatacataatagaaaactacacagccgctctgtctttctgtgccaaggcggcgcgtggtccacgccgagcgacagagattctcaggctatgctctcaggatgaccgagtgggagacagcagcaccagcggtggcacagacccttgacatcaagctttttgggaagtggagcactgatgatgtgcagatcaatgacatttccctgcaggattacattgcagtgacggagaagtatgccaagtacctgcctcacagttcagggtggtatgcccccaaacgcttccacaaagctcagtgcccaattgtggagcccctcactaactccatgatgatgcatggccgcaacaactgcaagaagttcatgactgtgcgcatcgtcaagtatgccttcgagatcatacacctgctcacaggcaagaaccctctgcaagtcctggtgcatcatcaacagtggtccctgggagggctccacacgcattgggcgagccaggactgtgagacgacaggctgtggacgtgtccccactgcgccatgtgaatcaggccatctggctgctgtgcacaggcacttgtgaggctcccttccggaacatcaagaccattgctgagtgtctggcagataagctcatcaatgccacctagggctcctctaactcctatgccatcaagaagaaggaagagctgcagcatgtggccaagcccaaccactgattttcccggctgctgaccaataaacctgtct

SEQ ID NO: 5676 - DNA, 1159 bp, Homo sapiens
tgagtctgggattttggagtggcttagttgggaggttcaggctcaaagtccctcatgagcttgaagtcaggttgtccatcagggctttagtctcgaaaggttctatgtgactggaggatctgctggcaagatggctcagccacatggctactggcctgccttctcagttactcatcacatgggtctctccacagggctgcttgagtatccttacaacatggtgctggctttctcccaagtgagttagccaaacgaatgcaagaaggaaactcaaatgtctcttatggcctacgcttcaaagtcatatgccatcattacctcagtatcctattgcttatacaagtcagcccagtctttaggggccatcttggaggctagataccatactgatattatagccaagggggaaaggatttcagctcacttttaggctattgcagtgactttgaaaataagtacacaaagcaattgtatattttgaaagacaataaagcctatgccattcagagtcttcacacataaagcatatcggccaaagaactttggagaatgtcaccaataaaaaaccacatgcagcattaacttgactttggactttgctagctcggatgcttatatacatatcatttctaacttagaactggcttttcaaagtatgacagtcaaacttggtgttatccaactaggatttgaaaagtaagttattgtgtaacttttaaaatctttacattacatgtcatcaagaaaattcaaaatggattaagccagtgttttctaatagaactacatccagggccacagatacaagctgatcatgtaatttcatgttttcttggagaaatgggtgaaagtaattttaatagcataattattgacccagtgctatggcttgaatgtgtccccttggaaattcaagtgttgaaactaaatgaccaatgtgatagtgctaggaggtagagttatataaaaagcttcacccagcactcagctaacttgctcttccaccttctgccctgtgaagatacagtgttcctcccctcctggggttgcagcaaaagatgtcaacttggaagcagagagtagccctcaccagataagcaaacctgtgatgccttgatcttgaacttcccagccaccagaactgtaaaaaaattcattt

SEQ ID NO: 5677 - DNA, 1222 bp, Homo sapiens
tagtgttgttgtgaacatttaagcacacgtttttgtgtggatgtatgcaaagtcattttttttgaaagccacttactacacgattggctaacttccatcagagaaatgttgtttggtggagttaaaaacagattatctgtgtactatattaagttgggtgaggaatgatgaagtgtaaattatacttacataaatattataatgctgtgcagaaactcttaagctatcattcttttagaaaatgaattttatgagcttgggacctttttgttaaccaatctgagaaaagtctgttgtcagtgtggacatattttacctttaaatggaggaggggagagaatctttcaaaaacattaatatcagtgagattaatactaatctgtcaagatgacccagtgaacagttggctatcaaagtattataagaaggtttttaaaaggaaagtgtctattttgtaaagatcttgagtaaattatgcttttaagtatgttttgatattcccccccctcctcccaaagtgtagcatgcctgagcgctgtcatgtttaggaggtgatgggttggggttagagggtgattgactgttagcgaagtgggttgggatgaacaagtgcacttgagtacgcgctgcacagtgtaggcatcaggccacgtcagtgtgtctctgcatttgggcagatgccaggcctattgcaggcagcataacatctaggaacgggtttatggatgaacctgggtaactctgggagcacaaacccagaccacacccatcgggagagattgacctgagtgatgcgctaacgcatatcattgagatggggccagatatcttgcttagatgaataattggagttcatgtcaaccatctgtcctttcccataatttaaagccaacttctatattttccaggttcatactttttttttcattaattgcatgtaaagttgcggtgaacaccttctttcttgacttcctgtttaaaaaaattacagttcttaaaattataagcttattcaggatggagtggtcagtttgtagaaaaactagctctttagatcttttaaaagcactacattaaaaaaaaaaaaaaaaaaaaacatcggacgtggtgggtcacacctgtaatcccagcactttgggagtccaaggtgggaggatcgcttgagcccaggagtttgagaccagcctgggcaacatggtgaggccccatttctacataaaat

SEQ ID NO: 5678 - DNA, 1238 bp, Homo sapiens
agatctgtaaatgcgtgtatggcagtgtgtatatttagcagttgcatacacagatgtacttatttataggtatacatttgtggacaagagttggttatcactaaaatatcaagtccatgattttggatcttgtacactctcacagaacaccgagggacacggtggaggcacgccggacccgggctgagcttggtaaccatctggaggggactgcagaggttgacacccaggactagagctcagtagaggggccgtttcctacctgcagttcccttggaagagaaggggtgaagcttaccatgttggtggtggtttgtttcctggggctgctgtagcaacgtgccaccaactggctggcttaaaacatgtatggtctcccagttctggaggccagaagtgcagaatcaaggggtccgcagggcccagctacctctgaggcctccaggggaggatgcttcctgcatccccttgctgcttttggtgttgctggcggtccttggcttgtgggcacagcactttcctctctgcctcggtgactacatggcctccctgggtgtctctgtcttcttgcaaggacaccagtcatgttagattatggctccaccctgctgcgatttgacctcattttactttaactaactatctgcaatgaccctttttccaaatgaggttctgaggtgctgcacgttaggactttagcatgtgatttctgcggactcaggtcaccccataacagtagtcatgccccaccccatcccactccacccttctcccaattcccctggtatactccagggtggctctgtggccacacatgacccaggcccactggccattagacactttggcagggtggccaaagaaattctttgtgctgaataaaattaatgtgtaaatgcggcggtgctccaagggcagtgttgcgtgaaagggcaatagaaccatggctcctgataaacagaagcctgttaagcagcaaggtcaaaagccagatgcagaagtcagaattagccgggtagactttttatttcactttcccccccttttttttttgccagtggactgccaactgttctcttaacagaagggcagtttttgagtaaatgaagcaggacttgatctgggttgtcataaattgtctctccctcaagaggtaacttctcgtgtttgccagttcagaggtgtagggagacatctctgatgtgtagatgtcctagtttggggtgcagggtggcttt

SEQ ID NO: 5679 - DNA, 1141 bp, Homo sapiens
ccctgcgcttaactgttgattgaccatagacgtgtaaatgcagacgttgcctgccaacgatccgggcatcaggctgagaatgtgcgctagggttgcaaggcatctgtttggtaaaagccatgtaacagggaggacacagtcttttcagcctgtgcccagtttctccgtgtctctactaaaatccagatgtgctgagctgcaacctcagcctcagcaacatcaccgtgggaaattactgtttggcattttggtatttccacagagggtcagctgcgtccaccgccttgccctttgccattgctgttgctaaagcacaccatgccttgtccttcttctcattcttgcagttcttcctcccacgacctgtccagttcctgggagcagacgaacctacagcgcaccttagatcacttcagctccttggggagcgttgacagcctggaccacccctccagtcgcctctcggtggccaagtccaacagcagcatcgaccacctgggcagccacagcaagcgcgactcggcctacggctccttctccaccagctctagcactcctgaccacaccttgtccaaagccgacacgtcctccgcagagaacatcctctacactgtgggcctctgggaggctcccaggcagggtggccggcaggcccaggccgcaggcgaccctcagggctcggaggagaagctcagttgtttcccgcccagggtccccggtgacagcggcaaaggccccaggccagagtacaatgccgagcccaagctggctgcccctgggaggtccaattttgggccagtctggtatgttcccgataagaagaaagcaccatcatccccacctcctccccctccccctctccgcagtgacagctttgctgccaccaagagccacgagaaggcccagggccctgtgttctcagaggcggctgcggcacagcactttacggccctggcccaggctcagcctcgtggtgaccggagaccagagctcaccgatcggccttggaggtcagcacacccggggagcctcgggaagggatcgggaggcccgggctgcccacaggaggcccacgcagacggcagctggccgccctccaaggatggagcttccagtaggctgcaggcctctctgtccagct

SEQ ID NO: 5680 - DNA, 1142 bp, Homo sapiens
cctttgtaaaacatccatgatctttgattctctgaaacctactctgttacacttagtggctccagaatccaaagggaacatagtcaccacctgtgttctcaacattgaactgctcctgaactccgtttttcttactcatcacacattctctcaactcttcaagacacatgataactcaccgttcggtgccactcaaaaagcaggatcataagggccagtaccagtgggataatgaattggctcaagggacagtagccatccctccatttctgttttctttgcctttgaaatattttcagtaatacctgaccacacatcattgcctcatctctttcttggagagctcaagctatacccttcgcctcaggagtgtcagcacagtttcagtacaatatatatggcacatgccacactactgagagcaccaagagagaaaagcaaacctctctagggctgagggagtcacctcaactgaatgatgattacctacctgtggactataagctccagaggtggcttctgattccagtttacttagctaatcagaacatggtgcactttctctctctctctctctctctctctctctctctctctctcattaattttcatgtctaatccataccagaaaaaaaatcaggcctgtccttaaattacttttgtactaatattacgactgttactactgttaccataactatgagactgttgctgctgatactatcaacttagtgctgatacttctgctactgctactactgtggctagggatactatgactatcatagccacagttgtcattctggtagcttttactctatggcatgaaatcagcaagacactttccatacattattttatttaatctttatatcagctcttttggataatattagttatccctacttgagagaggagaaaatcgaatcttagggaggttaagtaaatttcccagtgtgacagagattgtaggtagtatagctgtggtatttgaacctagatcagtttggcctcaaagtccacacttttaactgttacagggccccaagctggaaaattcctcatgagctgatagcatctccttccaaagtactggcaaatgttgctaatagatttcacctctcttcctgcctaagcccaga

SEQ ID NO: 5681 - DNA, 1213 bp, Homo sapiens
atgatcgccattctaactggcatgagatggtatctcattgtggttttgatttgcatttctctaatgaccagtgatgatgggcattttttcatatgtctgttggttgcataaatctcttcttttgagaagtgtctgttctgtcctttgcccattttttgatggggttgtttgttttcttgtaaatttgttcatatattcttaactttgcaaagtctgcttgagaatttttggaaagggagacatactctagagaaattccagtcctttatagtacatgtaatattattatgagattcttctgtacattaaaactcaaatacttttctgtgtaactttcacccatggattctgcttcaagtctgatctactaggttggtacaaaagtaattgcgatatttgccattactgttaatgacaaaagccagaattacttttgcaccaacctaatatcttcaacatggcctcacatgggagaacatggctgatcattaatttatccattcgatgagaatttattggtcatctagtctaagccacatactgttctaggtgttgaagttaacagaatgaacaagacaaagttgttgcctgcatagaacatatatcccatcaaatatcttctcatagatcttccctcattcactctaaacatgctcagtaccttcttttttctcattgaaagtttttaaaaattaaaaactatatatatgttatctagaacacagtgggctacaaacactcctatgcaaatgtatttataattatcatacttacaaaagcaaaaaagaaaactctaaatatctaagatggtgtaaaagtttgacctcaattttctgtgtgtgcatgtgcatgggcttgcccataaatgcacatggaaaaaagactgaaagaaaatacaccaaagtcttaacaacagttatttaatggttggttaacattaatcatgttttctgtgttttctgtcttttctataacaaacatcttacttttaaagtgtaatgtgcatgtgtactctgtacggggcattgtaggaggccctgaagtaaatgtacaatcaccacagtggagcatctggtcagggattgcagtgtttataaattaaaatgagtatttacatgcatgtgcatgtataagtaactgtatgaccaattcttcattttccatgactcactttttatcccatgtgtttcacaccatcatccacataagttac

SEQ ID NO: 5682 - DNA, 1182 bp, Homo sapiens
ttgggtaatttgtctgatcataaatacatatacactaagacttaatgggaatgaaggtcatccttaaattagctgtgcgagagaaggaatcttcactagagtttgactcatgataaatgttagaatttccaaaggttagtcatgaaaagtgttagaacttataaatagattacaataaaattttgatatagaaatcaagaatgtgacagtccctggacaaacctgaataaaatattaaatctaagtaccttgctatttataaagtttttataactcttatatttcctcatcccctaatatctttattttattttagtttttactattttcattactcatttataagattgagttttacaaatgacaactacatgaaacaaaaggacttaatttatttatttcacattcgattttttcttgtctactcctcctataatgctccctttcttttaggttgctgctaaatgggaaaaacttagcttagtactgatagatgactttattggaagtggaactgaacaagtactcctactttttaaggactccttgaactcagactgcctgacttcatttaaaataacggatcttggaaaaataaactattcggtaagttctatttacttattatatggtattttaagaaccattttagaaaatttaagtgctcaaaagctttgacctatcatttaaatattggtggttttatacttaaaattttgaactttaaaaatatatagattgaatcttttaaatatatacattgaatctcctttcaacaaatgttatacaaattgaccatgcttttgatataaatttgaattgtagtacatttggtggtcacttaagtgacagcagtactataaattaactttatttttgcttctgaaaatcacattttataccaataaatataatattggattaaataaggaataaaatgaagcaaaattgctttagtaaaggaagtaacagctcacaatatcttgagatattggacataagggaaattatgcccctgaagtttcagatcaatacaaaatctctctaagcctcagttttttcatttgtaaaattagcataattttaattttctccagttatgggattttaggattttttaaaaagctaatgagagcccaggaattcaaggctgcagtgagctatgattattatgttgcactt

SEQ ID NO: 5683 - DNA, 1187 bp, Homo sapiens
aatctgaggagactgcataaaatggaaatttaggagggctattaaaatattaactgattacaggaagtgcttaaaagacattgataaatttagtttgactacaaacaggtggagttttgaacattagaaaatgctccacagccgggcatggtggttcacgcctgtaatcccagcactttgggaggctgaggcaggcagatcacttgaggctgggagtttgagaccagcctggccaacatggtgaaacccctgtctccagtaaaaatacaaaaattagccgggtgtggtgatgcacgcctgtaattccagctacacgggaggccgaggcaggagaatcacttgaacccggagagcagagtttcagtgatctgagactgtgccactgcattccagcctaggcaacagagcgggactcttgtctaaaaaaaagaaaaaaaaaaaaaaaagaaaatgctggatgtttaactagttgtcaaagtaagtcagtcattttaaaggtaaaggtaagtattgtgaggctatgtaattgtcctctaatgacaccctgaagaaaaagagttaacagagctaaaataagactagtagaattctcattttcttattcaaagaaagtattcatttgagactcatctgaaagtactcactttatgcttttcaaggatcttcttaatttttaatatatttgctttttccaacaatgaagagccttctaaactgactattgaatagtaattttaaaaagtgtgcaatagagggagagacctttgacaacaatcttttgctaaggcaaaaagttctctgaccagcccacagctggaatctgtgcatcatatgataaaaaaaaaaaagtcaaaagaaaataaaaaatacattgtcagaaaaccagtagatcccacagatactagtaccaaatctcttccctgcagctgtgctggaaattactttacacattaatgcagagatcaaaaggatagaaaagtttacatcctgtatccttgtagcttggtacagtttatcagcttgaattctagtcccctagaaggcctgatatcaagtatactgttggtgcttagaaaatatttagaaatctaaaaacatttgtttgtgtttagtgaaatgaactggcttacaaaggcagtaaaatgttttgaattcatttaaataactaatgattcacgcttagtttg

SEQ ID NO: 5684 - DNA, 1223 bp, Homo sapiens
tcacctcccctctctgtcctgttatctaacccaaggattttaatgatcatcataaattcaggctgcttcataccaaggagggtttttatctttggagcaatgtaaaagaggatgagataatgcagtgagacattttctttttggaagaattcatgcagacaaagaaattacattcttcttgttctgtgttactagcaccttttctatgattttttatgacattttatgatgaaaaatttgcaatgtttgtaacacctgagcatagctactggttcctaaagttgtcttccatagaggattgaaagcataaaaagaggatcagtgtttttgtaaatgtttctaattactcctcacaacttgtgatggggaagaaggctgtatgggcgttggtagtgagcaagttagtttatgatttaaatttgatgaggaaaagtcatatggctgggaaaagattcagcgatattgttcataattctctgtatgatttggtcacagacatgtgggacacaaggatattttcttacaggagaagctgtatagctcatttccacttacttgtgagagctttgtttttttgtggccatgctgctctggtagtgtatttttttttttttaaaacgtgtagttagatagacttcttcctatccttcagggtagactagttcaaaatctattactagactatcatgatagaacaagaaaccctgaagtgtgaatccatcattatataaaaagacaaccccctttcaagggggttgtctttttatactggaatgtcttcattaattaacttggatttgagaatggcctctcaaatagtgcttgaccaaaggaaaaatatgctggtttttctttccttttaatcgtttctttagattttgaaataaaacaaggaaatcatgaaaatgtgggagccgtccagttctccacatgggcacttttacctcacatttacctgttgatgtgttctgtactagcccaggtgctgcatataaacttgtttaactgcagaaatgaaacccaagcaatatctttgtttcagcaactcccaaggattccaacagtctcaaagcaagaccaagatccaggtagtgttcgtttaatttctgctttaatgccctttgtgccgtgcccctgcctagaaataagaaccacaaaccaaaacccaacccatgatttcctcttcctttagatgtaaagcttaggatatgagccatttcgct

SEQ ID NO: 5685 - DNA, 1197 bp, Homo sapiens
ggactgtgctccaggaattggtaaagagcttccaggttcagcagaggggaggactgctggccagggcctttgatatgctgcttcagtgaggggatccattgccgccaccctgcttgctgccttcctgggtgccactcccccagtgagtccaacatgacatgctcctctcaggctcttgaatgctgctctgagcagtgtcaccctttacactagaaagctgtcagaaactatgggggaaaaataaaacaagaaggaaatagaggaggtgctagaagaggaggaagaaaattatgtggtggagaacattgttgactgtaactggtaaagagcaaagtggagcacctcctaaagtggaagagtttcttagatgaagatgactcttgggagccagaagagaacctggattgtgcgacctcattgctgagtttctacagccacagaaaatagcacctgagacagatagatcagaaagaggcaagtgcaaagcttattctcattctgaagataagggagaggagagcaaaccagagaagaaagaagagtcagaaaagccacgaggctttgctgggctttggagctgagcagattattggagctacagactccagtggagagctcatgttcctgatgaaatgggaaaactctgatgaggctgacctcgtccccgtcaaggaagccaatgtcaagtgcccacaggttgtcatatccttctatgaggaaaggctgatgtgggcattcctacctcaggagggcaatggcaaaaaaagatggcaagaattacttctcctgagcaccagcccctgtcacatctggctgggagtttcaagtggggagagaaggggttaagacttgtgttgacatcacagaggtggcttgagaagatgtcctttgaagagccagtatagtctctgtgtcctgcagcaggccaagtgcttcaaaactgttcccagctgtgtagcttgcacatggttccagtggaggggaagcgggataagtgtttcaaggcaacctttgttgcactttgctgagaaaagcaaagggctttctatgaaggagaaaacttgcagaattgggtgtgtgagagagcaaaaagatcctcaaagagcatctccacaaccctcagccttcttcccaatagtgtcaactctgcgtttttagagtgtagcattaggtagtttttggctattactggtgtat

SEQ ID NO: 5686 - DNA, 1190 bp, Homo sapiens
aatccagagagtgaagctgggaggtgaatgcgtggcaaaaactcatggaaaaaaaaaaaaaaagcagtttcaaggactatgctgcaacccgccaagcagtggctttcctcaagctgctgtaaccagctgcttctccctgctcctcgaacttgcttgagttccgagggaagcgcctgctttttgggtgcgtggccagggtgggtggtggccaggattcgaaggcgacagtgaaggggagcgagttcccgggatggaacttgacgtggaacccggggtcccatcgaggggctccccacggcctcgggtgcttgggctgcgactggtttttcatttggcgtaggcgtggggggtaggaggcaaagtgccaagggctttcccgggctcacagtgtctcatggtccgccactgcctgcggtggcgctcggcttgaccccggctcgggccccgcacgcggcggcggtcaaagggcgtgctcgcggcaaccgcagggcacgcgggccggccgcgcggggggcggggcggcagtggcggttgcggggcatgcgcggctccgcgcgcggcttctcaaacatggcggcggcggtgtgaagctcggtgccggctcgcgcgatcggtgggacagaatttcgttgttttcaccgacgagactggaggtacgtggtgattccgggccccgtaaggaatggagaggcggaggtgtgtcccggaccccgaccgttgtccgtgggcgggcgggtagaagccatcagcgcgcgtcccgtgcgaggaacgcccccttacgatcccgcctatgtcccatctcagttcggcttcgcgatagggtatcccgcccccggcgccttccgcggacgcccttcagccgatctcgcgtttcccctcacgccgccccggggccttttcgccgccgcggggtttgggcgcccggccgatagcttccacccgtcccctcgcctgcagcgccgacagcgccctccggcgcatcctccctgccgtgggtagggccgggctggggcctggggggcatcacggtgggtggcggggcggaggaaggaggtagactttgcctggtctgggctgagataacttttggagtttgggagggaaacgtcggcccggaaggatgcgcctgtggcggcgtgcgggcgcaaatcctggtgccaaggtgcgcgccgccgggctcctggcggggg

SEQ ID NO: 5687 - DNA, 1315 bp, Homo sapiens
tattattactttttccctcacttcagaagaaaggctgcctttgagttgaccaaccatgttgaggtggtagatgggtgctaaactcactgtagtctgagtaattgacttccacaagtcatccccactgttgagcctttcaaaatgaagtctcagtatatttacaaattaatggacatcctctctggggattagtcatattctaattcaacaaagacattgtttgaagtttgtttttgtttgctaaatgaactaaaaattatgagatttgcacctaaaggtactgaggtaaaggagagccaaaagtggggtagtcaatctacttattcagaatgagtcgataatttaaacatgtctaatagcagagacagtatattatagaaatggcattacattctctgagatctgcttttactgaagtggatcaatgatgaaactagccaaatctgagcatcagaaggctttccggtctacctgatgcatgatctctacagttctgagaagcagaactataaaacaatgtaaaacaataagggcatatgtctggtgtgtgtgtggggggtgtgtgtgtgtgtgcacgcacacgtgtttataaaggtagcagttgtaggaatgaatgagattgggggtgagggggtgcatatgtatgtctatgaaagcctaatcatttctgggcaatgatgtaaaggttttacgactgacctttgtaactatgaagttttctacacttgacctgagctcagaaaaaagaaagaaagaaagaaatgtcatcatagagtcttagttctagctctgccgttaactaacttgatgtttatcactcccttatgtttgtttatagttttactatatgtatttattcccaactggtgcaactttattctcttgacagttttatgtggactttaagttgctgttatcaaaagttgaacaatattccatacccttttcctttctccccgctagagtatgctcaggtaatcaaaatgttgggaaatggacggctagaagcaatgtgtttcgatggtgtaaagaggttatgtcacatcagaggaaaattgagaaaaaaggtaggtgtgatttgttttactttaatataaaattggttaagggggaaaatccctctacagtttttaactgtccatggacttcatttttggaaattcccaaaagacttaccttggtaaacagtgatttacctataagtaaaatagcaaggtctgtaatggtaattttatacaggttctaatgttaaagaagcatttgtatcacttgtattgtattcctgcccaaaaagtccaaattgagagacattctg

SEQ ID NO: 5688 - DNA, 1315 bp, Homo sapiens; identical to SEQ ID NO: 5687

SEQ ID NO: 5689 - DNA, 1196 bp, Homo sapiens
gttctccaaaagtaaatttcagtaaagctttttctttcggtttttttctaatttagtatattttccttcaattgtgtattagtaatatacagtataattctgttaaaaaaaaaaagtcacccccggaaaagtcagtgttaaaaatcttctgcataattgtttctatggctaattatacaaccagacatatcaagggcttaattacatgcttcaatgacttagctccattaaaatttcagagatgacgcaaaatataatgaatacaattatgtatttcatattctgtgtgtgaagtatgtttcttcttgtttttgtgcacatatgtttgtctccaaacaaccaattttcaaaaaatatctaactagctttttaatatatataacatatagagcaagtgaaacaactgcttatttattggattttcacttttcaaaagattttttgatgacatgtaaaaacagtgctagagctgttaattgcttcagtttcagtgcccatgctgaagtagagtttatttctaaaaccagatcctaaagaaataaattgtagatattttgaaaatacagccttcataacattgaaaatctggaggactgactgtgcaaagtggtgggaatagacataacaaaaggagaccttccctcaaacctttaccctactttcgatgggcagaatattgacctggatctatagatggctgttgtgagacctcggttcttcttagcttaaaagaatttaaacaagagacacacagcaaaggagatatagtatagagcaatttattgcaaaggacaaagaatattatgaaagttaggttcagaacagacagtacaccctgagagaggattcagggtgagctgctcctaaggatgagaccaccaagactggcactagggagactccctttatgagagtcttacataattattcataaaggagtgggaagaggtgttgctattaagcatattcttggttgtcctctgggtgcacatgcatagtagctgtacatacttgttcatacattgcatgtctcattagcatcttaaatctctatccaggggtgtgttgcttactgttataatgaacaaagggtcggtctgaggacaggtgtaatcaaaatgcatgtgctccctgcaggggaaattccttactgtagatagctgtgtttgaatgagctggactacagtgtgagtgct

SEQ ID NO: 5690 - DNA, 1197 bp, Homo sapiens
taaaggtaagaggtttaatggacttacagttccacatggctgaggaggcctcacaattatcgtggaagataaaagaggagcaaagtcatgttttacatggcggcaggcaagagagcttgtacaggggaactcccctttataaaaccattggatctcatgagacttattcactaccatgagaacagtatgggggaaaccgcgcccatgattcaattatctccacctggccccacccttgacacatggggactattacaattcaaggtgagatttgagtggggacacagccaaaccatataattcaccctttctctgtccttttctgtcatcgttttcagtgtaggtgtttggccaatacagggaagtaacaggtataagaaaggttatgacaggattccttggtcattcatgtttcttagaatgccactaccttcttttggtggttgaagcaaattctggtttgaatggaaagtatggcctcttagggctatcagagcttactcagttctagatgtatcgtatttaccttgtatttgtttggcatctcgctgaactcccatgcactatgggcctgatggagtcctgtgctcctggggcattgtgaatgctgtgtgtaaatggggctcctaggaacaacagacacatattgtgcacattttctctgctcacacacacatgttccattgtcccctcatgctccactcaaaaaatacaagttcaaagataaaaatcattaagaatttcaagatagtggcaggagaagattaaactaagtgcaggacccttctctctgtggggcctgtgtgactacacaggttgcacacccacgaagccggccctttctatatcaggcaaagctgctggacagcctgaagcctcatgagcatgccatgtatgaaggagcccagcttacagcaggctggatattgccaatagtgtaccagtgcaaaatggtttccctgaaacctttaatacacttacttatttcaaactcagttgaattgatatcattgagacagctagatctcttagagggctcccagtgccaggaggagtgcctttcagatgggtctttgaaacctcagtgttatagctagaaccaggtactcatcattgaatcaatctctctatatctcttaacattttttccttctcataggatttccagcaggagagctccagaagcctttcttttgg

SEQ ID NO: 5691 - DNA, 1151 bp, Homo sapiens
agttcgttaccttagtaggtaacggtaaggttattctctttttttttttttttttttttggttatgaaaacttagggactaaaattaatataaaaattggcataatgttggattgaatctacattttggcagaagttaaacattcccacataatgtcaaaattatacatcatgcagttctgtttttttgtttgttttattttgttttgtttttgagtctggctctgtcacccaggctggagtgcagtggcgtgatctgcaacctctgccccccgggttcaagcgattctcctgcctcagcctcccgagtagctgagattacaggtgcgcgccaccacacttggctaatttttgtattattagtagagacggggtttcagcatgttggctaggccggtctctcctgacctcagggtgatcagcccacctcggcctcacaaagtgctgggattacaggcgtgagccaccttgcccagcccacatcatacagtttgaaatgaaactttgccacaaccagcctttgctgtagcacacacatatatcactgaacctgtttgaaataaagttttttttctttttcatgattcgtctttgagtacctccaggctgaaagactgttgtaccagtaaaaacttaaaggcacaaattctccttgaagaccttctcccttttatgtggccccatattttatgttgctttatctttgaaattttgcatgaaaaggaaatgaatggattcgaatgaaattgtcctttagagcatgattacttgttcccatggacaaatatttttctccccttgctcttcctggcctgaaacacgggaaaccagagtcaaaagttatctccctctccctgtgatgccttgagatttttttctgcgttgtttaatgcctgaaatccaagtcttcctccatgggaaaatactgttataccaaataattctagatgagtaacaaagatctttttaggccttcattttatgttttttcttaactgttatattatgattgtgacatagattatactactactaatttttggatgtttcaaaaggtcaagaagtaaaagatgttagaaagcaatgagtgagtccttttgatttttaacttattccccatgtccctatacttcgtgtgcttttccttttttt

SEQ ID NO: 5692 - DNA, 1162 bp, Homo sapiens
gctactacttttcataaagctcttgcacaacttttgttagatatttttgttagatactgtgtaatttttgttgtcattgtgaataggattttcttttagttatagttgctattattgctgatgtataaggatcactgttgacttatatgtattgatcacgtaaccttgctgaactctcatcatatttcatagattctgaggtacacttttcccccctacatcttcacatatctgaagtcaaaatagatctttgatggtgtcccataatcactgttgtctaggcagcagtcatgatgtagttatcattgcttgcacatgcacaaacttggtcagggctcttcattttgtcatcactttaaatgagtatgtgcattgctgtattgttatttcatgccaaacaataaaactggaggcggaagaaattgcaaagtgggtgtctgccttgaaagaaaatcccataaataataatggatcattttaagaagtgctgcatcaccaacactcttattggcagagcacaatattgttagcaacagttgaacagttttgagtggaagagcaatccatagtaggaccttgaatgtgaagttgtaggaataccttaccaatttattttgcttcttttttttctgtcgcccaggctggagtgcagtggcacgatctcagctcactgcaacctccgcctcccgggttcaagcaattctcctgcctcagcgtcccgagtagctgggactacaggtgcacgctgccacgcccagctaattttttgtattttagtcgagacaggttttcactgtgtttcccaggctgttctcgaactcctgaacccaggcaatctgcccgcctcggcctcccaaagtgctaggattacaggcatgagccactgtgcccggccaatttcttttgcttctgtatacacaagatatgataaaagtctgtctaaataagtctgaattgtcttgataaatctagaatgaaaatcctagataataagaaaatactgtatcagtttaattggcaatgtttttttcttagtcatgtaaaataagggtacagcttacaattggtatcttcagagtcagtgaaatgtagtagtaataacagttcatgccgggtgtggtggttcacgcctgtaaccccagcactttgggaggccgagacg

SEQ ID NO: 5693 - DNA, 1411 bp, Homo sapiens
caatgttacccaggctggtctcaaactcttggcttcaagtgatctgcccaccttggcttcccaaagtggtgggaatacaggtgtgaagccattgcacctggctatatatggattttattagtgtgcctaaaattttactttcatgtatgtattttttctgtgactgcctcaattgctttgttctcctaatttttaaaaatctattgatttgagatgattacaaaagttcttgggttaaaaacatgtgattcaaaaatagattccctctttatttctttaatctatcttaatgtttaagaaaactgaggagctaatctgttttcccagtagaaattaagtaacatttacgttaattgtagtcatgcatacttacctgaaatttgtcattttaattttttttttaaggagctgatggtacacacatggatggtgatcaaattgttgtggaagtacaagaaactgtttttgtttcagatgttgtggattcagacataactgtgcataactttgttcctgatgacccagattcagttgtaatccaagatgttattgaggacgttgttatagaagatgttcagtgcccagatatcatggaagaagcagatgtgtctgaaacggtcatcattcctgagcaagtgctggactcagatgtaactgaagaagtttctttagcacattgcacagtcccagatgatgttttagcttctgacattacttcagcctcaatgtctatgccagaacacgtcttgacgggtgattctatacatgtgtctgacgttggacatgttggacatgttggacatgttgaacatgtggttcatgatagtgtagtggaagcagaaattgtcactgatcctctgactaccgacgtagtttcagaagaagtattggtagcagactgtgcctctgaagcagtcatagatgccaatgggatccctgtggaccagcaggatgatgacaaaggcaactgtgaggactaccttatgatttcctgtaagtcttggggtacagtgattgtcaaaggtgtttttgtaggctgcctcttctaatttacatcaggggtgaaattttcttgacttaaatgtctgtaaaagtaaatctcatagacctacctgcattgttgtttccatttgcagcctacaagataactgaaaattaagaaaagtgaggccgggtgtggtggctcatgcctgtagtccgggcactttgggaggctgaggcaggtggatcacctgaggtcaggagttcgagaccagcctggccaaccaacatggtgaaaccccgtctctactaaaaatacaaaaattaaccgggtgtggtggtgggcgcctgtaatcccagctacttgggaggctgaggcaggagaatcgcttgaacccgggagccggaggttgcagttagccaagattgt

SEQ ID NO: 5694 - DNA, 2064 bp, Homo sapiens
atttggattcgtgaacatattacaataactgtctttcccaacagataggaccactaactgaaatgtttgttagaactaagtcctgcaattggaaaagagagaatcatcaaaattttaaattagttaattagttgctggctggtgaagttatctttccatttgatattagggagatgaagatgaagaaattgatggagataccaataaatacaagaaaggacgtaagaaagcagcttatgctggaggcttggttttggaccccaaagttggtaaggctgggcagtgaattggttttctcccagtattaaggaatttcttaatgtggatctaggcttgagaaactagaagactgaattatatcttatagatcagcgaataggtctcatgacttttatctttcgttcacgtgaaaatcttggttgccagtcacctgacatagacttaatgtgaattttgttatgctgtgttccaataaaatattatttatagacattgaaatttaaatttcatatagttttcatatgtcatgaaatattgtttttgatttttttccagccatttaaaaatgtaaaaaccatacttaagctcatgggtggtacaaaaataagtaggttggatttggtctgtagccgtagtttgtctaatacatagatagctgtccagtacatagatagctgtttgtcctgaccagttcagttgacagcaaagttgaaggacgtgcagacaataaccaccaaatttaactttaataggagaatatctttttccctattgtcatgaatggcaaagatgttttgtggtacacagagctagaaataatttttttttctttttttcttttttttttttggagacagagttttactctgttgcccgggctggagtgcagtggtgcgatctctactcactgcaaccttcacctcttgggttcaagcgattctcctgccttagcctcctgagtagctaggactacaggtgtgtgccagcatacccagctaatttttttgtatatataaaaaaacatttcaacccttcccaagtgtacagttcagcagtagtgttaagaatattcacattgctgtgaaggaattaatgtgaattttatctaataagttagttctgagtaggaaacatttttgacaaaagtgattttgttattagttataatgaaatggagcagtagtacttggtgttatgtaggtctgggtttgaattcagtgtgatcttgggctgcctgtttaacctctgtaagcctcagtttcttctgtaaaatagagttaagagtaatatctaccacacagggatttaaggataaattagtatagtgctggacacagaataaactatcctatatgtttgcaattattattgtcttaatagtggacatttatttttattcagtttcttctcaaggtgaagataactctttgtaaatgtcctacagaaatatagtagctttctgttcttcctttgcaagtaaaaagggtgggtcgttccactactgacatttatatatatgtgtctcttgtttgattttagctcagtttttgtacaggtaaatgtgccgtccattttattttttgaagctgttgtaaaagaataaattactctaccaggcgcggtggctcacgcctgtaatttcagcactttgggaggctgaggcaggcagatcacgaggtcaggagatcgagaccgtcctggccaacatggtgaagccccatctctactaaaatataaaaaattagccgagcacggtgttgcgcgcctgtagtcccagctattcgggaggctgaggcaaggggactcacttgaacccgggaggcagaggttgcggtgagctgagattgcgccatggcactccatcctggagacagagtgagactctgactcaaaaaaaaaaataaaaataaaaataaaccactcacttggttttatttggggtggggggtgggagagtaggtaggaggattcttcaaagaattcttgctttgaaggagagttgaacatttttttttttttaatggatgtgacacgtctcagatagctgattgggaaggtatttgc

SEQ ID NO: 5695 - DNA, 2064 bp, Homo sapiens; identical to SEQ ID NO: 5694

SEQ ID NO: 5696 - DNA, 1196 bp, Homo sapiens
atcacttgaacccaggatgtggaggttgcagtgagccaagagcgcaccactgcaccccagcctgggtgacagagcaagactccatctcaaaaaaaaaaaaaaaggatctgtaagctggttctacctctaagtacatcctgcggctctctccttctaccattttcacttgctgccaccgtagttcaggtggtcctctcaacaggattcctagacaagtcttactggtttttctacttctagacctgctctgtctgttgcagtagccactagccacgtgtgcctattgaacacttgaaacgtgcctagtttaaattgagatgcgtcataagtatcagatatacctcattaatattcatacactgattacatgctgaaaggataatattttagatgtactggattaaatgaaacattaagatttacctgttttattttaggggttttaaaaatgtggctactagaacattgaatgttctcagaatggcatatatggcttacattatattattatatttctactgggccgcactgtgtctaagcagtcatcccccctttgatttatcctccacgctgctgtcagaattatcttgctgaaaaacaaagtccctgagctaaaaattctttgaagtcttttgggataaagtttaagattagcttaacacaccatgccttccctaaaggcattcagtttcaaaaacttttgaaacactgtgctgtccacagtgtccggttagattcagctggtaggttgccagcttccaactcctgatctaaggactgtctgtcatctctgtggcacctctaccctcaaatatttcaatagttgttagacaattgatgcactataaatagattgaagtagagttgagcatatgagaaagtaccctgtatcaattctacattcatgctaaataaaaagttttatacagacccttaagggacagctacattcctaatactctgttgaaagttatccactgagctgcgcacctcttcctagtaggccatatgtgttagtgggcactctgaggagattgaagtggcttcgaggacccagcccccactaagagctgacggcgagtgaaccaactgggaaaagaaaccttcatgtgttgacagtatcagaaagattcgatggaaagctactaaatttgaaaaatcgatccttataagataatctttcttttggagtgggg

SEQ ID NO: 5697 - DNA, 1218 bp, Homo sapiens
tgatcttggctcactgcaacctccgcctgccgggttcaagcgtttctcgtgcctcagcctcccaagtagctgggattacaggcgtgtgccaccacacccagctgatttttaaatttttagtagagacaggctttctccatgttggccaggcgggtcttgaactcctgacctgaagtgatctgcccatcttggcctcccaaagtgctcagattacaggcatgagccactgcacctggcctctggttttattttcttacaatggtcttgtcattgtagtataaagcttataagggtcacatgaaacattttggaaagtatttttactaattatattatgtggaagaacttataaaagattggtgttatttcattctcattctatggaaagttcattactttaggaatcagcatagaatatatttataaacatagttttcagtgcagagacaatttttaggagacatgaggcaattgagatttcttgttttcttgttaagctctgtttttcttggcacttttttattttgtgtaataccaaatttattagcataattttcctatataattatgtctgtttccaggatatggagtgaggatttcctttacattgccgatattgattattttgacttttttctttaatcccttgccaggatttatacattttttaaccctttatgaaaataaaaatgtttaatatgttggttttctttttgtaattaaaagtatatctcactgatcttatattgttttattcctttttgcatcttttttagagttcccatctgttttcttacattacccacctgtctttccattagagtccttagcatattaatcataattattttaaatttccagtctgaaaattccaaagtatctaccatatcttaatctctttttgctgcttttgatactctgtctcttcaaactgatttttattttaattttttactttcagtatgccttgtaattttttgttcaaagtgagtcttaatgtactgtatattaatagaaggaactgaggtacataggcctttagtttaaggttttttgttaatatggcaaagtgttatactgtgtttactctttgctgttgtcacaagatccttggggtatcgatttgccagccggaaacctctgtggccagtgatgcctttgcccaaggattgcttgggcctgctgggcccacttggcccggcaggctgcacttggctc

SEQ ID NO: 5698 - DNA, 1167 bp, Homo sapiens
gattagtggcactgctagaggaatattgaaagtagaaagaggcaatgatgaacatttggataattttaatactgctttaaacagtggagggagagttgtcagaaggactgggaaaggggaagagataaaaatcctagggcctctttggagtagagtactctgatgtctgtgtacaggatggagaaatttcctacatgaacaagtagcagtggaaggacaattggggaaattttagtctgggagccaccttggctctccaagtaatttaaataatccaaatgtggatagagagatggacacttcagcaaagtaaattacagtcaaggatccatctagaccaaatgatatatatgtgtgtttcatatttggagaagttatttaatatagttaaaacatatttacattatatgaaattatagttgaatgcaggagttttcctagctaaaatgtattgctctctagttaagaatgattcatgagtctatggccataccactctgaacatggctggtctcatctgatctcagaagctaagcagggttgggcctggttagtacttgaatgggagagtgcctgggaataccgggtgctgtaggctttttatttaaataaaaataataataaaagaaagatgcatgatggtattgctgatacgtttaagaactttggacaagagtatctaagcaaagaaccagtaaggttgatgatactcgggtttagtggcagaagcactgatcctgtggtcagattcggcacttaccttatgatccaggatgcagaattcaatttattggtgtctccctttgcctgtaggcaactatgaaatatatctcaagctttctcaaaagcaaaacgttaaaaataaatgaaatacatacccttgtttgaatagaagcttccacaacagaaaggtactaaatgcaaatagtgtggtgttatattttggctactgaagagcgccatatgaacaatatttactgagtgcttcccgtattctaagtgctttacattcaatgactcagttaatcctcacaagaactccacaaggaaggtactataattatccccacattataaatgaggaaattataagactgaaccaaagttttgattctagtgcccattggtgggttccagaggagctttctcacagatgattacagcaag

SEQ ID NO: 5699 - DNA, 1246 bp, Homo sapiens
ctgcaagttgagttaaggttgctaatcagatgaccttacgataggaaaattatcctgaattgctgctcggcggtcccacgggtctgtctcttgcttcaacagtgtttggacggaacagttccggggactctttcttccagcttccgaccgccctcctatttcctctccacttgcaacctccaggaccatcttcttggccatctcctgcttctgggacctgccagcaccgtttttgtggttagctccttcttgccgaccaaccatgagctcccagattcgtcagaattattccactgacgtggacgcagccgtcaacagcctggtcaatttgtacctgcaggcctcctacacctacctctctctgggcttctatttcgacggcgatcatgtggctctggaaggcgtgagccacttcttccgcgaattggctgaggaaaagtgcaagggctacgagcgtctcctgaagatgcaaaaccagcgtggcagccgtgctctcttccaggacatcaagaagccagctgaagatgagtggggtaagaccccggacaccatgaaagccgccatggccccggagagaaaactgaatcaggctcttttggatcttcatgccctgggttctgctcgcacggacccccatctctgtgacttcctggagagtcacttcctagatgagtaagtgaagttcatcaagaagatgggtgaccacctgaccaccctccacaggctggccggcccggaggctgggctgggcgagtaactcttcgaaagacactctctcaagcaggactaagagccttctgagcccagcgacttctgaagggccccttgcaaagtaacagggcctctgcctaagcctctccctccagccactaggcagctttcttaactaccctaacaagccttggatcaaatggaaataaagctttttgatgcaaaaaaataataataataaataaaaaaggaaaattatcctgaattaccttgtgggcccaatgtaattacaaggtcctcctcaaaagtgcaagaaggagagtgtcagaatgatatcatgtgaaaaagactagactatccattattgactttgaaaatggcctgaaccaaggaatgaatgcagatacctcttcagaagaggaagaggcaagaaaacgaattatcccttagagcttccagaaaggaatgcagccttgccaacaccttgattttagctcagtgagatccattttggacttctgacctcagacctgta

SEQ ID NO: 5700 - DNA, 1221 bp, Homo sapiens
gaaacagaattactattcaacccagccatcccactattgggtatattcccaaatgatatgggttggatctgtgtccccaccagatttcatatcaaattgtaatccccagtgctgtagatgggaggtgattggatcatggaggtgttcttcatgagtggtttagcaccatccccttggtgctgtcctctggatagtgagtgagttctcatgagatctggttgtttaaaagtgtgtagcactttaccccttgctctatcacttgctcctgcaatgtaagatgccttctcttgccatgtaagactccttcttcccctttgcctttcaccatgattggaagctttttgaggtctcccccgaaacagaatccactatgcttcctgtacagcatgcagaaccgtgagccaattaaacctcttttctttataaattacccagtctcaggtatctctttatagcactgtgagaacagactaatacagaaaattgataataaggagtgtggcattgctataaagatagctgaaaatatggaagcaactttggaactgggtaatggacaggattaccctgtctaaagtggcattcagccacttcagattgagcagtaacaggtctgtgatgctcttagatgtctggggctgcatgcatgccacagtgactggctgtcttcttcccttggtggatgcttgcttcagctcctcttgtcattggacatcagactccaggttcatctgcctttggcctctgaggcttgcaccagcagcttgccaggggctctcaggcctttggctgcagactgaaggctgcactgccagcttccctggttttgaggctttcagacttggactgggccactaccggcttctttcttccccagttgcattcagcctattgtagaactttgtaatcatgtgagataactctccctaataaacttccttttatatatacatatatcctattggttctgtccctctggagaaacttgactaatacaccaaggaaatataaattgttccaccataaagacgcatgcacttgcatgtttattgtagtacaatttgctattgcaaagacatggaatcaacctaaatgcccataaacagactggataaagaaaatgtggtacgtatacaccatggtatattctgcagccgtaaaaaaagaatgagatcacgttctttatagcaacatgaatggagctggaggccgttatcctaa

SEQ ID NO: 5701 - DNA, 1134 bp, Homo sapiens
ggtatcgtggaaggactcatgaccatagtccacgccatcactgccacccagaagactgtggatggcccctccgggaaactgtggcgtgatggccacggggctctccagaacatcatccctgcctctactggcactgcgaaggctatgggcaaggtcatccctgagctgaacgggaagctcactggcatggccttctgtgtccccactgccgtgtcagtggtggacctgacctgccgtctggaaaaacctgccaaatatgatgacaccaagaaggtggtgaagcaggcatcggagggccccctcaagggcatcctgggctacactgagcaccaggtggtctcctccgacttcaacagcaacacccactcttccaccttcaatgctggggctgtcattgccctcaacaaccactttttcaagctcatttcctggtatgacaatgaatttggctacagcaacaggatggtggacctcatggcccacatggcctccaaggagtaagacccctggaccaccagccccagtaagagcacaagaggaagagagagaccctcactgctggggagtccctgccacactcagtcccccaccacactgaatctcccctcctcacagtttccatgtagaccccttgaagaggggaggggcctagggagccccaccttgtcatataccatcaataaagtaccctgtgctcagccaaaaaaaaaaaaaagagagagaaaaatcttggcttacattttgactttgtgaaaattactttacctctctaaacctagaattgcccatctgtaaaatggcaatgatgggtcaggcatagtggtgcatgcctgtggtcctggctactccggaggctgaggtgggaggatcacttgagccaaggacttctgggctgtagcacgctatgctgatcaagtgtccacactaagttcagcatctatatggtgacctcccaggggcgggggaccacgaggttgcctaagaaagggtgaactggcccaggttggaaacggagcaggtcaaaactcccgtgctgatcagtagtgggatcttgcctgtgaatactcactgtgctccagcctgggcaacacagtgagaccctgatctcttaaaaagaaaaaaaaagataaaaaa

SEQ ID NO: 5702 - DNA, 1157 bp, Homo sapiens
accttcaactttattaggtattgtccagttttcccaagcatttggactggtttatacttccaccatcagtgcaagtgtcgtctccacaaaggcgctccttcttgcttcctcctagtataagtagctgttatgccacttatgaagaaatgtttgttagacaaatgaatcacagtcactagactgggataatttcctattttaaaattcttccctcttgatttttctttcttttctatattgtagaagaacccagcaagtccctataaccttgcatataagtataattttgaatattccgtggttttcaacatggtactttggataatgatcgccttggccttggctgtgattatcacctcttacaatatttggaacatggatcctggatatgatagcatcatttataggatgacaaaccagaagattcgaatggattgaatgttacctgtgccagaattagaaaagggggttggaaattggctgttttgttaaaatatatcttttagtgtgctttaaagtagatagtatactttacatttataaaaaaaaatcaaattttgttctttattttgtgtgtgcctgtgatgtttttctagagtgaattatagtattgacgtgaatcccactgtggtatagattccataatatgcttgaatattatgatatagccatttaataacattgatttcattctgtttaatgaatttggaaatatgcactgaaagaaatgtaaaacatttagaatagctcgtgttatggaaaaaagtgcactgaatttattagacaaacttacgaatgcttaacttctttacacagcataggtgaaaatcatatttgggctattgtatactatgaacaatttgtaaatgtcttaatttgatgtaaataactctgaaacaagagaaaaggtttttaacttagagtagccctaaaatatggatgtgcttatataatcgcttagttttggaactgtatctgagtaacagaggacagctgttttttaaccctcttctgcaagtttgttgacctacatgggctaatatggatactaaaaatactacattgatctaagaagaaactagccttgtggagtatatagatgcttttcattatacacacaaaaatccctgagggacattttgaggcatgaatataaa

SEQ ID NO: 5703 - DNA, 1214 bp, Homo sapiens
tgttaattcttaagcaagaaacttttttcttgatgagactcacagatctacacaaactacaaaagttaattttcttgttacacccactgcactctgcaaccagtgttgcctgcctcatggcagttggatcagctcctttacaaaaaagaaaaaaaaaaaaccaacagcaacaaaacagagcccatccatgtcagccacaccaatagtttcatgttaattctttgccactggagtcaattttgctatgagcaatgtaaggctggtaacctttaaattatttggttgatgtggaaaattggtgatgtaacactgtttctagatttttttcattgcctttttattctgatattaggttaatcactttgaagctatagttatgctgtaacatttagcatggcttcacaccaagttagtgtagccaatgaggaaaaagttaccataatgacagcagttgtccgagaagtgacagctgtattactcagagcttttacttcttacacctagaatattaaaatataaaacaaggggagaaatgtgacagtctattttcagttgcacatatgttccttatatataatgtttgacagttcaatctctgggtggaataaagaacacttacgtatcagtaatgggaatttttaaagatttaaaacaaatatgcaaaaatttgctatgccaagatgctggagcataatataagactgtatttggtgtgcttgttttgtttctttggtagagtttattaggtgaatcttctaaaactttccttctgttggatcccagtgacgtggaagtcatcagaaccccacggtacttggagtacctctctgcaccaagatagctggctgattttctgctcagtcacaattttacttgaaagcaagaattgtcctagctccttttccattattccaaaacgtttaacgttcaaagcagggtctcattaaaaaagaaactactggttgatataattgagatattacaatttcagaataaacatttgattaaaaataaggaaatcctcagttcatactgtatttaaaagagaattggtaacttgaatgtgtgtaattttttggaacctgtctaaaaaccaaatacccctgcaaacagatacagcccaccctattctatttaaatattttgctgttttattttatagaaattattttgctgaattcacaaatagaatttgatttaagaagaactttttg

SEQ ID NO: 5704 - DNA, 1099 bp, Homo sapiens
tttcaacgtttaggcagatcattaattatgagctagccaaatgtgggcatactattacagggaaagtttaaaggtctgataacttgaaataggtttttaggagaattcatctacttagactttttaaatgcctgccataaatgaaattgaaatggtagaatggctgaccacagcaatgaccagccctcattagggccctggatgatttttggtctaataacgcatgctagtgttgatgttttttggtcaagagggtatgaacaggaagaattaaatgcagcaggctttattttaaatgccgattcacattactctgttcaagctgcgttgagatgttaaactggcttactatagacttcgtaaaaatggctccagaagagtaacaaactgaaatctttgagatcacacaggttggaaatatgtacataactgcacaaggtgtcaattctgctctacagtgcagttttagtcagttttagttgcataggtttccattgtatttatagtctgtttatgctaaatctggccaaagatgagcattgtccaccactaaaatgcctctgccactttgaattctgtgctaattttgtggccagaatgcggtgatcaaaacgctccatctttttacagtggcataggaagacggcaaaaatttcctaaagtgcaatagattttcaagtgtattgtgccttgttctaaaacttttattaagtaggtgcacttgacagtattgaggtcatttgttatggtgctatttcaattagtctaggtttaggcccttgtacattttgcccataactttttacaaagtacttcttttattgcacattcagagaattttatatatatgtcttgtgtgcgtgtccttaaacttccaatcttactttgtctcttggagattgttgaacgcagcttgtctaggaaggggatgggactagattctaaaatttatttgggaccatgggaatgatagttgggaagaaaactatttgcacacgacagatttctagatactttttgctgctagttttatgtaatatttattgaacattttgacaaatatttatttttgtaagcctaaaagtgattctttgaaagt

SEQ ID NO: 5705 - DNA, 1166 bp, Homo sapiens
tgaatacgtatatacacgtatacgcatacgtatatacacacgtatacgtgtatacatatatacatgtatatacatacgtatgtatatgcgtatacacatatatgtatatatatgcatatgcgtatgtatacgtatgtacatatctatatgtgtattccttttccaggtgtgcagtttattcaaaccactgatttctcatcgtctcccgaatgtttttgtcagattcagttatattagagtcattgaaagaattttttgtttgtaggatggccatttgatatacaatgcctggggttttggattaaaaaaataaggtagttaatacaatgtattattttttggtaatgtctttaaggttgtaaacagctagagcctgcgtaattagagttcttgtgatatagggtgatcttgaacagtgctcttgaatgctgacccttaatcttctggtaatgtaataattcaagattcttatttttaaaatttcagtggagttatcgaaaactaagcaaaatattttaacagaaattaacttgtgacttttttagtacatttttgaaaaccttttgggtttttttttttttaagtagggtaaggatttgagttaaagtagaatatatacgaatatataccataaatgtagtaagtttaaatatagtagtactaccaagtatagttatagtaataatgctaggggactggggaatcttatctgcgtcagggaactattgctaaaatacacagttttgaacaaagtatcttatttttaagtttttcttaaatactcttattggaaatttttttggtaattctattagtagaaagattatacaaaatacttagaagttatagattgtatatcacttaaaaatgtatgtgcttttttccgtaggacatattagcattaaaacagttggtgttttaaatttttttgataatagaagtagtttaagatccattgaaacatattttcttaaatttggtttgctggcgtgtttggtaggggaaattattaggtcagttctagaggtggcttttttaaattgtaatatttggatgttgattaaaaacattctcatttatgtgtgttttttgtttgctggcacttaaaggcatacaggttgagtatcctttatccaaaatgcttggaaccagatgtgttttggatt

SEQ ID NO: 5706 - DNA, 1183 bp, Homo sapiens
ttataaaggatgagtttgtccccctctcttgctctgtctctcctctgtgatgcctcctgctatgttatgacacagcaagaaggccttcatcagatgtgatgtggcccttcagtcttggacttcccagactccagaaccatgacccaaataaattctgttaactaaaaattacctagtctgtggtattctgttatagcagcatagaatgaactaagacagaaaattggaactgagaagtggggcaattgttataaaaaatacctgaaaatgtggaagcacctttgaaattgggtaatggttagaggctggaagaatttagaagagcagactagaaaaagcctagattgccataaatggagcataaaggtcatttctggtgagggctcagaagaagacaagagctgtagcaaaagcctaaatcttcttagagattagttaagtggacattttattacatcattcttgcattgctgtaaagaaatacctggctctctgctcctcttgttcgacagacaaccacatcttctcttgcattgccagccgcatccatgagacaccatggggaaggtgaaggtcggagtcaacggatttggtcgtattaggcgcctggtcagcagggttgcgtttaactctgttaaagtggatattgttgccatcaatgaccccttcattgacctcaactacatggtctacatgttccagtatgattccacccatggcaaattccatggcaccatcaaggctgagaacgggaaatttgtcatcaaatggaaatcccatcaccatctttcaggagcaagatccctctaaaatcaagtggggcgatgctggtgctgagtacgtcgtggagtccactggcgtcttcaccaccatgtagaaggctggggctcatttgcaggggggagccaaaagggtcatcatctctgccccctctgctgatgcccccatgtttgtgatgggcatgaaccatgagaagtatgacaacaacctcaagatcgtcagcaatgcctcctgcaccaccaactacttagcgcccctggccaaggtcatccatgacaactttggtatcgtggaaggactcatgaccacagtccacgccatcactgccacccagaagactgcggatggcccctctgggaaactgtggcatgacggccacggggctctccagaacatcattcct

SEQ ID NO: 5707 - DNA, 1213 bp, Homo sapiens
aaggtagcagatgacccatttctctcctcaaatccagccccagtctcatcctcgacctcctatctagctctacttcccttgggcccagggccatcttaggccctgctgtgagtccagatggttcctgggtcaggtctttccccctccttgctggcccagagcccaagaggaagcagaagacggctggcctaagccttttggtggccccattcccttcagcaatccatctaggtcatcttcctgtcgatgccagcatccctgggctaccttgtttagggttgttcaatgaatagcagggactcatcacctcagcagaggttggtcctaggccctcagccccctgattcacttatttctgccataagcactttttgagcatctactctgtgtcagtcactattccaggtcctcaggatatagccgtgacctaaacacagaaatctaccctggcggagctgatcttctagttgtggcggtgaggagatagacagtaaagactaaagaaaccaataagtaggtggtgtcatttctgaggaggtaatgagtgctggggggataactggcaaggtgagggagttcgggatggttgagattttaaatagggttattcacagaggcctcatgaaaaaggtgacctttgagcaatggcccaaagggagaggggagtgagccatttcgaaatttaggggaagggtgttccaggtaccaggaacagccagtgtaaaggccccgaggtgggactctactgggtgtggttgcagaacagcaactaggaatgatggcgggggggtgtgggggtgggggggggccgtgggcaagaggcaataggggcaaatgaggtaaagaaacacctgtgggccacattgaggactggggcgtgtatttggggtgatgaaaaatgtacattcttgagtagaggagaaatgtgacttggcttgtaaaagtctagattggaccctaggggtcctaacctgatcaaaccgttctggcagccctgagaagagctggtgtacactgagacccccccgccctccacacaatcccacccagtggttgggtctgggcaggacaccctgacacacgctcccctccccccccccacctgggtagatgaatgggatgatgcagtggttgtcatgacgatgagtgctagagaagtcaggaagagggtccctgtggccacagggaatagtctgccttggcctttgagggt

SEQ ID NO: 5708 - DNA, 1165 bp, Homo sapiens
ttcctccctgccccacccacctacctgcttacccaccaacagccatctgctctgctttcccccacaggcaggccagctttccgcgtggtggacaccgagttctaagccacagaccgaggccccagcaggcagcggctggagggatgccacacccctcacagggcagcccccaactacatcttccctgcttactctctgcctacctgcctgagccatgttcacctgcccacttgtcccctgctgcctgcccaaacaccccaccattggcctgtcaacccacccattggcctgtctgctgggtgctaacaaagctctcatcactccttcacttggtctgtctgtctctgtcttggtagttgccggtggacagcatggccgtgccagcctcccacactgaggccaggtctaccccccatcataccagcccccaggaccactaccccacggccagccaggggtccagagctagcccaggctggggatctcgactcagacaagatggtgacaatgccttgagtctgaggcatcctctgcctgctttcctgcctgccccacctgcctcatattgtgtgggcctttttttgtttgtttcattcattgtttttttttttttaattattttaaatgagatttttgttttttttaaatgcaatatctctgtatacagactggctgggccccaccccctgcgtgtggccctcccacagtattttgtgcaatgaagccctgctcccagcctttcagagacagggacacagcccctatttggaaccctgatcatcaccagaccctgggattggctatgggaaagcatgccacagccactcgccttcctacccccgcccgccatccccagttgcagggggatctggggactaccagagactctgggaaatggacaaggtggggggccccactctttctctcctgcagtcccgtagctggggcctccttccttctcagggtctccccagcccagtccccttgctcccatcccactcggtgctgttgggtaggggccctgccaggaactgaccagctcagcgaggagccataatgtgcatatgtgcacaagcagggttgggggaggggggtgtgaggggttgtgcccaggtgttgccccctatctcctggggagggtgaggcagggcagggacagtctcca

SEQ ID NO: 5709 - DNA, 1150 bp, Homo sapiens
ccatctgtgacctctccctctttttgcccccagtttccatccagtggcagcgcccaggtgcacatcccttctatcagcgtggatggcctctcgacccccgtggtgctctccccagggccccagaagccatgactactaccaccaccaccaccaccccttctggggtcactccatccatgctctctccagccagccatctcaaggagaaacatagttcaactgaaagactcatgctctgattgtggtggggtggggatccttgggaagaattactcccaagagtaactctcattatctcctccacagaaaacacacagcttccacaacttctctgttttctgtcagtcccccagtggccgcccttacacgtctcctacttcaatggtaggggcggtttatttatttattttttgaaggccactgggaggagcctgacctaaccttttagggtggttaggacatctcccccacctccccacttttttccccaagacaagacaatcgaggtctggcttgagaacgacctttctttctttatttctcagcctgcccttggggagatgagggagccctgtctgcgtttttggatgtgagtagaagagttagtttgttttgttttattattcctggccatactcaggggtccaggaagaatttgtaccatttaatgggttgggagtcttggccaaggaagaatcacacccttggaatagaaatttccacctccccaacctttctctcagacagcttatccttttcaaccaactttttggccagggaggaatgtcccttttgttcttccccctgagaagccattcctttgtctgccaacctccctggggtcctgcctgtttcctcccaatggagggtttttttggggggtggtccccgtctggggggcccctccagccagtactccaggtctccctgtctctcccccgctgccattttgatagtataatctatttttaaatggggcttttcaataggggagagggagtcatctcttcctatatttggtggggtgggtgggaaggaagggatttgggggggaatcttcctgccgcctcccccactccaagtgtttatttttgataccaaacatgaattttcagttccctccctcccagccccccaatttcctgcgggc

SEQ ID NO: 5710 - DNA, 1227 bp, Homo sapiens
tctgccggcttatctggctttcagagccctgaaacaaagagaaacaggatctgtccctacccagcacagcaaatggttgtagtaattgccaaagccctcgtaaagccctccggcttgaggagacagtgtatagtcatgagttctgcctctgtgcccttgctggccgcttcccctttgccttctttcctggaactcagggtgtggggactgagcctgtaggggccagcaggccctcctgctgtggccactcccaagtgtgccctcttccctctctccagatcaggtgtctctagcacaggacttggcaccaagctccatgctgagacaccaggctatgtgggcccccaccttgtttcccagcctgtaccttggaagccgaaggtgctttcatcagaatcctaaaatggccgttgaaggcgcctgggccgcagcccagcagtagctggagaggcaggcagagggcagtggttctcccaaataggagacctggggcctggccaggccagggtttgggcctaatggctttgactgaattacccccatcctcctcctttctggaaaagggagagctagagccactcactgtcattctgctctgaccttgaagggggcggtgttggcctggcttctggaatggactgagtccatcgtggaaagggctgggggcaggaggaggtggggaggggcactgcctgcggaaggtaggattagatcattagctcagtgacctcctagggtttcgatgtgctgtgttctcatcctacagttggtttggtaatgatctgcaagtcccggagagcaacagcaaagctctgcctgatgctctcattaaaatctatgcagccaagctcagcactttgtcacagccggccttgcgaagcctcctcagctcggggggccggggacccagtgagctgggaggccctctgggctccacttatgcatatgcaccaaaaaaaaaaaaaaaaaaaaaaggcttctttagacccagagccctttaagatgataaaggacccaatgcaggtaatcctgtttttggactcatgtaatgtagaatgctaaatttagtgattatttaatctgggcctaagctagtgagagtgtggaacaatggcccataatgactcctaagcggtgaagccagggggcctcctcccttcctggttcaccccgcccaggggacctgctcccattcctatggccctggggcccagcttccaatagtgt

SEQ ID NO: 5711 - DNA, 1221 bp, Homo sapiens
agaacaatacagccatcaatagccaaatatatattcttttcagggagacatggaccattatcctagatagaccatatgttgaaatcatacagagtatactttctgaccatgacggaattaaattagaaatgagcaataacagggcatcaagagaaagaggccatatttttgaagagtaaatgaaagcaacaggagagggagctatgtgaaatttttaaaaattgggatggaagggatatatgtgcttccttctacaagttatagggcacaaatttctcataaaaatgagcaacaaaataggatcaaggtcaaatccttactaaaaattataatttttaataaatggaagagtaaatgtcatacataataaatagcagaaatttatgattagatttttatattctacacaatattacatatgtgtatatatataaactaagtatttaatgggcataccatatcgtatattatgatgaaaaagtatcaaaaagagcttcctatctgttttctctccatcctccagtgctgatcatgttgccttgaacaagattgtgttgttacaggtatcagtgtcatttgaggatgtgactgtggacttcagtagagaggagtggcagcaactggactctactcaaagacgcctgtaccaggatgtaatgttggagaactacagccacctgctctcagtgggtaaggacaaccatcctgtgaagttgtgaggagcctgttatgggttaaattgtgcccccaaataaaatatgttgaagtcctaataccccagccccccagaatgtgaccttatttggaaatagagtctttacagaagtaatcaagctaaaatgagatcattagggtgggctttaatctaatataattggtgtccttataaaaaggagaaaactggacacagacacatatacacatacgcacgcacacacacacacaaacacacacacagagggaagacaatatgaagatacacagggagaagatggaatgtgactagaatgatacatctgtaagccaagaaacacttgaggccaccagaagctaagagaggcctggaacagttccttccctagcaccttcaaagagagtatggccctgctaacaccttggttttggagttctggcctccagaactgtgagacaataaatttctcttgttttgagccccctagtttgtggtactttgttataacagccctaggaaactaatac

SEQ ID NO: 5712 - DNA, 1194 bp, Homo sapiens
agagacaattatgacaactgaaatgagacatgcacataatataggtgagacttggatatcggcattgagtgaacctgtttgtcacactctgtcatgaccctctcaccttttctggcaagactgctctgcatttctgctgccctcatacctcacccagccaacctaccaaacattcctagctaggccttccttgctctcaggtgcatatcagagcaagtttgctagggggtgggatctgaaaacccatctcctataatcttctactcttgtgtgggatggaggaaatgaaggtgtgtccctgttgtccaaccctcagcatcttcatcagctctaggaggtgagcatgttgtcagctgttacttcatgacatcacaattctccccctcttgctgttcccagatacacaaggaataatttctgatccaggatcgtccttccaaatggctgtatttataaaggtttttggagctgcaccgaagcatcttattttatagtatatcaaccttttgtttttaaattgacctgccaaggtagctgaagaccttttagacagttccatctttttttttaaattttttctgcctatttaaagacaaattatgggacgtttgtagaacctgagtatttttctttttaccagttttttagtttgagctcttaggtttattggagctagcaataattggttctggcaagtttggccagactgacttcaaaaaattaatgtgtatccagggacattttaaaaacctgtacacagtgtttattgtggttaggaagcaatttcccaatgtacctataagaaatgtgcatcaagccagcctgaccaacatggtgaaaccccatctgtactaaacataaaaaaattagcctggcatggtggtgtacgcctgtaatcccagtgacttgggaggctgaggcaggagaatcgcttgaacccgggaggcggaggttgcagtgagctaagatcgcgccactgtactccagcctgggcaacagcgagactccatctcaaaaaaaaaggaaatgtgtatcaagaacatgattatccagcggtattttctaattcagatcatcaaactgattatatagaagagttggctttaaaatgtttgcaaatgtctttttttttttaatactggaagaaaaaatattctgttgtgtctcatacagtgcttaggatgtctttcacag

SEQ ID NO: 5713 - DNA, 1115 bp, Homo sapiens
ccatcgagcagagctcacatcctgtgcgcagcatcttctgtcccctcatgtccttccgccagggggcctgcgtgggtgagtcctgtagggacaggggatctgggtggctggggaggggcaggaaccagggctggtgccaacctggctcagacatcacgacaccgatgccctgacttcctggacctcatgacccctcctgccccaacagcctcactgtggaactcacagctccaaacagctcagagaactcacagtttgcacttgatctcggccaaaaggccgagaagtgatgaaaactcacactttgaacgcactaactccccaaacagcccagagacctcgcattctgcacacagtaccaaaacagccaggtgacctcccatctagggatggggccccctcaaacctccccaagccatgctaggacctcacacctcggacatacacccttcaacacctcagacacctcagggacttcccaccaggggcaccccaggcgcctcccgatggcctctccctctcaccccgacagtgacgggcagtgaggacatgtgcgtgcacttctttgatgtggagcgggcggccaaggctgctgtcaacaagctgcagggccacagtgcacctgtgcttgatgtcagcttcaactgcgacgagagcctactggcctccagtgacgccagcggcatggtcatcgtctggaggcgggagcagaagtagggtcctgtcggccctgctgctgtcctccatcccacccctcttactccagcctcgtgttgtaaataaagtttcggtggtcatgctgagggccggctcccagctctgccggggacggacagggcagagggcagcgggcagctccaggaacacggtggaacggggttcattgactcatttgtgcattcatgcatcgacggattcattcattccacaagcattgattgaatgtctgctgggttacaggccctgccttaactgttttacacacttatgcattcgatagacattagtgagccctgaccgtgtgccaggaactgttctaggcactggggatactgctctgacctaaactgatggaaatgcctgccttcattgggcttgcatcatagcggagacag

SEQ ID NO: 5714 - DNA, 1396 bp, Homo sapiens
ccgcctcatgtgtgaacatgtacagtagaggggtctcaggtgggctgggccatcttgcaggtgaagcacctggaagtgagcagtgcttccatggcagaggacctctgccggaagagcgccatcattgagacctacgtcatggacagccggatcggtcagtgtcccctccccggccctcagccctggtccagccttcacctggccctccctctccattctgtgctgcggcttctctcctctcctctcggaactcagcgaagctactgacaagaccatggcctgtggaggggagaacaggaaagcactgtctcttgatctcgcctcctccctcttctctctttctctgtcatctctccactctccattctccattgtgtctctctgtccactttctcctttcctctccctgtgcctcatcttcctctcctctctctctcccttctctcttctccgtttctctttttcaccccactccttcatcttgtctcgctgtctatattgttttccttctctgtatcttcattgcttttgctttctttcaaactttctccttcacagatttttctttattaatcagaatcatactgaccaacatgtgctgaggactttctgtgtgctctgtgcttcacatacagtcatgtgcatctttccagttccacaagttagttatcctcatttctcggggccatagagctagtgagtgacagagctaggttttgtatgtcaaagcctctgtcctacatgacatggcttttcctgctgccttctcccctggtattcgtctccctcttttctcctctggctctgcctggctctcctctggctctgccgagggggtggttttcagcctgggcccttgcagatgtgtctgtggcagcaggccacacagaccgcagcgggctgggcagcgtcctgagagacctagtgaagccaggcgacgagaaccttcgggagatgaacaagaagctgcagaacatgctggaggagcagctcaccaagaatatgcacttgcacaaggcaagtgtggcctgccagcctacccatctgttcacccagccacctgcctacccagccacatagcccctgggtcatctgccagtccccttgcccacccacccagcctgtcctcccagctatcctcctacccactcatcaactactccatcatgctctcatcttccaccctctcatcaacttattatccattcattccttccatgtacccgctcatccatttatctacacattcacccaaccatttgcccatctgtccatctacccaatctactacttacttatctcattgtctaccccatgtcctgccacccatttcttgacatatcattctcttatctactcatcaattgccccttgtgttacctttcacccacccagt

SEQ ID NO: 5715 - DNA, 1213 bp, Homo sapiens
cttggggcgcgtcatggtggagctggaggcgctgctgccgcctcccggagcggtccccgggggtgccggggtgtgggtgcctgggggccgcccgccggtgctgcgcgggttggtacgcgtgctgaaccgctccttcgagaaggcggtgcacgtgcgggcctcacacgacggctgggcttccttttgcgaccacccagcgcgctacgtcccgcgcagcccgccgtgggcaggagcgggaggaacaggagcaggagatcccatcctggatccggggctcggcctgggtcccggccaggcatccgcctcctcgcccgacgacggcggccgcaccgaccgctttgccttccagctgccctttgctgagggcgcgggcgatggggcgcgcctcgacttcgtggtgcgctatgagacccctgagggcactttctgggccaacaaccacggccgcaactacacagtcctgctccggatcgcacccgctcccacacccactgatgccgaagggctgccccagcagcagcagctgccgcagctggagccacagcccgagtgccagggtcccgtggaggctgaggccaggcagctgaagagctgcatgaagccggtgaggcgcaggtaatgtcagccagcgccacctccgccaacgcagggctgtgtctgggatggaggacaagcattccggcccaggaacccctcaggcctgctctccaggacagggaggagggtgcattgagtcagtcagtcaaagagtgatggaggtcaaacacgtgctaggcactgttttaactggggttttattcctccatttattgagttccactgtaaagccctgaacaagacagacatctaccctaccctcaaggattcatacaggctcctatgggagacagtttgaaaaaacaagcaagcaagcagataggataaatagggacaaagttagctgctgaagggagtaaggggatagattgggagggaatgactgtgtcagacatgctgttaaagggagggcctttgaggaggtgagtcccgaatgatgataaagaagagttatgcagatacggtggggaggtgggggagagtttgtaggaaaaggaacagggaggacttttctgaggaggtttcatttaaactaagtcctggatgatgaataacagttatgtgcatatatggaacaagggtgttctaggtagaggaaacagcaagtgcaaagtcc

SEQ ID NO: 5716 - DNA, 1151 bp, Homo sapiens
gtagcaaggaatgatttcttccagcttccttgaaatgaataattagtaaacttctaagcaaagtcaatgactaggagtttcacatgtttgtgaggtcctaactaattctcttacccagatgccacctccatgaatgatggtgctttaggcttctggaatatgtaaaaacagcaaagggaaccaagtctagactgcatactggtaaaccagggaagactcagaactgcatatgcatcctcatgcattcctttgtaaagaccaccagtactaaaataactggacactcattgtacctcccagcgataagtatgtgtaacaggccagtgtgttgtccccatgatcatgaattaggcttgggatgcttccaaatatattcaaggtgttggaacaggataggcagctgtgactccctcaagagtccttagaattctaaataaaatgcagagccatcctaagacacaggggtatggacaaggcctggtgacaccaaaggtgcttgtatccaattgaaaaggtgcctgtctcaatttcataccacctttattgcagttaaaaaaaaatcacactctggggacacttggtggaattacagagccaccatcatcattccaaccactatttcattttctgtagttttacctgtgtgcaattactccccctccattctgttccacttcttactccttagtaccaaatcctctgtttgggattgagcgctgctcctggttaatcattcctactacaaaaaaaaataactcccagggctagttaaattgtaaaccaaggctcagcagtctcacaacacatggaccagaggtgacacacagccatttcctttgccatgtggcccagttgctgctgccatgcctccatttccacactggatgcctacggcagtgagatttcactgccggggtaagagttcagcctggatgattttatagctctgttcctagcacttctcatcatccttccagcccagaatcagcggtcattctgcatattcccaccaaccctctacccccaaacacttcagtgtacctcattttaagagttgctgatccctgattctaggacgtttttacccatagttcttgtctttccaaaatctgaaattcttttttttgctcagaactgggtagccaagggtt

SEQ ID NO: 5717 - DNA, 1202 bp, Homo sapiens
gtgtgttcaagggctgggtgatgtctggaggggtctgaggtagggctgcacatgcttcaggtacaagacagtgagggcagagacagtttggtctcctgggaagggctcagtggcaggcagggacagtgtccagggcttctggagttccccggtaatgtccagggcttgggaggacagagccctagataaggagggaaaacatagcagtggaaggctccctgcttcccaccccctcacccagccccagcctctgtttccccaggaggggctgccatctccgccacggccagatcctgacccagaccgggctacctaatttgggaggcccagtggaaaatgaaaacacgagtctccttgtcaaaaactatgaaggatttcaaaacaacaacagcagagcatggagccacatggggagccctggtgagcatcagactgcattggttgcacaccccagaagctgtccgtcagaaaggctttgggtgggtctccgtgttggctgccgctgtgatttctgcttctctggtgcttgggtccatgcttggccacactgacattctgggactctgacagaaatccagttccaaagttttactggaacacacacacacacacacacacacacacacacacacacacacacacacaatggagtccccttccctttatgtctcctggtttgtggtctgggctgtggaagagatgagggatgcctgggactccaccacccctggcgtcataaatttaatgctatttggctggaacctccccggacacccttgtgcacatagcgggcacatgcctgtccttggatcagggtgggggtagtcaccataagccacaggagtgagtttgaacactgtgtgcagagggcacttgagatacggaagttccaccggaaaggaacaggaagcagccctcagaggtggggtgctggccaggtcacggcctcctcaggcctccaggcttgctggacactctccctttcacatcaccttgctgcggtggggcctcaccagggacccactccccctaccctgtaggggcagcgctgagagcacctgggaagagaggaggagagcagggaggtgagagcaccctggtgggaaatgggggcggactggactgcgcgtcctgcagaagggtcagaccggccaccctggagacggccaccacctcactcacatggcaaacaggagacctag

SEQ ID NO: 5718 - DNA, 1202 bp, Homo sapiens; identical to SEQ ID NO: 5717

SEQ ID NO: 5719 - DNA, 1191 bp, Homo sapiens
ccagccggcggctactgggcatggacgaggtcaagggtgaaaagcagctgggccgcatgttctacgcgatcacactgctctttctgctcctctggtcaccctacatcgtggcctgctactggcgagtgtttgtgaaagcctgtgctgtgccccaccgctacctggccactgctgtttggatgagcttcgcccaggctgccgtcaacccaattgtctgcttcctgctcaacaaggacctcaagaagtgcctgaggactcacgccccctgctggggcacaggaggtgccccggctcccagagaaccctactgtgtcatgtgaagcaggctggtaggcagacaggcagagagaaggtcatggccaccgtgatggggccaacagcaagggaggggtaggggcccatacaggagtcctcctttctgagctccagccccagcccctcgaaccacctgtaatctaggcacctttgccaacacctcccaaggatggaggactgggcgagggactgggaaagaggcatatttagttttgtggggcctgtctccgctgcctccttctccacttctacaatctcattctctctctctctctctctgtctctctctctctctctctctctctctcagaagtgacaattcagaaaaagaaaagaacactgagaatgcaggtttttctactaacagctgaggagacaggctttcttactttaatgtctctccttctgacactgtccagaagggggaatttgtcctgtaaaatagacttccagagctcttttgccccctctgctcccatgcaccctccccttccaagtcctttagcaaggcctggatgtttagggagaaagtggtccaaggctgctgacaagagggaccaaagggggtgctgggttcccagggagcagggatgtttaattactatgtcatgtgcaatgttgttttaggccaacccttgccccaagcccagtctcttctccctccccaccatgtccagacctcccaaatggttcttgtgcatctgttggagaagtcaagggagtagggagaagggccccaaggatgggcccaggttaggtgaagagtaagatgtgagctgaactcctcgaactgaagagacccacacttggtcacattctctcacgctgccttcaggatccccagcccccaactcttcttcctgaggatggaaatcc

SEQ ID NO: 5720 - DNA, 1163 bp, Homo sapiens
agatgataggtatgagccatggtgccccgccttatgttttgaggagctatcaaactgtttgcaaaagtggctatgccattttacagtcctatcagcagtgtatgaaggttccagtttctccatatcctcatcaacacttttcgtttgtcttttttattatagccatcctagtgagtatgaaagtggtgtctcattgtagttttgattttcatttccctaataactcatgatattgaatgtccttttatatgcttgtatatctttggagaaatgtctattcaaattcttagcccatttttaattggattatgtgtctttttattattgagttgcaggacttctttttttttttttggagacggagtctcactctgtcatccagggtggagtgcagtggtgtgatcttggcttacttcaacctctgcctcctgggttcaagcaattctcctgcctcagcctcctgaatagctgggactacaggcacacaacgacacacctggttaatttttttttttttttttgtattttagtagagatggggtttcctgtgttgcccaggctgatctcgaactcctgagctcaggcagtccacctgcctcggcctcccaaagtgctaagattacaggcatgagcccctgcacctggccagaacttctttatgtatctggatataagtcctttgtcagataatatgtttttttctttttttttttttttttttttgagacagagtctcgctctgtcgcccagggtggagtgcagtggcgcgatctcggctcactgcaagctccgcctcctgggttcacgccattctcctgcctcagcctcccaagtagctgggactacaggcgcccgccaccatgcccagctaattttttgtatttttagtagagacggggtttcaccgtgttagccaggatggtctcgatctcctgacctcgtgatccacccgcctcggcctcccaaagtgctgggattacaggcgtgagccaccgcgcctggccagataatatgaattataaatattttctcccattctgtgggttcttttcattttattgatggtatcttttaatgtacagtaggttttaatttcagtgatgtccagcttacctattttgttgtcacttgggcatttggtgttatatccaataaatcatcgc

SEQ ID NO: 5721 - DNA, 1960 bp, Homo sapiens
aggcagaggcagccagacagtggagaaaggaggagagtacagaagtaggcaaggagcgaaggcacatgggactgagcatatcctctcacacccagagagaaccattgactgggctttgggcaggtatgtagggaggagggtttgaggcccctggtcctggggcactagacccctcttaattctctccttacaattttatttttctttttctccctcctccttcagcaaggggactgtgtgatcagcaaagtcctgaccttcgacctcaccaagtacccagatgccaaccccaaccccaatgagcagtagcagtatttttgccctcccgccctgtctggatccctaagctgtccctctcccaatctctggatatttgactcccaaccttccccctacctcctggccctttttggtgtagtcatgggatttaggcactgctaatcaagcatgaagaggaacagaggtgatgttaggtctggagcaaaaattcctgaacgacagggagtattctggcctctgaaaggaggtgctgagctgaacagggccatctgttcatcacacacacccccttcctccccctcatcacccataatcgtgggccccttgggcctcttgcccactgtgtgtgtgggtatgtatgtgtgtatgtatgtatccgcatgtgtgcatgtgagtatgtttgcaaaataataaaggatattggagacctgttttagaaggagcctaggctgaatttgattccaagagagcttaggatgacagcacccctgagctgggcaaaggtactcaggacctcataggagtcttaggcagttacctgaaactgccttcattcactcatttgtgtattcattcatttatgtattcatcagacacataccgaacaccctctatttgtcaggctctgtgcttggaatacagagttgaatcagacatgatctctaccctcctagtaaggagatacagtgggttcatgaatgactatagttagctgaatgtcatatgtactttgaatttgagaagtgggtgatcccctctaggcttcctggaggtcacatttaagctagaccttgacaaattggtaggatttggtcaggcactaggagtggagcatgagctctggggacagacagttatgggttctggtcccactttttatcacttactagttgtttgaccttgggcaagtcatttgaccttctgtgcctcagtttcctcatctgtaaaatggggctaacaatattacctacctcataggatttaatgatgtcaagctcctcactggaggccttatcccttcgtggagcccactaggtgccgacccctcagaatataaccctcatgcctggacccctgagagcttctgatcccagctattagggacagaagaagcctccaaatctggaaggtgctgaatgccctgctgactgggaaagtttcagggcactgatggggtctacctggtaagcggagggcctgaggaaacctgtagcttcaatcatgtctggtaaccgggtgcctgagccccaatctgggttgtgaggaaataggggagaggtatcctgggccacatcccagcctaacacctgtgaggttcattttaggaactaacctcattagctataaggatcatgcagaggcagcaaagccgggtgcgatgagctcagcctttactcattcacatacaccatcacactttaattccaatctgtatattgctttttaaaagttaagtccattctaattacccaaatatgcatgaattcattctccttttgagaagttagattgttaaagatagtctcattcagctaccaaccactccttgatccttcccttcttagtggctgttgtttgttgtacttccgtttagactttgttttaatgcttgtacgtacatatgtgaactcattggaaatattgtgtgtttaatgcaaatgatatattgaattgtttagca

SEQ ID NO: 5722 - DNA, 1100 bp, Homo sapiens
aagctcaaaagacctcagcaagatgccctgtggcagcccaggagataggagagagaatattgggctttccctcttcctatattttatatcttgccttcctctttctctttctcccaggttcctccggtttaggctcagctagcagcatccaggcagctgttcggcagctggaggctgaggctgatgccattatacaaatggtacgtgagggtcaaagggcgcggagacagcaacaagcagcaacggttagcatgatgcctgtggcccctcattcatttgtctctccactcatccccccaccatgtcatcagtggggtttcattgcctttaccttgtatgcttttgcattaagtttgctatatgaatgcttctggacaaaagggttactttctgttggtgttttcctatttgttgattggtttgttggtttgatttgatttaaagcttggccatcataccccactcccagctatccagtcaacagtggcgcttttgcaaactgcctgatgctaagtgttgtctgggttctgaggggttatggggtgaagttttttttcagtcccatggaacaatgcaggtacatcagaaacatctcaggaatcctaccattgaaagtcccccaagcttggtacatatcccacacagccacttctgtctgtggctgctccctccaccctgccctctgcctttattctccataatcccttggcacctaggcactcaggcacttttaggaggaaaccttcaggtacttaagtagccagctcagtgttggggtcccggcattgagtggctgcagtaaaagcctggcatcacatgtgtatgctgtggcactccctcattgttttcctgtccttgcaacatgtaagttacctttccaagatccaagaaaggtatcctaagacccgatatttctttgcgtataattactattatacagtatggttttattgagtaggcagggaaaagccttgaacttaggggcagtgactccaggaaggtagaaagggaaaataaagctgttattctggagtattttttctgccgagtctctttcccattacacgaaaagatgtcggctttttaaataatcccgctca

SEQ ID NO: 5723 - DNA, 1127 bp, Homo sapiens
aatttataaagaaaagatatttaagtggcccacagttctgcaagctttggaagcatggtgctagcatctgctgggcttctagggaggcctcaggaagttcacagtcatggcggaaggttaagtgggagcttgcatgtcacatggcaggagccaggaggtggagggggtggtacacactaactcactatcatgaagacaacactaaacaatgagggatccacccccatgacccaaacacctccagcattggggattacaattcagcatgagatttgggcagagcaaatattccaaactgtatcactgcttaaggttgagtaaaatgcctcttctctgtgcctccttagacctcctcatgttggccaattattttgttgctggtactagttgtggaaggactgttccataggtctttaacttaatccttctgagctttgaattgaagcaaaatgattttcacacacttttcaaattacttacaggcagcctttacttgcatcaaaaacttatggaaccggaaacccctgaaggtatatggtggacgaatggctgaatcgatgctggccattctatgccacatcctccgaggagaacctgtgattcgagagagactaagcaaggagaaggaggggtctcgaggagaagaggatacagggcaagaggaaggtggctcccgccgggaacctcaagtcaaccagcaacaactgcaacaggtagggtactggcctcacactccagggtccagactttgcacccaatggagtgtgatgcttacggattttctaagctcacataccactgagtccctggtcacattaaccaggagacagtttagatttcctccttctcttagtatttattttttttctcctgaggaaaactggagtatagtcctgatgctctgcacaggtaatactcctttcaagcatgttgatgagtattctcagtagcctcctgctgcctcagtggaggcaaactgtcctcagttactttctggttaacctgtaaagagaatggatattgtgaaccagatttattctccaacaagagctttctgaaaccttagtcacctacaaaacttttgttttcacttgcaaataaaatgtataaggggcattttaaaaatt

SEQ ID NO: 5724 - DNA, 1275 bp, Homo sapiens
agcatctagcatgtgccatgtgcctaacacagctttaaaccagtggcaaggaaaattttgctggctgaggatggagaattgatttcacaggtgatgcttaagaatctcaatcacagaattcctgtggtttgacaatataagtttgagataatttctggatttttagtttagaagaatttttattagataactctaaaaatgaatttttctgataaaatggattctggcaaggatagttctcttgtcttcgtagatcttagaatgtaaccggagttctccatctaaagacctagctctaggggttttatggtgtctattggtgttagcacatatatctagatgggtatgacaatgaactacagcacttttagctcagagtatgatctttctcatatgggcaagggtgggacgtgaacttgtctaggtgtcatgctcagcaatctcttgtaacaaagctcagttagaaagcacccatgcggcgcttctaccttattcttacatcctctttttcctcccctctccagtgcgagttatatcactgggtggacctgttggaccgcttcgatggaatactggcagatgctggacagacagtggagaatatgtcatggatgctcgtatgtgataggccagaaagagagcaactgaaaatgcttctcttggctgtgttgaacttcacagccttgctcattgagtacagcttttcccggcatctgtacagttccatagaggtaggggaggttaaagcctgtgtaccctgttcttgactagaattgtgtacatccagaaataaggaaattgctatttctattgcttctttccttttcattgtggagctctgggtttttcattgtcaaagataatagtagaatgtttcttggatatagatactatccttcatagggttgatgggaagattctgtactatcacctttgctttgccttttcaagattcaagaaatgaatgagaaatgttatatatgtattaaagtatttaaggaaatttgcatgaattgatttttgccctaggttgttagagcagccccacattacttttaaattcctagaaatagtttgattttctcatcacattaatgtacttactactcctctaagtgttagtgtgctgctttaaagtctctctgtactctgccacacccatcccaaaatatatattcatagcatcctttgtgtccttgaagagtaaggtaggtgcagcaatcagtgagctttttaattggttaaaaatcactgtaagaagaaattattttcttt

SEQ ID NO: 5725 - DNA, 1156 bp, Homo sapiens
tctattccaaaactgtccacatatctttctccacaatcactatcctagcccaagctctcatggtctcttgcctggactgtctaactggtctcataactagcttcctagatggccttcttgtttccagttttgctcccactaaaactcattctccacacatcagacagagtaagctttaaaatacaaaattcagatcacgtcactcccagctcaaaaccctccaatggcttttcattgtacctcgaataaaagctaaatcccttccatggctgacatggccctacactagcttactccagaacttctttcctacctcatctagtaccagtctttcctcttgctgcctccagttggacttctttctggattcccttaaatacaccaagctcatctgtcaccctgggatgccatgcctctgggtcctcatgaaatgactgatgtcttcttgtcattcaagctcacctcaactctcacctccatggagaatccttccctgactaaactatttcatcttgttctccaccctcaccccattacactaccctttgtcctttttttaaaattgttttcaaagtatttttgactttgtgaaatgacttttgttcatgtatttatttgattgtttgtgactgtcatcctctctctaaaatgtgagatctaggagagcagggaccttcttcaccactcagtagccagcacctagaacagtgcctgacacctcactctcctgatttaaggactgaacataggtgagacagggagaatgagagcgagtctagttccaggcaagtagaaagtggccagatcagggaagaaggaatagcagaggaaatgggaacacactctcattcatgtttttgccaccattatcaacctgtaggtcattactataatgaatgaactcccacaattttcagtctttccttcagtatattattaattaaattccaagcaattctagattgtatctaccattttgctagggctggacagatccactaaagtagttctccatctatttttcattattgccccctaaaatgttaatatcacaggtatattatatatttaataactatttgcatatttgcaatttatacctagaaagagtaagtataaaagttactctttttattcgatacagggttaagaataa

SEQ ID NO: 5726 - DNA, 1194 bp, Homo sapiens
tgctgtaaaaaattagcacagactttgtggcttaaaacaacacaaatctatcatcttacacttctagaggtgagaggtcccaaatgagtttcactgggccaaaattggtgttgtcagggttacactctctccagagactctaggggagaatccatttccttgcctttttcagcttctagaggctgcttagattcctagaataatggcttctttcctcatcttcaaaataactatgtagtatcttttttttttttttttgagacggagtctcacacactgtcgcccaggctgttgtgcagtggcacgatctccgctcactgcaacctctgcctcctgggttcaagtgattctcctgcctcagcctcccaagtagctgggattagaggcatgcgccaccatgcccggctaatgttttgtatttttagtagagatggggtttcaccgtgttggccaggctggtcttgaactcctgacctcatgatccatctgcctgggcctcccaaggtgctgggattataggcgtgagccacgacgcctggccaacaatgtagtattttttctcttttctgaacctctcttccaatccttatatcttctctgactctgatcttcctgcctctcacttaaaaggactcttgtgattactttgcatgcattgggatcatctaggataatctccacatctcaatatgtttaagttaatcacatctggaaagttcctttaaccatgtaaagtaacatattcaaaagttttggagattaggatctgtagatctttgaggatgggaggcattattcagcctactgcagatgtaatttgataaatttttgcttggaatttttgcatctacataaggatattggtctgaagttttcttttgtttaatgtctttatctttggtatcggggtaatgctgacctcatagaatgggttgggaagtgtttcctgtttttggaagagtctgtgtacaattggtatcatttcttaaattttagagtttaccagtaagttttatttgtgggaaggtttaagactacaatttcaatttttaaaatatatatagggctattcaggttatatttcttcttgtgtgaggattggtaattagtattttaaagaaagttcttcatttcatgtagtttatcaaattaatttttgtaaagttgttaatatcctcttatcattttgtataa

SEQ ID NO: 5727 - DNA, 1171 bp, Homo sapiens
acattttggtttaattgattttctctgttttctgttttctaattcattggtttctgctttatctttattgtttcgttttgcttattatccaaaaagtttatgatttttgtattacttagaactgtgttatttaacttccacatatttggacattttccagagatctttctgctattgacttctaatttaattacattatggtaaaggaatgtactttatatgacttgaatatgttaaaacatatcaaaacttgtttcatggcccagaatatggtctgtattggtaatatgtttcatgtgcacttgagaagaataaattttgctgttgttgagtagtcttctataaatgtcaaccaagttaagttggttgatagtgtttttcatgtctactatatccaggctgactttatgcctacttgttctatcagttattaagagaggactatcgaagtccccaatgataattgtggatttgtctgttattttttgtagttgtatcagtttttatttaattgattttgaacctttcatgctaggtgcatagacctttaggattgtcatgtcctcttagttaactgaccccactatcattctgaaatgaacttccttgtattctttgttctgaaatgcattttgtctagtataaatatagctgctgcagcttttttgggctagtttaactatggtatatctttttcatccttttactttttatgtatttgtgtgtttatgtttaaagtgcatttatcataggcagcatatagttggttcttgcttttttatccaatttgacagtctctgccttttaattgatgtttggatccatttacatttaatgttattatcagtatggctaggtttgagtctatcatcttgctatttgttttgtatttgttccatgtatgctttgttcccttttctccctttttctgccttcttttggattactgttttttttaatgattccattgttttttcttccttgatttattagctgtacctcattgttttattatcttagtagttgctttagagtttatagtataaatgtttaacttcctcctcctggctttcatgctagtgtcataaattttacttgtagattttataaaccttaaaatacattgttgttatttttgtttatactttaagtcctcttttaaagagattta

SEQ ID NO: 5728 - DNA, 1175 bp, Homo sapiens
tgtattgaatgatctccagtactacttgaaatattttctggattgctagcagtgcagatgctatattgaaaacattcacatttgtgaatgtgactcaagacttagaatcattatcaaatggatttttagtctggcatccaaatagcaaatggtcttacagcaagagcaacagatactggtaagttgcttattaagtcagtttccaatactcacacaatgcaattagctgagaagtattatatctttaaagttataatgccataataatgctacttatgaagcaatgattacctttttccaattcctttctgttaaataacacctaaataattttcagaaagcacaatctagtcatttgaaactttgtgcaggaaaaaaaaaaatcataagagcccatgaatcagttgagcctgttcttgtagctaagctaattttttctccattcatgaagagatacattaattatgtagcaaaccattaattttcaaggtaaagtctactaagttgtacttctcttttagtttggatcacaagactataaattatatcctgtaacatctgtgtggtccgtgcccctcccacatttataattaccactactgttaaagttagcttcagagtaacgtatccaagaaattcagaattactctaatatttacgaatgtgatttaagaactctcctacatcaatctcgctacatatgtaagaacacaaatttgtttaaattaccatcctgtaactaattcatgctgtataaaaacctcaggggcccttatcttgaatcagaaacttttgataccaaaggcatagttaaaatatttagttggccctaaagcacttggatttctccaagcttctcattcttacagtttacatgaaattcccatctagaggcttaggtgcaaactgtccttatcacaggatttaaaaatctgatttgattcagatggtccaggtgagaggaaaacaaaatgtctgatctgaggggctgtggggaatactgggccttttgaaaccccattgtgacttagacgtattgtggagacctggcttgtggaacaagcagatactagatcataactataggtattaaaaggtgatgacttttggcccagaggcacatgggattagtgacctggaatcactgttagaatctttggaacccagtgccattt

SEQ ID NO: 5729 - DNA, 1218 bp, Homo sapiens
ggatgtgggcgtggtgggcgcccaaaccgtggcagcaggaccggcaagtcaagtgcttctgctcctgatgtggataacccagaggcattcccagctgtggcttaactggatgccataagacaaccctggttcctttgtgaacctttctgttcaaagcttttgcatgcttaaggattccaaaggactatttaaaaaaaaaaaaaaagactgtcattcataccattcacacctaaagactgaattttatctgttttaaaaatgaacttctcttgctacacagaaataacaaacacgttatttgtcagttttgtatttagaaatgtattggtagcagggatgttttcataattttcagagattatgcattcttcatgaatacttttgtattgctgcttgcaaatatgcatttccaaacttgaaatataggtgtgaacagtgtgtaccagtttaaagttttcacttcatttgtgtttttaaattaaggatttagaagttcccccaattacaaactggttttaaatattggacatactggttgtaatacctgctttgcatattcacacatggtcaactgggacatgttaaactttgatttgtcaaattttatgctgtgtggaatactaactatatgtattttaacttagttttaatatttgcatttttggggaaaaatcttttttcacttctcgtgatagctgttatatatatatatgctaaatctttatatacagaaatatcagtacttgaacaaattcaaagcacattggtttattaacccttgctccttgcatggctcattaggttcaaattgtaactgacttacattttcaactatatttactttttaaatgcataattttcccattttaaaatctaaactagacatcttaattggtgaaagttgtttaaactacttattgttggtaggcacatcctgtcaagtgaagtagttttataggtatgggtttttttctccctctccaccagggtgggtggaataagttgagtttgccaatgtgtaatatttaaactgttctgtaaaataagtatctggccatttggtatgatttctgtgtgtgaaagttccccaaatcaaaatggtacatccataatcagcaaccatttaacccttccttgttctaaaacaaacaaaaaccaaagggcactggttggcagggtgaggcgggggagtattttaatttttggaatttaggaagc

SEQ ID NO: 5730 - DNA, 1177 bp, Homo sapiens
tattaaagttgttcttttggttttacatggtataatggaattttttggttttgtctgaagcagtggtactgaatgactttataattgatcccttgcatttgcatcaaaagctttagtttcactggaaatgctgacttcaacaattgcaaaaaaaaaaaaaaaaaatgaaggtagtgactttaaaagtaggaataaagtgtatggttgtccaactactgcaggggaaaaggtcaaatagatgaagaaggaagaaaagaaagaaggaaagaaagaaacaataagaaagcatggtaaagaaacaaaacaatggtaggattaagtccaaactgaatgtagggatgaatgagttaaaatcacctttgagaaaatagtaactcttagagggaatgggtccaaaaaaataaagctatatgccaattttatagcttaacacagtgacacagataggaattgaaaaaatatgccacacaagtgctacaggaaaatacaggtactcacctacacagagtgaacaggttttaacattcggctgtatttgcttcagagatgtctctgtctgtctgtctgtctgtctgtctctctctctctccccctcgccacccctctcttctctctctctccaataaataaatttttttaggcacaggtaaagttcctcagcccataatatttaccttctttcttacacagaggtaagcactacccagaaaatggtgtgtttacttcttgtctatgtctttagacatatatatgagtgtgtgtttgtatgtatatgtgtatataaatattcacaatcaaagagtattaatgttttttaaatggatataaccgatagactgtatatatcattttgcaacttgaattttagattcaacagtgttttggagacagccatttcgatacatatggatctagttcatgcagtttaactgctgtatacaaaatatttaattgtatgaattaccacaccttatttatccatttccctactggtgaacacttaggttcttcccagcattttgcggcaatgaacatactaaacagatgtgcttttgtgcacatgtgtgaagttctctagaggtaagtatatggaagtgaaatttctgggtcctagggtttgagcatcttcaccccaactagatattgccaaattgctttccaaagtcattgtacttgt

SEQ ID NO: 5731 - DNA, 1253 bp, Homo sapiens
tatataaagtttttattctcctagtagattgaaagctccatgaagccaaagaccaggtcttaaatatcccctatttttgcccgtaaatcctaatacattgaaggaactcagtaaatatttatttattgaacagtgaataatagcacttctgccaattggtaagatgggcataaaatggtatttcctgactactgcttgttcacttttgagaaaattcttccctgtatagtttgcattcataggtctggatatgtgaatgtaagttttagagttgtgggggggacttaggtcatgttatacacctaccatgtttttaaatgggaaacctgaggttttgtttaaggttaccatgccaggtttttctccatttcatatttttctttttatccatttatcacatttgagtacctgctgtgtatgagccccaaaaagcaaatggtccatttcctttatgaagtaagaggcaaggtcattttctgaaaagggtggagctggggaatagtgctctggaggattgagaagattggagaatttttaaaagttatggcagagtctacggccataccaccctgaatgagcctgatctcgtctgatcttggaagctaagcagggtcgggcctggttagtacttggatgggagaccacctgggaataccgggtgctgtaggctttggccgggcgtggtggctcacgcctgtaatgccagcactttgggaggccgaggcgggcggatcacgaggtcaggagatcgataccattttggctaacatggtgaaaccccgtctctactaaaaattcaaaaaaattagccgggcgtggtggtgggcacctgtagtcccagcttctgaggaggctgaggcaggagaatggcatgaacccgggaggcagagcttgcagtgagccgagattgcgccactgcactccagcctgggcgacagagtgagacaacgtctcaaaaaaaaaaaaaaagtggcagaaagtgaaaaagaaaaccacagcaagattggtgagcagatttcaggagtctgctgcaagtgatttttattttatgtattgaaacacatctgcctgttttgttactttgccctataacttggctactggagataagcacagagaaagtgaacggtaggaatgatcaatggttagaatttggcctagatgagtacaaaaacatcattatcattatcaataacaataacatcatcatagtgagttcagaggttttgtggttttggcaagagtgtaacagc

SEQ ID NO: 5732 - DNA, 1242 bp, Homo sapiens
agaagaaagaagaaaatggaatagcaggtatttaagaaactcagagggaaaaaaatgtgagccaaggaacattatacctggtaaaactgactttcaagtataaagagtacagatatttatcaacatgcaggaattcaagaaatattgttccaccatcccatgaatttgctagagaatgagcttcagacagccaaagtgttgagagacattgaaataaggacaggtagcaagcgttaaatgtacagttacttgtagaattaagatgaaatgaggattaaaagggagatagagtatgtaatgcctatgtgcccagataatgtagataactttttaaaaatggagaaatggggaaatcatgcaaaattttaacagttctcagtaattatattggtggagtgtcaaagttagtgttattattccaagactatgtataatgtgagataatataaatgagcagttattagataatctaattctatcatcctctgtctttgagaactaggacttttaatgtgaaagaatacagatgtaattccaaagaatttagattttttttaaaccctgtagtactccatatgaactcatgagaaattttatttaaaactaaacacacacacacacccacccctgcttttgctctattcactgaaaaggcttagaaacaaggaccagcccagtagcaatgagtatacctagtaactccaattgtgatacagaaatattcttcccaatattctttcttttaagaaatcagggtgtcttagagaaataactgactacaattctggggcaggaaatatacaaataagcttggaacatcttgtcataaaagatagggaaggagctttcaaagactactggggtcatatcgagccaatttaaagatgtttccactggccaattcggtttcacagaggataattgacagtagcaacaagtccatccaacacccaaatcttggtttctaataccatcctctaataaatgaaccagggctccttggagaaatagctgattctagggctgaggcagggaatatacaagatgaacctggagcatctcgtagtcagatgatagtcaacgtatgatggggttatatcctggtaaagccattctaagttgaaaatattgttaagttgataatgcatttgctatacccaacctacccaacatcacagcttagcctaacctaccttcgacctgctcagaacacttacgttagtccacagttgggcaaaatca

SEQ ID NO: 5733 - DNA, 1230 bp, Homo sapiens
attactctattactgagttcttcctaagttgttttattttgttttatgttctttttattgcttcttgagttgaaagctgagtttacttcttttcttctcctttttaaaaaagcttttcaagcatatacagaagaggtcaggatggtataatgaatgcctcccccaatatacctgtcatgaagtttcagcaatgactaatttatgaccagtcttgttttgtctatataatacccactttctccctctgatattatttgaaacaaatcacggacatattgttttatttttttcagtttgtatctgtagaaattaagaactcttaaaatataatcacctaggtcaggttcagtgactcatgcctgtaatttcagcactttgggaggtcaaagcaggaagattgcttgagaccaggaatttgacagcagcctgagcaacatagcgagaccccaccatctctacaaaaataaaaaataaaatagccaggtgtggtggcatatacctgtagtcctagctgaggcaggaggatggctggagcccaggagtttgagactgtggtgagctgtgattgagccactgcactccagcctaggccatagagtgggaccgtctctaaaaaaaaaaaaagaaaaaaaaatatatatatacacctaaaaattaaattaacaataatactaatgccttaaaattacatatctagtcagtgttcaaatttttaattgtcttatagattttatttatttggatcaggatacaaacaaggtccacacattgttattgctcaataggccttttaaatgtcttttttttttttttttttttttaagacggagtgtcactctgttgcccaggctggagtgcagtggcatgatcttggctaactgcagcctctgcctcccagattcaagtgattttcctgcctcagcctcccaagtagctgggattacaggcacacgccaccacgtccagctaatttttgcatttttagtagagatggggtttcaccatgttggccaggctgatcttgaactcctgatctcaggtgatttgaccacctcaacctcccaaagtgctgggattacaggcatgagccactgcacccagccaaggcctaaatgtcctttaatctctaggtacctcctccatctttctttacccctcaagtccctggaatttgtttattgaagaaatcaagttgtcttgtagaatttcccatagtgtgaattttgccaa

SEQ ID NO: 5734 - DNA, 1165 bp, Homo sapiens
acttttttttttttttttgagacggagtctccctctgttgcacaggctggagtgcagtggtgcgatctcggctcactgcaagctccgcctcctgggttcacaccgttctcctgcctcagcctcctgagaagctgggactacaggcgcccgccaccacgcccggctaattttttgtattttcagtagagacggggtttcactgtgttagccaggatgatctcaatctcctgacctcgtgatccgcccatctcggctaagacataactttttgaggacattcttgagatcattcttcattatggctgatattatcccaccttttccatgtctccaaggaaaaaactcagattctttgcctttgatcctttctcactctacatccaatcagatgtcaaattttctcccttcaagccccaatatatttcttttttgtctttctccacttttgaaggatccaacatatttcttgattcctgtctcttctttctgtcttcattgcccttatactatgtcaggcctttataattattgtctgtagtagtagagcagcttcccggtctctgttatctctctctctctgtcctccaattctgtcttacactcccagaataattttccctcaaacctagttctaattgtgttactttcctgtttaaacacttaaacgcagttcccattgcctagtaagagaagtgctatctcaagcacttataatctggcctgcaacctaccattacttccccttcccctgtttgcactctgccatctactcccattttattcagtagtcttgttccagtcttttccaactctttgaccttctttaaactattccttcacactgttttgaaggaaagaacccatcatgttttatgctgttttagacatgaaaattaggaccagctggcagaagggatggcgctaaaccaaaaaattttctcggctgggtgcagtggctcacgcctataatcccaacactttgggaggccgaggtgggtggatcacttgaggccaggagtttgagactagcctggccaacatggtgaaaccccgtctctactaaaaatacaaaaaaattagttggatgtggtggcgggcacctgtaatcccagctactccggatgctgaggcacaagaattccttgaacctgggaggcggagcttg

SEQ ID NO: 5735 - DNA, 1199 bp, Homo sapiens
ggcagcttagcagatttttagggatcctggaataatcctttatggttaatcagaacataagatctggttcagaactatttttcttctgtctttggcagggaaatgaaccgaaggcagacatatgaacaagcaaataagatctatgacaaagccatgaaactggagcaggaatttggagagtactttacaggtaagactcctgctgccctgcggggggttctggggaactagccaggtacctgtttctataagtgtctcaaagaggtgtagacagaatgtagaaaccttgcacggagtttccagttgcttttaagtttttgagcacaaacctttccaaagcacacaagttccccgtgtccagccatagcagttcagccagtttatagcataaaccactcaccaaatgcttccttgaattgttggtttgttcattttgtcttgtccttactagattgtaggctccctgtattactctgtctccctccgtttcagctccactccccctcccccagtactttgctttgcatgtttaggtgctgaataaacgtttgttgatgatgatgattcctcggtgtgctgttcaagttgtctgttggggtgtctgtctgtctgtctgtgtgtgtgtgtgtgtgtgtgtgtgtgtaaggtcagttcctgaaacattgggaaggtttctatgtaatacgttcttcaccttttgaagtacagtgacatatatatacataaatatatgcaaggcagtgccgaatccattctagctggtggtgacactaggttaactgtgtaaagaattcataaatgtcctcacacaccttgggtcttcagagctccctttaccatcagcatccatgtccttgtttgctgggctgacctctgacatacagcagatgtgatgggcccaggagcgctgcctcttgccagaaattgtggctttcagttctttctgtggagaactgcgattttccaaatcttttagtaaggctgctttagaataacaagctgctggccttatggcacccaagaacaacatgaactgcaaggtctggcacatagtgggtgctcaataaacatcttttgaataaacacatttttctggtcattactacttagtctcactgtctcagtgagttgacttcaagccctggacttggggtaccttgttggttgcccttactgccctgaacacacaggcagccagc

SEQ ID NO: 5736 - DNA, 1199 bp, Homo sapiens
caaatgtccatcacctgggcatttaataaactatattacatccacacaaaggtctactataaagccattataaagataagagagttctaaatgaagatgtctgattgaagatgtctgattaaagatatgtgcttatctccctcccttttgacatcccattaaaatggtaataaaagaataagcccttaagagtgaagaaaatgggcttaacaaatttttggaagattggaagtgtgtcaactgatgaaacagaatggaacaagccaacgtgcctggcagaatcccagagaggttcctgtttcagagctaggaagtgctcaaggtcaaaataagaagggagtccgaaaactagggggtgaactgaaaacctgtgaaagaagtgccccccagccctaaaggccaacccttttggaggtgcttatcatgcaaaaggaatcgtgctggaaaaagtaggagttgaagccaaacagccaaattctgccattaggaagtgtgtaagggtccagctgatcaagaatggcaagaaaatcacagcctttgtacccaacgacggttgcttaaactttattgaggaaaatgatgaagttctggttgctggatttggtcgcaaaggtcatgctgttggtgatattcctggagtccgctttaaggttgtcaaagtagccaatgtttctcttttggccctatacaaaggcaagaaggaaagaccaagatcataaatattaatggtgaaaaccctgtagtaataaattttcatatgccaaaaaaaaaaaaaaaagaagtgcccccattggctccttatgatccccccacccatcatccccatatttagcatagttagcccaatctttatctcctagccaaaaaaaaaggagggaagggaagggaagggaagggagaaaagaaaaggaaagaagagaaaagaaagaaaagaaaaggaaagaaaggaaaggaaaggaaactggaggactcaacagaaatagaataagctgcctaaagaaaactaaggatcatgtaggtgctagtgccacagagcaaaataaaattcttcctaatttggcatttgagggcctccagcctaaaggcagcttccctaacctaagtctaaaagagaaagtcatatgtagaaagctgaaactggatcccttccttacaccttatacaaaaattaattcaagatggatcaaagacttacatgt

SEQ ID NO: 5737 - DNA, 1181 bp, Homo sapiens
caagaacagcctgaccaacatggtgaaaccccatctctactaaaaatacaaaaattagcggggtgtggtggcacatgcctgtaatcccagttactcaggaggctgagccaggagaatcacttgaacctgggaggcggaggttgccgtgagccgagattgtgccattgcacaagagtgaaactccatctcaaaaaaaaaagaaaagataaataggctgggcacagtggctcacatctgtaatcccagcaatctgggaggtctaggcaggaggactgcttgggcccagtagttagagaccagcctgggcaacatagtgagccccacctctacaaaaaatatgtattaaaaaaattagacaggcatgatagcacactcatgtagtcccagctacttgagaggctgaggctgcagtgagctgtgatcacgccattgtattccagcctgggcagggagaatgagaccctgtctcaagaaaaaaaaaaaaaaaaaaaaagataaaaataataaaatgttaaattctatcatttaaaaatcaacataagattaaaaagaaaacaagtgctctgtgctcccaaacgttgaaataaaaaaaaaaaaaaaaaaatgaagccagcatggtggctcaggcctgtaatctcagcactttgggaggctgaggcaggaagatggcttgaccccaggagtttgagaccagcctgggcaacatagcaagactcggtctttatttaaaaaaaaaaaaaaaaaaaagggtaggggggaggggaggccaggtgcagtggctcatgcctgtagtcccagctacttgggaggctgaggctggagaatcacttgaacccacgaagaggaggttacagtgaggcaaatcataacactgcactccagcctaggcaacagaatgagaccctgtctcaaaaaaaatagagaaaaaaataggctgggtgcagtggttcatgcctgtaatcccagcactttgggggactaaggcaggccagatcacctgaggtcaggagttcgagaccagcctggccaacatggtgaaaccctgtctctactaaaaatacaaaaaaattagccgggtgtggtagcttgcacctgtagtcccagctacttgggaggctgaggcaggagaattgcttgaaccaaggaggacgagattgcagtgagcagagatgctgccattg

SEQ ID NO: 5738 - DNA, 1170 bp, Homo sapiens
tcggctcactgcaatctctgcctcccgggttcaagcttgtccaggttgatcttgaactcctgacctcgtgatctacccacctcggcctcccaaaatgctgggattacaggggtgagccaccgtgcccaacctcacttgcttcttatccttacactcccccagccccagagaaactgccacatacaccacaaaaaccaaacatcccccaatgaccttagccccattgctccattcactcccaggtgagaattcaggcaaacgtccacaaaggtcacaggcagcgtacatacggttctgttataccccatatattaccccttcatgtcctaaagaagacattttctcttagagattttcattttagtgtatctttaaaaaaaaatcttgtgttaacttgcctccatctttttcttgggtgaggacacccaggaatgacccttttgtgtctatgatgttgctgttcacagcttttcttgataggcctagtacaatcttgggaacagggttactgtatactgaaggtctgacagtagctcttagactcgcctatcttaggtagtcatgctgtgcattttttttttcattggtgtactgtgtttgatttgtctcatatatttggagtttttctgaaaaatggagcagtaatgcagcatcaacctattaaaatacattttaagccttttaattttctgtggtgtttttgaaggggaaaggagggaggggagttatcttaggagatgagcagtagactctataaaggtaatcctttatgacctttggattacagtattgatctagacaaacatggggaggaggtggggatgaggtgcatcaaatggctggaggggttggcaaggattagcgctattgatactacatggaagtaatgatggaggaaagctgcccctctgaaagaggaagaaaatgggcttaatcctcatcgagctgggggcgcggggggggtctcaaaattggtatttgtttcttagcagctgctgctgtgtccaaggcttggaattgctgtggtgaatctaaaactgtctcagtagtggtgagctgacctcacccaagttcaaagccctactctgcctgatccttttttcctgagcctcagagctaaaatgcccccgagctctttcctattggctggaaagacgaattgaagttccc

SEQ ID NO: 5739 - DNA, 1201 bp, Homo sapiens
cccatcaaactccggcagttccatcgcccacctctgaaaaagtactcatttggtgcactttctcagccaggtccccactcagtccaacctttgctaaagcacatcaaaaaaaaggccaaggtataattgaattctggttagaaaacagctataaaggatattggggtataaattaagggaatgtaccaggtattagattgtattagggaattggttattttctcagatgtgatagaatgttattttggttatttaggagaatgtctttattgttaggtgatgcatgtgaaaatatttaaaggtgaggtgtcagaatgactgcatctttcaaaaactgtccagcaaagtctatagaaagataaaagtttaaaaaaatggcgaaatataaacagcgacgtgggataataagtgttcatagtacagtcgtccttcgttatctctgggagattggttctaggaccttctctggataccaaaatctttagatgttccagtttctgataaaatagcataatatttgcacataacctatgcacatcctctcctatagtttaaatcacctctagattacttataatacctactccaatgtaaatgctatgtgaatagttgttaacactgttattggttagggaataatgacaagaaaagtctgtacctgttcagcacagatgcacttgtattttctgaatattttctatctatggttggttgaaatcacggatgcagaacccatacatggatatggagggccgactgtactattctttgaactttacagtatgtttgaaaattttgattatgaaattggaaaataggtaaaatgtttttggtgtgtttgtctcagattgaacaacgtcattgtgtgtagtagtgtcctgtcaggagctagatggtattttctttgttctggacagatgagagaacaagagaggcaagcttcaggtggtggagagatgttttttatgcgcacacctcaggacctcacaggcaaagatggtgatcttattcttgcagaatatagtgaggaaaatggacccttaatgatgcaggttggcatggcaaccaagataaagaactattataaacgggtgagtctctgctcagaaaatttttttcccatacataattctgcttatgcttccataaacttttatgtacaaactttttgttattaacatagctgtagtgagacaaactg

SEQ ID NO: 5740 - DNA, 1238 bp, Homo sapiens
tcggaaggctgaggcaggagaacagcttgaacccgggaggcgtaggttgcagtgagcggcgatcgcaccactgcactccagcctggtgacaaagctagactccatctcaaaaaaaaaaacaaaaacaaacaaaaaaaaccctcttatttctgtgacatttgttataatgtctctttcttttcttctcttctcttctttctcttctcttcttttttttttgatacaaagtctctgttacccaggctggagtgcagtggcatgatcttggctcattgcagcctccgcctcctggattctctctcttcagcctcccgagtagctgggattacaggcacccgccaccacgcccagctaatctttgtatttttagtagagatggggtttcaccatgttggccaggctggtcttgaactcctggcctagtgatccgcccgccttggcctcccaaagtgctggaaatgcaggtgtgagccactgctcccaggcttcctctttcatttctgattttagttagaatctttcctctttttttcttaatctagctaagcatttgtcaattttgtggatcttttcaaaaaacaaactcagttttattgattttttctattgtttttctatttcatttatctctgctctaatctttaatatctccttccttttgatagctttaggtttagtttgttctcctttttctagttttatgaggtgtaaagttaggctgtttatttgagatctttctttaatgtacgcatttacagctataaacttttctgttggtactgcttttgttgcatcccataagttttggtatgttgtgtttttattttcgtttgcttcaacgtatcttctaatttcccttgtgacttctttttaaaaaaatttcaatagctttaggggcacaaatggtttttggtaacatgaatgaattatatagtggtgaagtctgacattttagtgcacccattacccgagtagtgtacattgtacccaatatgcatatttttatccctcacccctctcaccatccccctttccgagtctccaatgtcccttataccactctgtacgcttttgtgtacctatagcttagctttcacttaatggcctccagctccatccaagttactgcaaaagacattattgtgttcattttttatggctgagtattccacggtgtatgccacattatctttatccactcattggttgatgggcacttaggttggttccatatcctt

SEQ ID NO: 5741 - DNA, 1144 bp, Homo sapiens
agcaacacagcgagattccatctctacagaaaatttaaaaattagccaggcatagtggcatatgcctgtggtcccaaatacttgagaggctgaggcaggaggatcccttgagcccaagaggttgaggctgcagtgagccatgcccacaccactgcattccagcctgggcgagaccctgtcccaaaaaaaaaaaagaggaaaattcaagtcaattcagacttagcaggggtggggagggggctcacaggcattctcttccagtatgtatgagtccttgatccagtagagccttgaaagaatgtggaactacaatgagtagtcagggattctgatgccctgggagtgggttacctggactcagccagagtgctgcagatgggctgctggcctagcctccttgctggcctagcctccttcccggcctagcctccttcccttccccaaggctggcctggaatcattctggcctcggggtagaggggaagtggcagccatcagggcatttccctcctgatcccactgtccactggctgtttggggtcactgtcctcagcattctagtagcgccccctctgaactccagctgcttcttcacaactcactttatccaccattcgcattacgtatttttggcacccattttcctgtttaattaaatgtacatatacatatgtgtattttttagatcctaattatttgccagagttaagaggccaagggtatctttttgcctaacctggacagggaaattctcatgtttattcataaaatgaccaagatagcaccagttctcctacctttgagtccctcgctggaatataatccaacacaaaaaggaggcctgttctatgctggagttagtctgaggaaacactacactcggagagtctttgctgtgagttacattaatgcccctatccactagcagagcccagtaaatgacagcagcaaagtcttcatgtcctgagctcatttagccagagaaaagtttttaagctaagaagtcatagactctcaaggttattctcacagcattgctgattgtcccctctgaggcgtcccttagccctcagccttctcgcgaccctatagtttcaagctaactccctctcacctctcagtggctactgaccccacaagtcct

SEQ ID NO: 5742 - DNA, 1192 bp, Homo sapiens
aaggcacacgtaggttggaagtaaaaggatggcaaaagatatagcatgcatacggtaacaaaaagagagctggtgtggctatactaatagacaaaattataaatatatgtcacctaacaacagagcaccaaaacatatgcaacaaaaactaaagaagtgaaaaagagaaataagaaatttaacaataatagttggagatgtcaatactccattttcaataataaatagaacagctagggagaagatcaacaaggaaatagatttggacaacgtgataaaccaactagagcagaatatacattcttttcaagtgcacgtggaacattttctaggacagaacataagttaaatcacaaaagaagtctcagtaaatttaaaaggattgaaatcatacaaagtactttggaattaaattagatggaaaggaatgaaattagaaatcaataaaagaaggagatttgggtaattcataaatatgtggaaattaaacagcacactcctaatacaaataggttgaagaagaaatcacgttgcttcatggccttttggctaagttcaagtgtagtatctgtccttatcagtttaatatctgatacatcctctatctgaggacaatacattaaagggatttttggagcagggagatggaataaggactagtttcctccactccatgcatcaacctggtattgcagtacctccagaaatggtgcacccctcccaataagaaaaaaaaattaaaagaaaagaaatcacaaataaagttataaaatactccaagatgaatgaaaacaaaaacaaaacatgccaaaacttatggagtgcaatgaatgcagtactcagagggaaatttgtaactgcaaaggtctgcttaaaaataagaaagattacaaattaataacttaatctttcatcttaagaaaatagagaagagcaaactaaacccaaagcaagcagaggaaaagaaataataaaaattaggtggggcatggtggctcacacctgtaatcccagcactttgggaggccaaggcgggtggatcacctgaagtcaggagttcaagaccagcctggccaacatggtgaaaccctgtctctgctaaaaatacaaaaatcagccagacatggtggcatgctcctgtagtcccagctactcaggaggctgaggcaggagaatcacttgaacctgggag

SEQ ID NO: 5743 - DNA, 1179 bp, Homo sapiens
catcagttttgtgtgtgtgtgtgtgtgtgtgtgtgtgtgtgtgcgctgacttcaagatttccagcatctttttataagatttgtaattttactttctgacagatttgcattgaattgctaactgatatacctgacgatccatgagagacaaaatgactgaacagatggatggggttagattctggtatttaaaggagtgggttctttgagctgggactgctataagtggtcagttcattagcaaacacttgagggcagttggtactgcacaaaaggccattagtgaatttatttaaaagggggaccagaattttagagtaatagtggaaggggtagggttacgacagcttttgtatccttagaaaacctcaaagcctgggtactgctggggctaagataataaattctcagtaataagatctgcctatttcagcaaaggtctagtgcagtgtttttcaaaccagggactgcaacttgttgatggacattatatcaatttagtgggctacaatgagctttctttcatatcaaggtgggtttcgtgaaacttgttctggggtgtgtgtgtgtgtgtgtgcatgtatgtatgtgtttgtgtgtgtgtttgtatgtactaggtcacagtgtgaaatgtcaagccactgtagagtagaatgactgtgaacattaaagtaagacctggatgtaaattcaggctccaccacttactagttatgtgtgtaacctcaggattattccaggaacagcatgtgcagatgcttagaggtgtgaaagttggtggggtgggggggacttccaagtttgtcattaaagctggaaccataggttcctatagataaatggccagagataagtttggagaggtataaagagtccttgaatgccaagctaaacagcttggacttgatcctttaagtcagtggttcttaaccttctttggttgtggaccccactgaattttccacgaccaaaaaaggtttagaaccactgacctaaagaatgcatatacatcccctagaaaatctacatacacaaatttctccttgtagtttcagaaagtataaggatttcctgaagcccatgtatgggtcctagattaagaacttcagctttagacagtgagaagtcactgaaagaatttttagccaggaagaagtaacgttgtcagacatgcatttt

SEQ ID NO: 5744 - DNA, 1768 bp, Homo sapiens
atgttaagaggcatacattgtgtgttttaaatcctctgctactcattaggtatatgacctttgacaacttaaagtctctagacttctctgtttgtgagggttaaatgaaatcatgtatgtaaagtgctcacctattgcagtgcctggcacatgtcaagtaaaaggtaacccaagaagactcataagttcatttcccacaatataagtgaccactagcactatcaggtagcaggcagagttggcatgctttggttctatgtaagaaatccctaaggtaaaagtttataaatagaagagcatctgtgttggtattggtggttgttattattgtagtactataagtagtattcgtagtaacaatagtttattataattactaatgacactttttgattttttttatctttctgtgatgcttttcatgcctcttgtgcccctcactgtatcttgcctcttctactacttacttcctctgaatgtctgcctttgcttatctcttgcactcaagtgtgtatttctttgtctctttctttcttgtctttgctctttgttctctatctaaagtgtgtcttacccatttccatgtttctcttgctaatttctttcgtgtgtgcctttgcctcattttctctttttgttcacaagagtggtctgtgtcttgtcttagacatatctctcatttttcattttgttgctatttctctttgctctcctagatgtggctcttctttcacgctttatttcatgtctcctttttgggtcacatgctgtgtgctttttgtccttttcttgttctgtctacctctcctttctctgcctacctctcttttctctttgtgaactgtgattatttgttaccccttccccttctcgttcgttttaaatttcaccttttttctgagtctggcctcctttctgctgtttctactttttatctcacatttctcatttctgcatttcctttctgcctctcttgggctattctctctctcctcccctgcgtgcctcagcatctcttgctgtttgtgattttctatttcagtattaatctctgttggcttgtatttgttctctgcttcttccctttctactcacctttgagtatttcagcctcttcatgaatctatctccctctctttgatttcatgtaatctctccttaaatatttctttgcatatgtgggcaagtgtacgtgtgtgtgtgtcatgtgtggcagaggggcttcctaacccctgcctgataggtgcagaacgtcggctatcagagcaagcattgtggagcggttccttatgccaggctgccatgtgagatgatccaagaccaaaacaaggccctagactgcagtaaaacccagaactcaagtagggcagaaggtggaaggctcatatggatagaaggcccaaagtataagacagatggtttgagacttgagacccgaggactaagatggaaagcccatgttccaagatagatagaagcctcaggcctgaaaccaacaaaagcctcaagagccaagaaaacagagggtggcctgaattggaccgaaggcctgagttggatggaagtctcaaggcttgagttagaagtcttaagacctgggacaggacacatggaaggcctaagaactgagacttgtgacacaaggccaacgacctaagattagcccagggttgtagctggaagacctacaacccaaggatggaaggcccctgtcacaaagcctacctagatggatagaggacccaagcgaaaaaggtatctcaagact

SEQ ID NO: 5745 - DNA, 1329 bp, Homo sapiens
ttttaaagctagagaatagtgttgaataagtgatgttccatatattcctgtttgacattgacataaaggtttcctcatgatacagtaatccctgatcagggatctggaagcctgtattcatttaaggtactcaggtttaacatactgggtgcttttcacaccatactatacagtaccatgcaaagtgctttcaagactgcaaatttggcttagatcccctttagtgagctcctatgctatagtaaaggtagatagccaattattaaaaacagtcaagacaattgcacctctaagcagtagtagcagttgccacaccaccttgaatcttgaagtattttcagcaacaggatgaccattagccacaaatttagtgtcagcccttaaggtcggtattggtttgacccatattttcatgtagttctttttcttcacttgtctaatcttcccgtgtactgccagggcttgtcattagaggactttagggagaccaagcaggctagaaagtagagacaggagatacctatgtctaatgcttcagtttatacttcctaggtttttttcattggggtttttgtaactcttttggtatcctaccggtgctttggtagcctactgaaccctgtctttcttcttaaggacattctgagcatgtgagacctgaggactgcaaacagctataagaggctccaaattaatcatatctttccctttgagaatctggccaagctccagctaatctacttggatgggttgccagctatctggagaaaaaggtagtttggggaatttattgttgtagtgcttctgtctttggattgaacttcccacaactctcctttttaaagcagaacacagctgggcatggtggctcctgcttgtaattccagggctttgggaggttgaggtggggggatcacttgaggccaggagttgaagacccatgtctctacaataaaataaaattagttgggcatggtggtacgtgcctgtagtcctacctactctggaggctgaggcagcaggattgcttgagcccaggagttcaaggctgcagtgagccatcattagccactgcactccagcctaggtggcagagcgggacccagtctcttaaaaagaaagaaaagcagaacgtgagccagttttcatcaattcctatactttttcttttgcatgtacacatacattttaactttacataatgagttcggcctgtttcatttatccctcagagctgggctccagtgaggtctgtaagggcaagcatacttgatccccaatgaagaatgagagatgcaaagcactaaattatttcttttctcaccacac

SEQ ID NO: 5746 - DNA, 2237 bp, Homo sapiens
ccctgaaaatgacattttgtgatttggaaaattttcaaaagtctaatgaaggaaacttttttggcatttctttaaatgattattgtcatttcttttctgacttttccctttataaaaccttaacatgtaggattggaggaagttttctgaccattttctcatatcctctttcagctttatctttctgtaacttccatttctctagccacctccctaaattacagaagactgtgagacccagggctgctgtgattaggcattcataatttcttttcagggtgtttgtgccctgattatcaaatgtacagcttgaagggagttcatgtcttaaagtaatgaattaagagttgacctttgttgactgctaaaatattcttatatgtgaaagcatcctggaaaaatacgttaccagcttaaagagaaagaaactaatgattatatctgaactgagctaatgcctcttctcttcccccaaaccttatcagtttggatggcaaagagtaatgatgtgtcagttaaacagagctaatgccttcctctgccttgtcttaaagactggattgggagaaaattgatattctcactaccatattttgggctgtaggcaagtagcattttacacaggtttccttcaaaaatccaactcaagttggagctcatgtatttaagacatagctggcctgctgaatttaacaagttaaacttcagtggccatgtacagttatatatcactatatatatgtgtattaggctgtcgagttggtcatgtttttgttggtgacttaggctttacttgatagctcttccttgacctttccaaattgagtactgatacatggagcttgggcttcttctgcatcttatacaaatgagtttggtaaagaagcctctcctttactgttttgatgtttatattagaaataacttttgattattttttttcatgttaggatgagaaactgaaacaaaatgtaaatttgaccggtgctagacttcttaaattatgggtagacttaaagtattattttccttaaccaattagaatgctagtcttctagtgttcccggaaacatgagaggttatgcagtagacccaagcaataccctcttattacataatcaagtgcgtataagaatttaaaaatagggatatgactggaacatcactgtactttaccaggtcccattataaaattatctatgttactttacccatagctttgaaaactagtggcatagtatattttatagtatgctgttagtgtgattggcattgaacagtgatgggatataatcactctacaatctatatgttattaaagttttccagccttatagatctcccttgactgaaaattagctactaacttacgacttattttttacagcagattgactaggtctttccaggaaatctgttgatgtacaaaaacaaagtttaattgctaatgtttttttaaaaaataactttttgatattacggatacctggttatttgggccttgtatattttaacatcaaaattacctattataaatccatataaacagaaaagaaagagagtaagtctttagatcagatctgcaaacaatgatggtacgtactgtagaaaaatctggaacatagacttaccagttcttaggttccattttgcttgctttttaaaaactgtgtcttataagtcttcagcaactggttgggagatttttagaaaaaataaccttttaatgttagaacagtgtagagatttacagaatgattctgaagatagagtttctgtgtacttcacacccagtttttcccagtgttaacattttacattagtttggtacatttgtcacaacaaaccaatattgatacattattattaactagagtccatattttattcagatttccttagtttttccttaatgttctttttgtgttccaggatcccattgaagataccacgctgcatgtgtccttagtagtcatgtctccttaggctcctcttggtaatgacagtttctcagactctttgtttttgatgaacttcacagttttgaggactaatggtccagtattctatagaatgtctctctattggaatttgtctgatgttcttctcatgactagattgggtttatgagtgtttaggaggaagaccacaaaggtagagtgccattcttatcacttatcaagagtacatactatcaacatgacttatcactgtttatgttatccttaatcacctgt

SEQ ID NO: 5747 - DNA, 1188 bp, Homo sapiens
acatgcataattgcatttatgttggttcttgtgccctagacaaggatgccccacctcttttcaatagtgggtgcccactccttatgatctttacatttgaacagttaatgtgaataattgcagttgtccacaaccctatcacttctaggaccattatacctcttttgcattactgtggggtatactgtttccctccaaggccccttctggtggactatcaacatataattgaaattttcttttgtctttgtcagtagattaaggtcataccccatcacctttcctttgtagtacaacagggtgtcctgatcaaccaaagtcctgttgttttggactgttaatatgtgcaattacatttgctcctgatctgtgcactagataaggatcctacctactttcttagtgtttttagcaggtagtgcccactactcaagactgtcacttggaatgttcatgtgcacaaactcaattctctaagcatgttcctgtaccacctttgctttagagcagggggatgatattcactaagtgccccttcttttggacttaatatgcattaatgcaattgtccacctcttcttttagactaagagttgatctccacatattccccttgcatcaggggcatgttaattatgaatgaacccttttcttttaatattaatgtcataattgtatttgtggacctgtgtaggagaaaaagaccctatgttcctcccattaccctttggattgctgctgagaagtgttaactactcataatctcagctcttggacaattaatagcattaataacaattatcaagggcactgatcattagataagactcctgcttcctcgttgcttacatcgggggtactgacccactaaggccccttgtactgttaatgtgaatatttgcaattatatatgtctccttctggtagagtgggatattatgccctagtatcccctttgcattactgcaggggctgctgactactcaaaacttctcctgggactgttaataggcacaatggcagttatcaatggttttctccctccctgaccttgttaagcaagcgccccaccccacccttagtttcccatggcataataaagtataagcattggagtattccatgcacttgtctatcaaacagtggtccatactcccaacccttttgcattgcgccagtgtgtaaaat

SEQ ID NO: 5748 - DNA, 3345 bp, Homo sapiens
cctcaatgtattactcctttctagcttctttggttcaaaagtttggtggaggagttacaaattctggtttgaatgatatatttggatactttatcaacacatcaaagctctacctatcccttcccccattctcaaaaccaagctgaattaacatctttacatttattatgcagtttatggaggattttagcattaattattgcttgatttactcaatgtccccatgttatagatgagaactggaaaacccattgaagttgtgactcctggtctagaaatgaagtctacttccagttaatgttctttctggtatgtctttgctttcttgaaatttcccttttttgtccttactgggtaaattttgaaccaaccaaatcacaaagatgtccggctttcaatcttctaggccacgcctcttatgctctctccgccctcagcccccccttcagttcttaaagcgctgcaattcgctgctgcagccatatttcttactctctcggggctggaagcttcctgactgaagatctctctgcacttggggttctttctagaacattttctagtcccccaacaccctttatggcgtatttctttaaaaaaatcacctaaattccataaaatatttttttaaattctatactttctcctagtgtcttcttgacacgtcctccatatttttttaaagaaagtatttggaatattttgaggcaatttttaatatttaaggaatttttctttggaatcatttttggttgacatctctgttttttgtggatcagttttttactcttccactctcttttctatattttgcccatcggggctgcggatacctggttttattattttttctttgcccaacggggccgtggatacctgccttttaattcttttttattcgcccatcggggccgcggatacctgctttttatttttttttccttagcccatcggggtatcggatacctgctgattcccttcccctctgaacccccaacactctggcccatcggggtgacggatatctgctttttaaaaattttctttttttggcccatcggggcttcggatacctgctttttttttttttatttttccttgcccatcggggcctcggatacctgctttaatttttgtttttctggcccatcggggccgcggatacctgctttgatttttttttttcatcgcccatcggtgctttttatggatgaaaaaatgttggttttgtgggttgttgcactctctggaatatctacacttttttttgctgctgatcatttggtggtgtgtgagtgtacctaccgctttggcagagaatgactctgcagttaagctaagggcgtgttcagattgtggaggaaaagtggccgccattttagacttgccgcataactcggcttagggctagtcgtttgtgctaagttaaactagggaggcaagatggatgatagcaggtcaggcagaggaagtcatgtgcattgcatgagctaaacctatctgaatgaattgatttggggcttgttaggagctttgcgtgattgttgtatcgggaggcagtaagaatcatcttttatcagtacaagggactagttaaaaatggaaggttaggaaagactaaggtgcagggcttaaaatggcgattttgacattgcggcattgctcagcatggcgggctgtgctttgttaggttgtccaaaatggcggatccagttctgtcgcagtgttcaagtggcgggaaggccacatcatgatgggcgaggctttgttaagtggttagcatggtggtggacatgtgcggtcacacaggaaaagatggcggctgaaggtcttgccgcagtgtaaaacatggcgggcctctttgtctttgctgtgtgcttttcgtgttgggttttgccgcagggacaatatggcaggcgttgtcatatgtatatcatggcttttgtcacgtggacatcatggcgggcttgccgcattgttaaagatggcgggttttgccgcctagtgccacgcagagcgggagaaaaggtgggatggacagtgctggattgctgcataacccaaccaattagaaatgggggtggaattgatcacagccaattagagcagaagatggaattagactgatgacacactgtccagctactcagcgaagacctgggtgaattagcatggcacttcgcagctgtctttagccagtcaggagaaagaagtggaggggccacgtgtatgtctcccagtgggcggtacaccaggtgttttcaaggtcttttcaaggacatttagcctttccacctctgtcccctcttatttgtcccctcctgtccagtgctgcctcttgcagtgctggatatctggctgtgtggtctgaacctccctccattcctctgtattggtgcctcacctaaggctaagtatacctccccccccaccccccaacccccccaactccccacccccaccccccaccccccacctccccacccccctacccccctacccccctacccccctctggtctgccctgcactgcactgttgccatgggcagtgctccaggcctgcttggtgtggacatggtggtgagccgtggcaaggaccagaatggatcacagatgatcgttggccaacaggtggcagaagaggaattcctgccttcctcaagaggaacacctaccccttggctaatgctggggtcggattttgatttatatttatcttttggatgtcagtcatacagtctgattttgtggtttgctagtgtttgaatttaagtcttaagtgactattatagaaatgtattaagaggctttatttgtagaattcactttaattacatttaatgagtttttgttttgagttccttaaaattccttaaagtttttagcttctcattacaaattccttaacctttttttggcagtagatagtcaaagtcaaatcatttctaatgttttaaaaatgtgctggtcattttctttgaaattgacttaactattttcctttgaagagtctgtagcacagaaacagtaaaaaatttaacttcatgacctaatgtaaaaaagagtgtttgaaggtttacacaggtccaggccttgctttgttcccatccttgatgctgcactaattgactaatcacctacttatcagacaggaaacttgaattgctgtggtctggtgtcctctattcagacttattatattggagtatttcaatttttcgttgtatcctgcctgcctagcatccagttcctccccagccctgctcccagcaaacccctagtctagccccagccctactcccaccccgccccagccctgccccagccccagtcccctaaccccc

SEQ ID NO: 5749 - DNA, 1220 bp, Homo sapiens
caccaacccctcatacagtcaaatctgcataaaatttttaattccaccaaaacttaactaatagcctactgttgactggaagccttaccaataacatagtcaattaacacatactttctatggtaatttattatctactatattcttgcaattagctagagaagaaaatgttattaaaaatcagaaggaagagagagtatatttacgattcattaaatgtaagtggatcatcatgaaggtcttcatcctttttgtcttcatgttgagtaggctgaggaagaggaggggttggtcttgctgtctagggagtggtagaggtggaaaagatggaggaggcaggagaggcagacatacctggtgtaacttttactgaaaaaaaatacataaaagtggacccacgcagttcaaaaccatgttcaggggtcaactgtaatatgtgatctcttgtgtctgacttctttcatttagcataacatcttcaacattcatccatactgtagcatataatttgtacttaattcctttttatgattgaataatctatatatgaatgtaccaccttttgttcatcagttgatgaatgtatttacatgcatttaaataaaatttttttttttgggttttttttttgagacggattctcacccaggctggagtgcagtggcacgatctcggctcactgcgacctccgcctcccaggttcaagcgattcttctgcctcagcctcccgagtagctgggattacaggcacacgccaccatgcccggctaattttttttgtatttttagtagagacggggttttaccatgttggtcaggctggtctggaactcctgacctcgtgatccgccctcctcggcctcgcaaagtgctgggattatagtcgttagccaccgcacacagccaagaaaatgtatttaaagaaaatatggggctgggcatggtggctcacacctatacttccagcagtgtaggaggccgaggccggcagaacggttaagcccaggagttcgagactaacctgggcagcatgatgaaaccccatctctccaaaaaatacaaaaattagctgggtataatggcctgcacctgtagtcccagctacttgggaggctgaagtgggaggatcgcttgagcctgggaggtagaggttgcagtgaactgaaatcacgccactgcactccagcctgggcaactgggtgagggtctgtctcaaaaaa

SEQ ID NO: 5750 - DNA, 1070 bp, Homo sapiens
ggttctatgggttttgacaaatgcacagtcatgtatcttctacactagtaccatacagagaagttctgtcactttaataatttctcttggtggctctttttgtattcaaccccttaccccatactcaatctctggaaaccatcaatttattcttcatccctatggttttgccttttccagaaggtcatataagtggaatcaagcaatatgtagcccttttggtctggcttctttcacttagtaaaacgcagtcaagattctcccatgttttgtggataattatttcattcctttttatcactgagtagtacttcattgtgtggatgtaccacagttttattatccattcactaactgatgaacttgtaagatgtttctagttttggtgaatatgaacaaatttgctataaactttcaggtataagttttgtgtgataaatgctcatttttatagggtaaatgctttggagtgggaatgagtgccagactgttttctaaagtttccctagcattttgcattccaattacaaatatgtgagagttccagtagctttgtatctttaccagtatttagtaattttgtattatacatatatatgtatgtaaatatatatatatattcatttaaattttaatcattgttagaatttgtaattccccaatgatatatggtattatcttttatttgtttataattgacacataattatttatgggatacattgtgatgtttcagtacatgtgtacattgtataatgatcaaatcaggatatcacctcaaaccttatgatgatcttacagttaaagatgatatattcttgcaaagtgtctgttcagatcttttgctcccctttttattggattattccttttcttactgtttttatatgttttttaatatattgatacaaatcctttgtcagatacattatttggaaatagattttcctagtctgtgacttgtcttttcattctttgaacactgacttttttagagcaaaaattttaattttgatacaattcactttatcaatttttttacttttgatgtgcaatgtaagaacacttgt

SEQ ID NO: 5751 - DNA, 1130 bp, Homo sapiens
gtaattgctgctaattgctccctgggttggaccagagtgctcattgtctgaacagaaacctcatcctcacagtctgaggtttgctcctgtggctgatatttaaagttttcccctttcaactttactccagctatccccttacctgcactgacaggtaatcctccaccgtcctgttcacctctcaccaggttcatattttctttatcttatttattgtacttaatcattattttgtgagaagcttttctgattgtagatgtgacaaccagaatacaagttaaaaccacttatccagcgccttacagtgaatcatttaacatgagaaaaaaattgagtgtgtttgcagaccatggggcagaaggaattgagaagggagtcattgtagatgtgagaaagagagagatgataatagatggaagatgatcttgaaagatgatgcaggtgaagctggaagggtgaaatttatggctctagaacacatgcaggtggagggttagccttaggtaagtggaactacctctttgctggagcacagagatagggataggagtaaggaagaggacttggcaagggtggtgaagatttgtaattgtagaggtggatgatggggaggaagctgaccaggaacaggaatatgaagacaaaagctgctggaacagaaatactagagggctaaatatgaaccagagtccctaaggaatattcaggccaaaacgctggagtgagaccattaacaggagagcttatggtatatcaaagtaagaaatgagtttgaaactgggttagaagctcaggaaaatatgaagtggttttggggcattgtcactagcagtatttggttgccttgattgattgaggggtggacagctagcaagagacgagttacacagaaatggatttaagaatccaaactaaggccgggcgcggtggcccacacctgtaatcacagcactttggaaggccaaggtgggcaggtcacctgaggtcaggagttcgagaccagcctgaccaacatggtgaaaccctgtctctactaaaaatgcaaaaattagccaggtgtggtggcacatgcctgtaatcccagctactcaggaggctgaggcaggagaatcacttgaacccaggaggcg

SEQ ID NO: 5752 - DNA, 1222 bp, Homo sapiens
tttttaattgttgaaaaaaaatcagaattataaaacttaattacatcaaaattacaagaaattcaagtgtcagtgtccataaataaagttttattggaacacagtcacattcattcatttttttttttattttgagacggagttttgctcttgttggccatgctggagtgcaatggtgtgatcttggctcaccgcaacctccgcctcccgggttcaagtgattctcctgcctcagcctcccaagtagctgggattagaggcatgcgccaccacgcccggctaattttgtatttttagtagagacagggtttctccatgtcggtcaggctggtctcgaactcctgacctcaggtgatccacctgccttggccttccaaagtgctgggattacaggcatgagccaccgcacccggcctcatactcattcttatgtgtgtcatgtatcgctgcttttatgctacagtagcagaatggagtaattgggacagagaccatatagcctacaaatcctaaaatatttgctgcttggccattaataaaacatttaaagtcagactattacaaaagttgccaggtccctcacagcatcatctttgatagctttaaatgcctaattggcagccttgtcatggactagtagggactattatcattctgttctcttatgtttggtggggattcttatttccttactccctactgtgacactttaaccagttccagaaaactcattcttggtgagcttcagttgtggctgaaatccctttagcaatttctataggctcttgtattgttaagaaccagacatctcttgggccagccaagcaattgggaccacctaagcaatttggaccacccatggctgggcttggtcagcctctaagatggacagggatctcataagaattcaagtaaggaatttgagtaaagacaattaaaatttaaagaaaaattttaattcagtttcctgagtttggaaattagttccaagacagatctgggaatgtcagcgcaagagtttgtgtcatccatcctagtataccacctttaacattttttaattcctctgtgtgtttgttcagtgccttcctcattgttgactcaacctttactttacctcctagcttagtctgcattctgcttccccttcaattttcagctattcataattaaatgttgcttgttgccccagtgtatgagatagtgcccaaaggtatttatt

SEQ ID NO: 5753 - DNA, 1099 bp, Homo sapiens
ctcactgcaacctccgcctcttgggttcaagcgattctcctgcctcagcctcctgagtagctgggactacaggcgaccgccattacactcagctaattttttgtatttttagtagagacggggtttcaccatgttcactgggctggtctcgaactcctgacctcatgattcgcccacctcggcctcccaaagtggtgggattacaagcatgagccactgtgccctccctacaggttttaaaatttattattatctaaatattcattttaaatgttaattttagtgtacttctttgattattttctttagagaaatttctgatttcagaaccaagtttattagcattcactgtatacattagcaccattaaaactagctagacccaagaagcagtattgaatgggtaccccttctttactttcctctgattcactctactctggtgctcacagctaagtaagtatgtacagcaatggcctgtcatttggtcgattatcttttgtgctctgaaatgtctttgttttttcatctgctctcaatacctctgtgctctgatcctttgtatataagggtaaccatatttgttctttcctgtgaaataataattcttttccttccattcagagtagctgcctgactcatacaatgaataaagtcacatagactcaaagagtggagatggaggtcggatgtggtggctcgtgcctgtaatcccaacactttgagaggctgaggtgggaggatcgcttgagcttgagcacaggagtttgagatcagtctgggcaacgtagtgagatctcatctctgccaaaaaataaaaattagctgggtgtggtggtgcatggctgtagtctcatgtagtcccagctacttgggaggctgaggtggggggtcacacatactttttgttgttactgcttcatcattggttctgatcactcagtgttctttcccttacaccagatcataatacagtattctgactaggcaacttagctcagtttattacgaatagccttaattaatttggtaaattactatgaatgaacatttcattcattctgctaggtctaggttttgccagctgttccattaaggg

SEQ ID NO: 5754 - DNA, 1225 bp, Homo sapiens
tgtttctttggctgagtcatttcctatatctaagcctgtttcctcatctgtagaatgacaaagctgtactctgaggtttgtccttctggctctaacattttgtattgcttttgttaatggctcgaaagctccctggtgcaggaggtccttctcttgattgcattttaagaaactcaacatttcgaattattgatttacctatcagcaagaggtggtttactttcctttcctgtttgagcgtttaaacaagcgacattactcatttcctttctagataggattggagttaataaaggctttcttggctttctcctatgtttttttttttttttccccgattgcttgtttgtcattgtgttgttgggctcacttcttattattttatttgtgctttcttttagtaatggtgttatcttggtgttcattatgtactttggaagacttagtatatgtgggttttggggtcctatttattttctcatgcgccagttccgatcattgtttgtttgtgggtttttacccttcctcccatattgttttgctttctccccctctcccttccctccctttcaggaaaatggaggagtggctccattacttctggctctgcccaggttttctgccacaagagtggcacggcctgtgcctctaatgcttctgatagagtcgtgactgctttggatgctacacctgccccaagatgtaatattgagcattgagattccaggggcagtacatcgtcctggaaagcctcaagaaaggaaacttcagagcaaacagaatcaactagggatcatgactatacatccagcatgatccagcatgggtccagccgaggcctccaaaatgatgctttgccagcctcagctggttctcaagtgatgatatccttgaagtctctgtggcccgtgactccagagttaaggtagtggagtttccctttaaagcatctcacagcaggctttgtagatgggacacatctcacttcaacatgcttgctgactactcaggttgaaggtcagcctcagcccttaggtccgttaaattaagttctaattttgaaatgtaggttattatgttataggctaggtttatggtagactgggtctttgacatattggacttcagtaataacttatgcaaaatgattcaacttattctttttagggcttaatttacatagctataaattaggttttcctttggacaaaaggtgttagagggc

SEQ ID NO: 5755 - DNA, 1151 bp, Homo sapiens
ctgttctatgttttgctgttattttagtctttattctcttcctttaggtggagaaacaaagtaccaatttgaagggattttttttattttgtcttttggtttctgtcagtagaaataaccatatgtgctaaccaaatttctgtgaagaatgttttcatggttatcattatatctaactataacctcccccatagttatgaagagtaacctgaaatgccactattgtggaaataggataattgtaattgtgaaaaaataattttaaggaaatcttacaagtattacattaaaaagatactatgactgccacctgccatttaccttctaataaccctgccatgtggtttgcagaaagagatggatatagtagcctcagaagaaatattttatgtgggttttttgtttttcgttactagatttcatggatgaggggatatggttgaccttttactttttaatggagcagccagtttttgttaattactcacttgtaaattgtgagattctgaattccttacctgctattcttgtacttgtctcaggccaaatctatgctgtggttcttatgagacttgtatgaagatgccctgatttgtacagattgaccacgggaatactactgccatgtaatctgtatagttccagataatttgtcatgaacattgacagaatgacaattttttgtatttgctttttctccctttaagagcacattcttctgtaaggagaaaggcagcattctggctaaaatgtgtagaaggtaatttactacacttataaaatagtgtgacttttgtgaaaattttgaattagctttcatatgaagtgccttaagtagactcttcatttacttttctggtaatggtttaaatatcatttgttatgcatttttaagatacagttcagaatgacacattgtagtggcaaagataaccaaatgtctggctgtttgctttttgaccatatcaataaacttttacaatctaaattctgagtttttgattaccatctaaagaggagtgagttttaaacactaaactagaattgtaaaattaggattttacattttgaagttataattaaattaatttaaatttcatattgtcctaaggacagtttgatgggacagtttctttaagtatttctggatt

SEQ ID NO: 5756 - DNA, 1181 bp, Homo sapiens
tgggcaacagagtgagactctgtctcaaaaaaaaaacagccaggcatggtgacgggcgcctgtaatcccagctactctggaggctgaggcaggagaatcgcttgaacccaggaggtagaggttgcagtgagccaagatggtgccactgcactccagcctggatgacagggtgagactcttgtctcaaaagaaaaaaaaagaaagacaatgttcatttatggtttgatggattcagcctggccaacatagcgaaacctcatctcaacaagaaatacaaaaattagccagaaacggtagtgtgcacctataattccaactactcaggaggctgaggcatgagaattgcttgaacccaggaggtggaggttgcagtaagccgagactgccactgcactccagcctgggcaacagagcgagactctgtctcaaagaaaaaaaaaaaaaaagaacagaaaagaaaagtatggtttgatggattaacaaattattataccttagaaaattttcagtatcttgaatcagttcttctcactagtactttgaaattgaataatggagcaaaagagcaattaaaattgtaaagtattaattagttgatttggggtttgttggtcttttagctttgtcttaaacttttaaatatataagaagtttaagaaattagaaaattgtcattttacctctgctttaagactgagcatcagcctaaggtttagtatacatttggaacggattacaatcctgttgggatatagaatgtcttgtgtttggttattaggatgcaaaaagtgaacttttttcagagtcagacatgtatacagattataagacagtgacttaagtgctgtgtaccagaaatagtgagaaaatgaataattttgtcagaggtaaggaatattagaaaaggcctaaccactccccacccccccccccttttttttttgagtggagtctcgctctgtcacccagactggagtgcagtggcaccatcttggttcactgcaacctccacctcctgggttcaagcgatcctcctgcctcagcctcctgagtagctggaattacaagtgtgcaccacctcacctggctaatttctttatttttagtagagacagggtttcaccaggttggccaggctggtcttgaactcctgacctcaggtgatccacccatctcagcct

SEQ ID NO: 5757 - DNA, 1223 bp, Homo sapiens
ttacagtaacattttgagttctgtgatgaatagttctaggggaagggatggaactttcgacatgtaaagtccattgttttaaatgctaaccccatccccaatatttttgtggaacgtgaggctttatgaaaggtttatcagaaatagaatattctaaagtcacttttatggcttatttcaaaaactagtgtgaaagtattttcatgcttttttgtttctcatcttttagcaaagcttctttaccaagttttgattaaattgcaatataaaattaagttttttcacggtgctatattttgtggaatatgggtagcactcaggtttctttcttttttcttttctccttccttcttccttcattccttcattcctccctcccccctccctccctccctctcttccttccctccttccttccttcctcacctcggcctcccaaagtgctgggattacaggcatgagccaccgtgcccggcctatatacccttattcttgattatttcttttttcatcttttcaatcctgcttacttttatcctcacttttctttctgccatgaaaactgcacctaatttaccacacttaagattggcaatttttgattcattgatgggagaagtacagtagaaaggccctgcagtttagaattaagttgtgtttgtttatttacatgtatgcccatttcttctaaattaaatctagaatgtgagactttgacatataaaagcatgataagtattttcttaaaaaataagactattgatacataatgaaaccaccattggtaattgaattttaaaatgatatgcaaaaatatttagaaatccagttgggaaatgtgtttttgcatatgtcaccagatacacattaggcagtactacaaatgttaattcttaaacaatactgtggtgatggcaatcagtaatttatttctttgtcctgtaacttatcattcttgtcttttgtaatgtcttacacagtattaacataactgtaccttttttttgttcttggtatccatacattttaagatggaaaatcagttcatagttgatatgatattgtatatgggcaaaatgtccgttaaactaaaattcagtaaaaaaggtaatataaactggcttgatttataaaagatgttttgtttggcagttatcagtcattataagcaattatcttcaaagacaaaaaaactggactaatttgttgccattctttatggg

SEQ ID NO: 5758 - DNA, 1199 bp, Homo sapiens
ttacaactttttctactttatagtttattgcagaactgtgaaataacatgaagaagaaaataaagaagattcactaacttagcacccagagaaaaacaagcctaatattttcatttattttcttagtaattcatttcccatgagcatgtttatgtattagaattgtaatatgtagagtgagttttaccaggatcttttcaattttcatattgtgataatttttacaccattatatattctttgaaaatataattttgatggctacctactagttctatgatatggacatttcacaatatattttaactacatttaattactacaaagtcagattaattacacttagtgcaggtatcaacacgattttacttttctgaaatagaaactctcttgttaattggaatagcctattttcttctagtgaagtaaaggttcctgatatcataacctaggcaggtggcaaacagtatattggtagctaaagtatatattaaactaattgtaaatttgaagtcttcagacagggcttgctcacttacattttatcacaatcatctatcacaacactatcattttactactatttaatagtagagtgttgtgatagaggattgtggaattatactactataaaattataaagcacaattttatcacaacactctatcattttactactagttagcttacttttacttccttggcactgaaggggtttgcttatgacttttgatagagctataagacagataaaatatgtaattctttatttaaataaatttctactttactagcctgtgaaatctttaaaaacagggaccacagcaaaatccatctctgtgtgttgtataatgtctctgatcaagactgaatcccaggaatgatagaaacaggcctgacgttcatcatcatcccagagacacagctagttaaaaactaatattttgcctgagttgtagccacagacctttctaaattgatttgtaatgttcttgcctgcattccagtgagctaagtcagaaaacaacatggatcttgcccttcttctacatagcctcttctgggttaactgatggaaaaagcgtaaaaacaggaaagttacaatgctacaaaaggaacagacaggaatccttgcctctgataaaacttaaagtatttagggataaagagtgccttcctgttctctctacagctaggac

SEQ ID NO: 5759 - DNA, 1189 bp, Homo sapiens
ggagccctccaagtctctaggaagttccaaactttcccgcactttcctgtcttctgagccctccaaactgttccaatctctgcttgttacccgcttgcaaagttgcttccacatttcgggtatccatatagcagcaccccactacctcagaaccaatttactgtattagttccttctcacactgctatgaagaaataccagagactgggttgggaacgcagagcggacagattcgattcagcggggttccgggccgcgctgtgctatgaagcaggtcaatgagctgaaagagaagggcaacaaggccctgggcgtggaaaacatcgacaatgccttacagtgctactctgaagccattaagctggatccccacaaccacgtgctctacagcaactgttctgccacctatgccaagaaaggagactaccagaaggcttacaaggacggctgcaagaccgtcgacctaaaagtttgactggggcaagggatattcacgaaaagcagcagctctagagttcttaaaccgatttgaagaagccaagtgaacctacgaggagagcttaaaacacgaggcagataaccctcaactgaaagagggtttacagaatatggaggccaggttggcagagagaaaatgtatgaatgctttcaacatgcccaatctgtaacagaagttggagagtgatcccaggacaaggacactgctcagtgatcctacctaccgggagctgatagagcaactataaaacaagccttctgatctgggcacaaaactacgagatccccggatcctgaccactctcagtgtcctccttgaggtcgatcggggcagtatggatgaggaggaacaggttgcaacaccttcaccaccaccccttcccaaaaaggagaccaagccagagccagtggaagaagatcttccagagaataagaagcaggcactgaaagaaaaagagctgaggaacgatgcctacaagaagaaagactgacagccttgaagcattacgacaaagccaaggagctggaccccagcaacatgacttacattaccaatcaagcagcggtatactttgaaaagggcgactacaataagtgttgggagctttgtgagaagtccattgaagtggggagagaaaacagagaagactatctacagattgccaaagtgtgtgctcgaattggcaactcc

SEQ ID NO: 5760 - DNA, 1191 bp, Homo sapiens
caagctggatattactgattactctgaaatgcaaatagtgctattttgttttacagctatcatttaaaaagccatgtactcattaagataaatatgtgcagcatgaacaacaaaaaaatgagaaagaaaatggacattatttgtattttgtaggctctctgatatggaactgaatgcactaatcttcaaatactaatgagcagcaaaaagcaatttgccagtgcacaattaacttctgactggcttctgttgatatgtagtgctataaccccacaccaggtgaacttcccattttttgagattttatttgaccagtatttataattgtggccaaataatgagatgattattatgaaataatgttatgttggagtaaatcatacttacatggagctcttattatagtttctctatttaattgtctgccaccagggccttgagcttttattttcctctttccccttctgctcttcttgccttttcccatcattgaagaaacaagggcctccctctcaattctcaatttggaaacctgctagtggcatgtcttagttacaaacactgtgttttatatcatgtggttatgttcgtcacttatctcttctttctgttaacttttattctattactgtgtcatgtcatttatatgtatgtacgtgtagatacatatacatgcatatatatttacattcagatatatatgcatcccccatgcatgcatacatatcatacagtagtggagaggaggttgtaaagcataaagtttacctgttttgctcatggtttattgaggcagattttgtcccttagctcagatgagaaaatccctactccacagtcataagctgaaattctcaatccagccagatattttgcaaatgtgcctctggtgcctggggagattgagttaaagcatatatggctcagtgagaccaatcattgtgattggcaaatgaactcaaaacactatcttagtaatgttaaggcagttgggaattttatttccacaacatgcaaactaatactctgaatgagtagcagattggaatatggtaggaaactttgaaattgtgattctcaaataatttagcctaatgcttgtttcatagaattatgaaatcttgtttattgtaaggaaccttagaggatcatctaatttaatcactttttctaatgcagcggcacgttgta

SEQ ID NO: 5761 - DNA, 1159 bp, Homo sapiens
tccatatggcgttgttctggattcccatcgtaacttaaagggaaactttcgcaatgtccggagcgcttgatatcctgcaaatgaaggaggaggatgtccttaagttccttgcagcaggaacctatttaggtggcaccaatcttgacttccagatggaacagtacatctataaaaggaaaagtgatggcatctacatcataaatctgaagcggacctgggagaagcttctgctggcagctcgtgccattgttgccattgaaaaccctgctgatgtcagtgttatatcttccaggaatactggccagagggccgtgctgaagtttgctgctgccactggagccactccaattgctggctgcttcactcctggaactgtccgtcgctaaccagatccaggcagccttctgggacccacggcttcttgtggttactgaccccagggctgaccaccagcctctcatggaggcatcttctgttaacctacctaccattgctctgtgtaacacagattctcctctgtgctatgtggacattgccatcccatgcaacaacaagggagctcactcagtgggtttgatgtggtggatgctggctcgggaagttctgcgcatgcgtggcaccatttcccatgaacacccatgggaggtcatgcctgatctctacttctacagggatcctgaagagattgaaaaagaagagcaggctgctgctgaaaaggtaatgaccaaggaggaatttcagggtgaatggactgctccagctcctgagttcactgctactcagcttgaggttgcagactggtctgaaggtgtgcgggtgccctctgtgcctattcagcagttccctgttgaagactggagcgctcagcctgccacggaagactggtctgcagctcccactgctcaggccactgaacgggtaggagcaaccactgaatggtcttaagctgttcttgcatgggctcttaagcaacatggaaaaatggttgatggaaaataaacatcagtttcttaaaaaaaaacccaaacacctcatgttctcactcgtaagtgggagctaaacaattagaacacatggacacagggaagggaacatcacacaccagggcctgtcggggggtggggggcaaggggaaggagagcattaggagaaatatcta

SEQ ID NO: 5762 - DNA, 1158 bp, Homo sapiens
ggcgtgagagaaaatattgagtagcttcataaataattagctgcttaatggctagaccaggaaataattaggttttctctgaaaagtggccatgagattgtatttgcttcttcatatctacatatgccactttgacgatagaaatttgagttgccaggcattttcttttaaataatcttttaagaataaaaccatgcaaattatttttctttccatagatgggaacgttgtctgtgtgcagtctaatcatctgaaaaacatccctgagaaacacagtcaagtggcgcaggtaaaatggaacaagagctggttgagaatggcctggagcattgtagtctacaacagcaacatccctgacattttgataatagagccaattctagtgctagagggaaggaggggctctgtactgaaagcataccttctaactatggagaaaacattgctaggttttcatttcagaaagagtggagaggggaagagagaactgtgtccattattgtaagtatcaggcatctaaggactttttcatagtagggatgtattaggaagaagtgctgatgagggtactatagcaagtgtcaggtgtctgaagtatttggaaggctagtgttttcagcagaacagaattgaggaatatgaggtgaagtggtgataagatagtacatcatgagcttggcctctgatacgtttttttctttctttcttttctttctttcttggatgaggtcttgccatgttgtgcaggctggtctcgaattcctggcctcaagcaattctgccaccttctgtatcccagagtatgctgggattataggcatgagctaccgtgcctgacctctgagacacttattttttattttttattttttgagacagtctcattctgtcgcccaggctggagtgcagaggcatgatctcagctcactgcaacctccatctcctgggtttgagcaattctcatgcctcagcctcccaagtagctgggactacaggcccatgccaccacacccagctactttttgaatttttagtagagatgggttttcaccatgttggccagtctggtcttgaactcctgacctcaagtgatccacccacctcggcctcccaaagtgctgggattacaggtgtgagccactgcgcctggtctttttc

SEQ ID NO: 5763 - DNA, 1209 bp, Homo sapiens
aggttgcagtgagccaagatcgcaccactgcactccaccctggatgacagactgaaccccatctcaaaaaattaaaataaaataaaataaaataactatatatatagccccagctggaaattcatttctttcccttattttacccattgttttctcatacaggttataagcacatgtccttggccctgaataggactggcagaagcattgtgtactcctgtgagtggcctctttatatgtggccctttcaaaaggtgagatagtgagcccagaatccaatagaactgtactgatagatagaacttgacaacaaaggaaaccaaggtctccttcaaagtccaacgttacttactatcatcctaccatctctcccaggttccaaccacttctcaccatccccactgctgtaattatagcctaagctaccatcacctggaaagtcatccttgtgtcttcccctttatttcaccattcatgtcctgtctatcaacagtccttccaccagtatctctaaaatatctcctgaatcagcccacttccttccatcttcactacatgcaccctggccttccaagctactatcggctctcaaccagactgctgggaccacctgatctctctgcttccactctgtctcaacccccatctattttccaagcagcactagagttatcatattaaaatgtaaatatcagttttttttttaaagaaaaaaaccctgagacttaacagagttataaaaaatataaatgtcatcatcagttccctgcttaaaacccttaactcgcttccaattgcacttggaatgaaaccaaactgcactgatccagcccttgcctgcctccccaaagtccaaggggtcatggctctttccctggctacactggttttctttctgtccctcaacactgcaagcctattgctgccccagggcctttacacttgctttttttctgcctagaacagttcttccccaaagatttttaaagggccgggctccttaacattgaagtcgcagaccaaacgccacatatgcagacagttcttctctaactactttaaaatagccctctgtccattcattcttcatcacattaacctgtttaattttcttctcagagctccacactatttggaagtatttgttgacttgttaccatgtctccccactagagtgtaagtttcatgagggcagggaccttgtctgac

SEQ ID NO: 5764 - DNA, 1185 bp, Homo sapiens
aatagaatgggagggatgtttagtatatccagtatgattggtaaatgggaaatataattgattctgatcactcttggtcagcttctctttctttatctttctttctccttttttaagaaaacgagttaagtttaacagttttgcattacaggcttgtgattcatgcttactgtaaagtggaagttgagattattttaaaacttcaagctcagtaattttgaacactgaaacattcatctaggacataataacaaagttcagtattgaccataactgttaaaacaatttttagctttcctcaagttagttatgttgtaggagtgtacctaagcagtaagcgtatttaggttaatgcagtttcacttatgttaaatgttgctcttataccacaaatacattgaaaacttcggatgcatgttgagaaacatgcctttctgtaaaactcaaatataggagctgtgtctacgattcaaagtgaaaacatttggcatgtttgttaattctagctttttggtttaatatcctgtaaggcacgtgagtgtacactttttttttttttaaggatacgggacaattttaagatgtaataccaatactttagaagtttggtcgtgtcgtttgtatgaaaatctgaggctttggtttaaatctttccttgtattgtgatttccatttagatgtattgtactaagtgaaacttgttaaataaatcttccttttaaaaactggaaaaaatcttgaactgattgatttttattatgttctgtcatatgggcacactgattgactttacaattccctcaaagttaagatttttaattttaaaattataaatgatatttagcatctttatatgttcattgttgcatatatcattaattatttctaagatatatccctagaaatgggattgctgagtcaaagatatactcatttttaaggcttctgatttgtgttaccagaaagattctggtactttatctttctacttggagtgtgtgttttattttcccccttataccctccttattgatgcacattattctttttgaactttgccagttttttagttgagaaatgatatctcattgctattttaatttgtatttttttgattaatattaaagttgtacattcttttttaaaaaaaacttaccatgtctacaggactattgagctactttt

SEQ ID NO: 5765 - DNA, 1185 bp, Homo sapiens; identical to SEQ ID NO: 5764

SEQ ID NO: 5766 - DNA, 1197 bp, Homo sapiens
ttcaccacacccccagcctctggggaagggagaggagctgaaggttaaattgactagcagtggccaatgatgtaatcaatcatgcctacatagtaaagcctctattttatttattttttatttttatattttgagatggagtctcactcttgttgcccaggctggagtataatggcgtgatcttgcctcactgcaacctccatctcacgggttcaagcgattctcctgcctcagcctcccaagtagctgggattacaggcatgcaccaccacgcctggcaaattttgtatttttagtagagacagggttttgccatgttggtggggctggtctcgaactcctgaccttatgtgatccacccacctcggcctcccaaagtgctgggattacaggcgtgagccaccgtgcctggctgtaaagtctataaaaacccgaaagaattgggtttggagagcttctggatagcgaacacatggaggtacctagagggtgctgtgcttgtagggggcatggaagcttggtgccccttatcctgtaccttgtcctatgtgattgttccatctggctgtccatctatatgctttgtaatatcctttataataaacctgtaaacatgtttttcagagttctgtgaccctctctagcaaattaatcaaacccaaggggagggtcatgggaaccctgatttacagtgggtcagtcagaagcatagcttacaacctggcatctgaagtggagagcagtcttgtgagcctgagctctcaaactgtgggatctgacactatctccaggtaggtagtaacagaactgaattcaattagaggacatccagctggtgtccactgcaaaactgattgcttgatgtatgggaaaattctcccatacatctggggctacagaagcattctatattaaatagagagtataggaaaatccacattttgtttactcccccctgtatcttacagtgagagtgagcggtcaagggtgacttctcagtttctggcttgtacaactggatgtttggagtaacagcattaagaagcaggacctttaagatcacattgaatactaagttcaggtatgaggactgtgagtttagtcttagacatactgtgtttgacgtgcctttgagaacacccaagagaatataggtagttggatggatggatctagagctcagaaggggcctatata

SEQ ID NO: 5767 - DNA, 1142 bp, Homo sapiens
ttttatttgtatttccctgatcattagtgatgttgagcttttcttcatgtttgttggccatttgtatatcttcttttgagaattgtctattcatgtcctaggcccactttttgatgggattgtttgtttttttttcttgttaatttgtttgagtttgttgtaggttgtggatattagtcctttatcagatgtatagattgtgaaggttttgtcccactctgtgagttgtctgtttactctgctgactgttccttttgccatgcaaaactctttagtttaattaagtcccagcagttcatctttgtttttattgcatttgctttcggtttcttatcatgaaatccttgcccaagccaatgcctggaatggtttttctgatgttaccttctagaatttttgtagtttcaggtcttagatttaagtttttgatccatctctagttgattttttataagatgacagatgaggatccagtttcatcgttctgcatgtggcttgccaattatcccagcaccatttgttgaatagggtgtcctttccctacttgaagtttttgtttgctttgtcgaagatcagttggctctaagtatttggctttgtttctgggttctctattctgttttatatatatatatatatatatgtgtgtgtgtgtgtgtgtgtgtttgtgtgtgtgtgtatatatatgtgtatatatatgtgtgtgtgtgtgtgtgtgtatatatatatatatatatatatatatatatgtatataaatgtttcatatatagtctatgtgcctatttttataccagtaccatgctgttttggtgactctggccttatagtatagtttgaagtaaggtaatgtgatgcctccatatttgttctttttgcctagtcttgctttggctatacaggctcttttttggttccatgtgaattttaggattgtttttttctagttccgtgaagaatgatggtagtattttgatgggaattgcattgaatttgtagattgcttttgacagtatggtcattttcacaatattgattgtactcatccatgagcataggatgtgtatccatttgtttgtgtcgtctataatttctttcagcagtgttctgtagttttccttgtagaggtctttcacctccttg

SEQ ID NO: 5768 - DNA, 1195 bp, Homo sapiens
ccacacacacatacatataaacccatgtagagagagatagatatatatattttttcacaatggaaccatatactacattataatttatgactttgttgattgtccaaatctgattctttttcattttgtgtgtgtgtgtctacaagtgttttggggagattaatattggtttttattgcattgtctcttgatataattgacctatctctgttgtttaagagtacttcatacacagaggataaaaacctagattaaatatgcatacagcatttatatattaacatataaaagctaccttatctaacatttgtagtgtaacttgcgtgtttaactgtagtgggtagaattatgtccccctcaaaacatgtcccaaacctaacccacccaaactttatttggaaatagggtctatgtagatataattaagtgaaagatctccagaagtaaatatcctgaatgtaggttgatgcctaactccaatgactggtgtctatataaaagaaagcagagggagatttgacacatgcaaggaagaaggccatgtgaagattgaagtagagattggagttatgctgcctcaagccaaataaaggaggagctggaagagctaagaaaggattctcccctaaagcttttggaggcagtgtggtcctgcctacaccttggttttgtactttgggctttggttttatacttctgaaccatgagataatgaaattctgttgtttaaatgtgcaaagttcgtgataatttgttatggtggccctaggaaactattcattggctgatatcctacttttcatgtctacagtgatactaatgccagtaagatatgtaaaaagaatttaaaatgactaacatttcttatgaactgtatgcttttaatgtattgagtcagtcagtgctcacagctgttttacaaggtagatactgtgactaatccttattttatagatgaaaaactgaatgacagagagaataaagactttgcttgatactgcatagttagggagtgggacagcttggatttgtgtccagtacctcatgctccagagcctgtcacagatttgtgttaaatttaaagaaacgactggacaagcatgcatattttatgagttcattgaaagcaatactcagtatggttatatatgtaaacaaaaaactgaacctagtgaccaaaaaggggattgtaacc

SEQ ID NO: 5769 - DNA, 1204 bp, Homo sapiens
ggaggggctttaattggaggccccgtagaggacgcgcggaacttctaaggtgggaaaaaacgaaattaaaaaatcctttgatatcagggctctgaatcctgctggtcagagcaccaagcattcagtctctctccttgcctttgtcttacttgtgttcaaagaaaaacaaccagaaaaaaaaaatctcatcatggcaaatattcaccaggaaaacgaagagatggagcagcctatgcagaatggagaggaagaccgccctttgggaggaggtgaaggccaccagcctgcaggaaatcgacggggacaggctcgccgacttgcccctaattttcgatgggccatacccaataggcagatcaatgatgggatgggtggagatggagatgatatggaaatattcatggaggagatgagagaaatcagaagaaaacttagggagctgcagttgaggaattgtctgcgtatccttatgggggagctctctaatcaccatgaccatcatgatgaattttgccttatgccttgactcctgccatttatcatgagattaatactgtgattcccgctgttttctttttccttgcattttcctaatatgcctttactgatccgtttgctgtgaaccctatgttatttccatgtgtcaagtgggtcttgtgttgccagcttctatttgaagattgcctttgcactcagtgtaagtttctgtcagcagtagtttcacccatttgcatggaaaaatttaaagctaataaagcaatttaaaaagcaatctatacatttattgtctcattaaaaatgtatacttacatataacagatgaactaaaaaaaaatctgagattaaatacactagagtgttaattggtgaacatttctgtgtgttaactaatcccagcactttgggaggctaaggtaggcagatcacgaggtcaggagatcgagaccatcctggctaacacggtgaaaccctgtctctactgaaaaaaaaatacaaaaaattagccggtcgtgatggcacacgcctgtaatcccagctactcgggaggctgaggcaggagaatggcttgaacccggaaggcggaggttgcagtgagccgagatcacgccactgcactccagcctggacgacagagccagacagtctcaaaaaaaaaaaagtaatatgtgacatttttttccttttattatctggagtttgagaa

SEQ ID NO: 5770 - DNA, 1318 bp, Homo sapiens
actgttgaaagtgaggaggcgtttaagaatagaatggaggttaaagtgaagattcctgaagaattaaaaccatggcttgttgaggactgggacttagttaccaggcagaagcagctgtttcaactccctgccaagaaaaatgtagatgcaattctggaggagtatgcaaattgcaagaaatcgcagggaaatgttgataataaggaatatgcggttaatgaagttgtggcaggaataaaagaatatttcaatgtgatgttgggcactcagctgctctacaaatttgagaggccccagtatgctgaaatcctcttggctcaccctgatgctccaatgtcccaggtttatggagcaccacacctactgagattatttgtaagaattggagcaatgttggcctatacgccccttgatgagaaaagccttgcattattgttgggctatttgcatgatttcctaaaatatctggcaaagaattctgcatctctctttactgccagtgattacaaagtggcttctgctgagtaccaccgcaaagccctgtgagcgtctacagacagctcaccatttttgtcctgtatctgtaaacactttttgttcttagtctttttcttgtaaaattgatgttctttaaaatcgttaatgtataacagggcttatgtttcagtttgttttccgttctgttttaaacagaaaataaaaggagtgtaagctccttttctcatttcaaagttgctaccagtgtatgcagtaattagaacaaagaagaaacattcagtagaacattttattgcctagttgacaacattgcttgaatgctggtggttcctatccctttgacactacacaattttctaatatgtgttaatgctatgtgacaaaacgccctgattcctagtgccaaaggttcaacttaatgtatatacctgaaaacccatgcatttgtgctctttttttttttttatggtgcttgaagtaaaacagcccatcctctgcaagtccatctatgttgttcttaggcattctatctttgctcaaattgttgaaggatggtgatttgtttcatggtttttgtatttgagtctaatgcacgttctaacatgatagaggcaatgcattattgtgtagccacggttttctggaaaagttgatattttaggaattgtatttcagatcttaaataaaatttgtttctaaatttcaaagcaagtaatttgtagtgtgcctttcatgttactggttggtattctggttattgtagaaataaggttggtattctgtggttattgtagaaattttagaaaacatagtaagaaca

SEQ ID NO: 5771 - DNA, 1223 bp, Homo sapiens
atgtccatcttttgttggcctactcttctaaaagcccaggccaaatgtcactcactgtaaaaacctcactaatcttctttctcccaagccaaattcatcctttccttaaatgtccactgatctttgacaaaggagcaagggcaatataatggaggaaagatagtcttttcaataagtaatgtaggaacgtctggacatccacgtacaaaaagaatggatctaattcttacatctttcacagaacttcctgaaagacctaccacctcttcaatggaaagcatcaacagtttgcaccctacaattctctgaattcctcacctcaaaatcctcatcttgctgctttcaccaatcctggattgttgtaaaatgatgcttgcccagtcttaatcaagaccccacattgaaatatccaccttaaatcaaacttccaattcttaataaattctgcccagacatttccctctgaaacattgccaaagctttgtgcaagttgaggttttccttgccaaaatacgtaagaaattcaagctttgttttatcagcaggttttgttggtgatatttgactcagctaaatacacacacacacacacacacacacacacacacacacacacacacttcgagctcatcaatcacatgaaaaaattataagggttagatcaccagttattgggttaagtccagtatatttctatccaatggtaaacaaaatgataaaagttaattgacaattctcgataccactcagtctctcctgcagccatcagctctctggtaggtaaattatgcatctgaagactttaaggcagattaccccagggtttgctctcaggctcagatcttcagagaaaataaggaactactatacccacccacattttcagagaaacagaaattaggaaggatcttggagaatggaagggagagatgaattgggtaaatccattgaggtgaagtacacccaagggacaaaccaaatcgaagtgagacaagaaggcaggatgcccaacagtcatcaactccagtgattaagaacttggttaagatgtattaatacattattaccatatatttaagtaaacattatacatacagtgcaccaactctatgtactgctatccgtgtctatgtcagtatttctcactgagaaatatatggagggacctctttttttttttttttttttcctgagacggagtcttgctctgttgcccagactta

SEQ ID NO: 5772 - DNA, 1198 bp, Homo sapiens
cttttaatgtgtctatgtacagatataatttttaaacatcaggatcagtttgtgacctgcatatttgctcctatattgttgggtgttttccttttgaataatctgaaaatatgatttttagtgattataaaaataccattcagatatatcatttaatcctcatattttaggggcatttattttcccttttggactattacaaatagtattgtttggacatatttgtacacacatcttttttccaaatttctgtttggggaagggaacacaatcctagaaggggaattactgattccaaatgaatgaacctttttaaacgtctagatgtacatagtactgccaaattgcttttaagaaagattatgtcaacttagactgtcactggcaatggatgaaagtacttcctactttgtttttatctatattgccttaaaattatgattttaaaaatttgcaaattagaagatataaaaattttgccaggtgcattggttcacacctgtaatcccagcgctttggaagaccaaggtgggaggattgcttgagcccaggcatttgaaaccagcccggacaacgtgatgaaaccctttctcttccaaaaaaaaaaaaaaaaaagaaatgtgaaaattagccaggcgtggtggtatgtgcctgtagtcccagctgctgggaaggctgaggtgagaggatgaatcaagcccaggaggtcaagcctgcagtgagccatggtcgcaccactgcactccagccttggttgacagagcaagaccctgactcaaaaaaaaaaaaggaagatataaaaaatgttacaatctttactagtaaaaaatactgttattctattttatgaatgatttgttcaattatgagcccggtttacttgctgctgataattaaaaacaaaagacaaagacttctaagaacattcagaaccttgtgatgattacaaatctgagaaacacattgactttgcccaaaggtaagagcacaaaatgaagcaaattcctgactcctttggcagtgatctaatggttagattactaaatatggcatcttttttttttttttaaggaatgtcactattactcatggagagaaacacatttctacagaatttttacaaactaaaaagaaattctaattaaaaacaattatctaacagtttttcctagcaccgaacatagtacttggtacatag

SEQ ID NO: 5773 - DNA, 1190 bp, Homo sapiens
cggggcaaactagcttttgggagtgaagcgggtacgcagttatccaacaatgtctggtgagtcaggacagcctgaggctggtccctcacatgcagggctagattggccgaaccctgagaggaatcgggctggggtcccgggaggggtgatccgaagagctggttcccaagggcccaggtcctggatccaaaaggttcttgagcagattatggactcacctcgccagtgtgtcaccccctcggaggtggtgcctgtaactgtgctggccgtccagaggtacctgttagaggatgagccacgcgacacggtgcccaagcctcccctttattgctatgatgtgacgatctcagatggggtgtaccaggagaagtgctacctggaccccagcttgaactctctcgtatatcaaaatattcttaaagttggcattcaaatgagaatttccagggtctcatgtctttacaatgagaaaaggataggccaggggatcctgtgcatagataacgtccactgtggggagacttcagacagtatttctttagaaactcccttcagaaatagagcgcaccaggagaaaccagagaggcctttaagaggcgggaagagtcattacctggcgctgtggaataacgaagatccctatggagatatctggttaacagacaagcaacctgaggaacacaactttagcggtaagtgtttggaaagaacggcagagggttttaaaaaaaatagttttcaggagcttgcgtgaacgggaaaggaaatgaaaatgcttttgtattgttaattacaagccaggagtggtaggtagacaagttttcttaaatgaccaagggatgctcaatgaaatttgcacagccagtggtttttgttggtgttttttgtttgtttgtttctttgattgcaaaagtggccaattcaggaagtgtgtttgactacatcttaaaattcagtctggcaaacgtactgatgtgggagtcagtattcctcatacgttcgttacatgtttgattgtggtggaattaatcttagttttattcccaatccagttgtggaaatagtacgttgtgtcggttgaagagcttatagatttgaatttagcataaaggttgtaaaaatttgcgggtttgcatgttttaatcttcattcaaaaaggatgctccgtgatgtattccttaatactttac

SEQ ID NO: 5774 - DNA, 1161 bp, Homo sapiens
gaggtgagggcagacagggtcctggtgttagaatcaaaagatctagcttcttgttgtgtcagttctgcctagaacctgctgaggaagtcctatagcttctctaggccctagtttgtcatctccaagatttttagtctcaaataaaggcatggggacaggaagccactttgacaaatatagaagactgaagagctgttattagaagcagccagttttaatagaagcctctctttgagggatcctcctagaagtcaagtactggctgcgttggaggtacagaggactctaggccttgtcagctgaatttgtcttctgggcatagggccaacatactccatggcccaaggactgggcaagaaagtttaacttaggatccttacttaatcttccctagtggggagattggagctgcaggagaggattaggagggtcaagattgaccgcagctcctgacttaaccccttctcacctaggtactttccctgctattctccccatctcttgctccaagagtcttgtgcatggtactctttctttggcagtaccctcctaagactacatgggacagggcacttggggttcccaggctcaaggaaggaactgatgtggccttctgggggtgatgatggccaccacagccctcttctgtcagtcagcctcatttctatatcccttgatctcactgcccctcataagaatctgagacacttgcccccttctctgaaactcacttccagctgccaagggcactagtaggtggcaaagccattcccttgaggccctactttcttgaaagtttgtccttagagcagttcatctttccttctacatcaattgattgatggcagttcagagaattgcaactggattgagagattttcttattgtttgaaaaagaagttgatttttgtcctgatcatcaaagtaaagcattctcactttagaacactggaaaacacagaaaggcagaatttagaaaacaaaaatcgcctacgatctccccggccataagtgctgtgaatgttttggttccaactgcattttcaaagagggcacttgaagagagtaatacctcagtcgaaagaaggaatttctaatgacagacttgcagaccagtgagggagagtccttgaaggacctcatggggaaactttatgactt

SEQ ID NO: 5775 - DNA, 1171 bp, Homo sapiens
aaactgaaggaaacagagacacacctggaaatgctgcagaaggctcaggtctcctaccggaccccagagggagatgacctagaaaggttaattactagggtttagttatcagcttgtgagtgctaatgggaagcatcccttaggacccccacttactggccgtagacaaaggaggaagccttaattcacaggccaccaagaattgagtaattacttcttagaaagctgcagccagtctccctgtgcttggtggcgttgtgctttcttctttctagctaatgaaaacataactgttgagaaatgtggttccattttgaaggggcttcattttattctgttggttaatgacttcatgtcatctcttctcctgccccctcactccttcatacagggctttggcaaagcttacgcggctacgtatccacgtcagctatctccttacttctgtcctccctcacttggagcttcgtgagatcgggtatgactcagaacaagtggatgggatcctgtacacggtgctggaggcaaatcacatactggattgagcaccagactgtatacccttctcttctcttatcttctgtctgttctcttttctctccctccctcacgtctctctctctctctctctctctctctctctctctctctcaccctcacctttatgccttatatagagaatctctgtgtaaatcctggctcataatcagtctcctttttatcagttttggtgtggagaaagaggccagtttaaataggctttcaagagtctagggtcagaaaagcaatagtcactaagctaggtgacctgaaagctttaattttcatgacctggatatgtggtctattgtatatctttttctgaaatggtttgtattcatttaggttagatcaatcagcagatattgggtccggtataccaggtattattttggggtaagctaacaagtacaactcatgtttgcagccttcgaagatgtaacaatctcgttggaaacataagacatacatcacattatacacaaaagtgtatgatatgtacaactgagtggtacagatatgacatggaagatctgggggaggaagttcaaggaaggcaccacaccagaaatgggacctaaattaaggcttaaagaatgagcatggccacactgtcagtgagtgttcttta

SEQ ID NO: 5776 - DNA, 1189 bp, Homo sapiens
cttctaaatgaaaaaaaagaaaaaaaaaagattgactataccaggcctcttaatccccttctgggactattggtgatgctgtactactgttaagacgttttctgcttacagtcagtgacagttttatcaatgactctggcaataccattgtgacccttgaaattaatctgtgttttgttttatttgatgaacattccacatatccaagtggctgtaactgatatcattaattgtgttataaaaaatgggtgttttgcatatttgtaatacttctctggattgtaaggggtgttcctgggaaaaaatgatataatttgatcagtagtaatagaacaagtatatggccaggacctgacctggctgtcttagcttagctttttggtatcactaaagcagtataggataccagggaaagggaagagggtggaagggaaggactctgtcttgctcaaagagcttagtagagacaggaacgattaaggaacctatccaacagattgtataaactgcccctcaattgtggccagtgagccacatttgtcagtgattgacaattatgtaaactggtgcctgtggcaaaaacatgcggcaactagacagtggcacccccctggggttgtggacgtgacacaattgttagactatggcaatatttgatgtctttggagtcttaaataattaactcattgtgaagacataaatcaggaggaatcgtgaacctatgtattttttctactttaattctatgttctccatttcctgaaaggatggacagccttacctttaaaactattacaaaatacctaagcaaaaatcactccctctaagtatgcttgctaccatcactgagatctaggcagaccattaagtcttttgattttaaactctaaccctttcagtgcctcttaggctataaacaggaatggcagtactctctgtgttctttaacagaggaggtgatgtaagaaagaagaaaataaaatgatcacaaataaactgtaatgtgtgtaatatgcatcatcttttaccaaagttgctccttcagcttttctccatagccactctttactgtatgtgtatacaaacagtaaaggggctaaaaggcaagaagtaataagacaaaaatggagcaaaatgctttgtatatgggagtagttattaatacttttttccaaagaccctgaagttc

SEQ ID NO: 5777 - DNA, 1203 bp, Homo sapiens
atgtccactgtattgtgcactttaaaattgtctagatggttgcttttagccacccgttcagaaaccttgtgccatcaagccacccaagtgctcttaaatttcctcgctacctgtggctacaaggtttccaaaccaaaggctcagctctgctcacagcaggttaaatacttaggtctaaaattatccaaaggcaccagggccctcagtgaagaacgtatccagcctacactggcttatcctcatcccaaaaccctaaagcaagtaagagggttccttggcataacaggtttctgccaaatacagattcccaggtacggcgaaatagccagaccattatatacactaattaaggaaactcagaaagccaataccatttagtaagatgggcacctgaagcagaagcagctttccaggccctaaagaaggccctaacccaagccccagtgttaagcttgccagtggggcagacttttctttatatgtcacagaaaaaaacaggaatagctctaggagtccttacacaggtccgaaggatgagcttgcaacccatggcgtacctgagtaaggaaattgatgtagtggcaaaggattggcctcattgtttatgggtagtggcagcagtaggagtcttagtatctgaagcagttaaaataatacagggaagagatcttactgtgtggaatctcatgatgtgaacggcatgctcactgctaaaggagacttgtgactatcagacaactgtgaggaaagtaacaaatcataaatccccatggccctcccttatcatatttttctctttactgttctcttaccccctttcgctctcactgcaccccctccatgctgctgtacaaccagtagctccccttaccaagagtttctatgaagaacgcggcttcctggaaatattgatgccccatcatataggagtttatctaagggaaactccaccttcactgcccacacccatatgccccgcaactgctataactctgccactctttgcatgcatgcaaatactcattattggacagggaaaatgattaatcctagttgtcctggaggacttggagccactgtctgttggacttacttcacccataccagtatgtctgatgggggtggaattcaaggtcaggcaagagaaaaacaagtaaaggaagcaatctcccaactgacccggggacatagcacccctagccc

SEQ ID NO: 5778 - DNA, 1178 bp, Homo sapiens
tcctcatcccaagtcagtatttttatatctttcctcctaggacttaccagttttcccagagaagacttccaaaatctttcttacgagggtactaccagcgttctaggagccaaatggcagaaaaggactgggaggacctcaacatttagtattctcttagtttccttgctttcagaaacagtgttcacatcttcagccatgtatggcattccccatcttctgacaatgagcctcaagttttctaccaggattggcaagttatcttttaccccatagcatattgtgagggagggtatttaaaaatcatattggcttttagacagccttcaactgatttgccttattttaaccccatcccttcacatttatttctgaaggtaagtgaaattatcagttcctgaactatttaaggattcttaagtggtgacaggtgtgttcttggctctctccactaccagtttaaaattcagctttcttcagtgtgctgagttggttcctgctcatccaattatttttcatcttccagattattattgctgttgtctccttttcttgttcctcctgaccttgttgatttgtgtttttttttttttttttttaagtgcctatagttttagagagttttctggatggaatgaaattaaatgaatgtgttcaatccaccatttttatgtgaaactaattctaatcataatgaaagagttttcttacggctgagcatggtgtctcacgcctgtaatcccagcattttgggaggccaaggcgggtggatcacctgagtttgggagttcaagaccagcctggacaacatggtgaaaccccacgtctactaaaaatacaaaaattagccaggtgtggtggcacatgactgtaatcccagctactcgggaggctgaggcatgagaatcacttgagcctgggaggccaaggttgcagtgagcagagattgcgccactgcactccagcctgggtgacagagtgagactttgtctcaaaaagaaaaaaacaaagagtgccttacctcctttatatgatattttggttgatcctcaatttgttttaggtattatacctgaagaaccttagccctcgggtgactgaaagagatcttgtgtcattgttcgctcggttccaggagaaaaaaggacctccaattcaattccgaatgatgactggac

SEQ ID NO: 5779 - DNA, 1164 bp, Homo sapiens
accttaagaacttattaaaagaagagcaaactaaatccaaatcaagctgatgaaaagaaataataaaaaatggagcaaaaataaatgacatagaggaaataatagaggaagtcaacaaaaccaaaagttagttctttgaaaagatcaacttaatttataatcccttagctagactgatcaagttaaacagaaagaagactcaaatttctaaaactcagctccactttggttcttatttgtatgggacatctttttccatctttttgcttttaatctatttgtgtttttgaacctaaagtgtgtctcatgacagcaaatagtttggattatattttctctttttaatcaattatttcaatctctgccttttgagtggagagtttagttcatttattttaatgtatttaattagagtctgttaaggatttacatctgctattttgctttttgttttctgtttctcttctatcttttttgttcctctgttcctccatttattccttcttttatgttaaatagatttttccaatgtgccattttaattaacttcttgcctcttttactgtttttgtgtatgtgtgtgtgtgttagtggttgctctggggattacaattaacctcttggcttaaataaattaatttgtattaaaaccaacttaatttcaattatattaaaaaactttgtttagctgttctctacctcccatactttctactgtaattgtcataccaattacatctcagaatgtggcttttcattgaagtgccaggcaggtcaaatagttccatccaggtaaaatagtgaaaattctccaaggatggggcttttatggtgctccagaactggtctgccactccagtttcagataggctgctggtttttgcagcttctgttgttgcaaggttgttggttttcaaggctactgcaaagctagagaaggggagatgggatgatggaaagtcgaaatgctacaaacctcactgtttaagttacattcatctcttagcatatggatagccaattgtcctggtgcctttagttgaaaagactattctttttcattgaattgtcttaatatctttgtgaaaaatcaatttaccataaatgtaagaggctttttaaaatgtttttttcctcttcattttcagcaatttgattatgcca

SEQ ID NO: 5780 - DNA, 1149 bp, Homo sapiens
ggctttgtgcacagcccagtgtgggattacagctttgggatgaccgcttacaaagttctgtttggttagtattggcatagtttttctatatagccataaatgcgtatatatacccatagggctagatctgtatcttagtgtagcgatgtatacatatacacatccacctacatgttgaagggcctaaccagccttgggagtattgactggtcccttacctcttatggctaagtctttgactgtgttcatttaccaagttgacccagtttgtcttttaggttaagtaagactcgagagtaaaggcaaggaggggggccagcctctgaatgcggccacggatgccttgctgctgcaaccctttccccagctgtccactgaaacgtgaagtcctgttttgaatgccaaacccaccattcactggtgctgactacatagaatggggttgagagaagatcagtttgggcttcacagtgtcatttgaaaacgttttttgttttgttttgtaattattgtggaaaactttcaagtgaacagaaggatggtgtcctactgtggatgagggatgaacaaggggatggctttgatccaatggagcctgggaggtgtgcccagaaagcttgtctgtagcgggttttgtgagagtgaacactttccactttttgacaccttatcctgatgtatggttccaggatttggattttgattttccaaatgtagcttgaaatttcaataaactttgctctgtttttctaaaaataaacttggtgtctgactgagtataaatggactgggtgggagaggcccctcacccagtaggggctgttttgctgaccccctgaatatcccttgagcaccctgtcagtgccaggcctatgctgcagccgtgatctcgtgtcatctgcacaatactcatatgaaggacatgctgtttgccctcactgtctggataaagaaactgagactcagcgagtttaagtgacttgcccaaagtcacatggctattacgggaattaggactcaagcccagatccttcctccctctcctgctccgctttcatatgagagcttcggagtgagtggcaaggtgactcataacacacaactgtagcttgagggggtgatttgggaggaaagataccccgaggaagg

SEQ ID NO: 5781 - DNA, 1194 bp, Homo sapiens
tgcagggtctcagccttatcttagtctaggaaaagagatgtcagtggagaatatgtgagagaatgatccatgcaaatattgtgagctggaatggtaatgttaatcagtctatcaggattcagaggtggccatttggttttatctatttgtgcatgaaaataaacataggcatttgtctaaaacaaggtttgaaggggaagaaagtcttcctgattagttcccaaattgcttttctattgcttaagcatctctggggaatccagcacgtaaacgcgcccattggttagtgtataattgtgttatatccattttcctttggaaatgcctaatgactcttgctttgtattccttgcaggtgaaagcccagcctccgtggttcttaatgcctcaggaggactattttcactaaagatggaaacactggagtctgaattgacctgtccaatctgcctagagttgtttgaagacccccttctgctcccttgtgctcacagcctctgcttcagctgtgcccatcgcattttggtatcaagctgcagctctggtgaatccattgaacccattactgctttccagtgtcctacctgcaggtatgttatctcgctgaaccaccggggcctggatggcctcaagaggaatgtgactctgcagaacattattgatcgcttccagaaggcttcagtcagtgggcccaattcccctagtgagagccgccgggaaaggacttacaggcccaccactgccatgtctagcgagcgaattgcttgccaattctgtgagcaggacccgccaagggatgcagtaaaaacatgcatcacctgtgaggtctcctactgtgaccgttgcctgcgggccacgcaccccaacaagaaacctttcaccagccaccgcctggtggaaccagtgccagacacacatcttcgagggatcacctgcctggaccatgagaatgagaaagtgaacatgtactgtgtatctgatgaccaattgatctgtgccttatgcaaactggtgggtcgtcaccgagaccatcaggtcgcatccctgaatgatcgatttgagaaactcaaggtaagggatctggggagcatcccctatacaactttgtcgcataaatgcagttagcaagttctctaataaaataggtgacttttcctatatgacaagtgagttaactttaagttgttctcatga

SEQ ID NO: 5782 - DNA, 1223 bp, Homo sapiens
aacatacagatcagggcttgttatggtgaaccctaaaagaccataaactctttctattatgttggattttttgttttttggtgaacatggcctgaataatgaggacctaaataacttttttgttacataaagagatttattctaatgatatggttatattaggattagatttgtgaagagtaagaatggaaccttttttgtaggcaaatatttttttgcctttgtaaagctccttgctaacccttcctaaatgttagcactaatccttgtgcctttttcccctggtatttctactacctacttcttttataggcaggttggtctcctcttcatattgcggcttctgctggccgggatgagattgtaaaagcccttctgggaaaaggtgctcaagtgaatgctgtcaatcaaaatggctgtactcccttacattatgcagcttcgaaaaacaggcatgaggtatggttccatcctaggctacttctgttgagttctaaacgtgtatacaaacacagatagatttctgcattgttttcttctttcttctccatctttccagatcgctgtcatgttactggaaggcggggctaatccagatgctaaggaccattatgaggctacagcaatgcaccgggcagcagccaagggtaacttgaagatgattcatatccttctgtactacaaagcatccacaaacatccaagacactgagggtaacactcctctgtaagtgacaagtagcagtcatttgtattctacctgacattagccttcttgcaataattcttatacatcatttctttttttattctgcttataaatgcaatacgtgttaatggcaaaaatgttaaattgcacaaaatataaagataaaaattgcctattatcttgccactcagaaataactactgatcacattcttgtgtatttcctcctggtcttttatattcaaatgtatatattttatacatacatattttttagcaaaattggggtcatactgtgtatgtagttttagctcttgttcttttcacctcatagtataagcatatattaaatatgtttaaaacctttttaatgggtatataaaattctgtatagatgtgccataatttaatcattcctctattactgtatatttaaacttttatgagtttttcactattataaataatggtacattgagccaggcataatggctcatgtctgtaatcccagcactt

SEQ ID NO: 5783 - DNA, 1164 bp, Homo sapiens
ccctctaatattagtgcccctcatactctcaagatggctgctgcagttccaggaatcacatgcagacactgcaatgcccactagaaagagagtatgaactattcatgtgtatctctttttactagcaatggaaactttctaaggagtcccacagcaccaccctgaaaacacctcttatttatcattggttgaaatcgtgttatatgtatatgcctacaccagtacattggcaagtggtatacggacataaacgtagagttagtccagtcactcacacaaccacctctccctgccctgcgtctggccaaaacacattgctacctagaaaagttggagggtggaaaatatgtaaataaactcatgatgttttggggggaaggaagaaacagtttctatttcacaacctcatgagtttgtcctcaggatcagttgatacaaaagatttgtaagaaactggtgtatttgttaaatgtgatatattacttatctagggaaacgaatgttttgtatagttctacaaatgaaagttgttgactgttcataggcattttagagctggagggacattagtgatcttttaggtcagtagttctcaaactgtggtctgtggacccctacggttcctgaaatcctattagagaacatgaggaatattttaacagtaatattatcttagtctgtttgggctgccataacaaaatacctcaggctgggtggcatataaacaacaaattatatctcattgttctgaaagctgagaagcctaagatcaaggcagatcaaacctaagattcagtgtctggtgagggccctctttctggttcacagatgttatggtctctctgtgacctcacatggtgaaaggggaaaggcgtttttttctctggagcgtcttttacaagggcactaatctcattcatgagggcttctccccgtgacataatcatctcccaaaggccccacctcctaatgccatcaccttgaagattataattttaaaacatatgaatttttttggaggggacataaacatgtatcatagcaaatacgaagaatgtttacttttctcactatgttgacatttgcactgatggtgagtaaaattactggtgcagtgtaccacattttcttagtagttgtattcgtcatactctcaggggggag

SEQ ID NO: 5784 - DNA, 1217 bp, Homo sapiens
attttagttttgatataaaaattccataagatgaaatgcagaaatcttaagtgaacattcactgagttttgacaatacatacatctgtgtaatccattccccatcatgttatagaacattaacatcaccgttggaagttccctcctgtcatccttctagtgagttttctcctatgtaccacctaaggcatactttgatctgattgttttccagcacggaattatccacctgatttagtattttacataaaatgcataatttaataggtacttttttatgtaagactttcactcagtatgctattaatgagattaatccatattgttgcatttctttagtgactgagtcatattccattgtatgaatataccaatgaagatttatttttttttaattttttttattttttgaagttttaaagctgggcatccgggggagacatcacatgtcagtaggttccgtgatgccccacaagccgcaaaaccagcaagtttttattagggactttcaaaaggggagggagtgtacgaataggtgtgggtcacagagatcacgtacttcacaaggtaatagaatatcacaaggcaaatggaggcagagcaagatcacaggaccacaggacccgggcgaaattaaaattgctaatgaagtttcgggcaccattgtcattgataacatcttatcaggagacagggtttgagagcaaccggtctgaccaaaatttattaggcgagaatttcctcttcctaataagcctgggagcgctatgggagactggggtttatttcatccctacagtttcgaccatagaagacggccacacccaagggggccattttagagacccaccctcaggggtgcattcaccaatgaagatttattatcataatgatacttaggctcagtttagtttctgtatattgtgaataaaggtgcagtgaatatttttaagcaggctttgtgtgaacctatgttttaatttcttttggattaatagctgggagtggaattgttgagtcatagggaaggtgtatgcttagtttcatttaaaattgcctcagttcaggagaatggcgtgaacccaggaggcggagcttgcagtgagccgagatcgtgccaccgcactccagcctgggcgacagagcaagactctgtctcaaaaaaaaaaattgcctcagttttctcaaaatggttatatcattttatattcccatcaa

SEQ ID NO: 5785 - DNA, 2417 bp, Homo sapiens
ttagcaaaactgcaacattctgctcatgttatatgtcaatgaaactaatatcttgattgagcatttccaacattttaaaggcagaactgagaaacagctatttgttcacatacaacactgtgatgttctgcctgaaaatcgattgagtatttccaaacctattatttttcatttattgtgaaacctacatttacctcctaaaagaaacaaagctcttcaaaagtctcttcccaaggcccctccctgcttctctgggcctctccccactttcaacctctattctactttttcttattctttctccattttccccaatgcacactcttcctcttatgcccatggctactataaagagatcaatttcccatattcaagaaattagtgtttacttatcaatcaatattctgacaaaaacttaagccaaaaagaacctcttataaggccttgtttccttctggatattgagccaatataagatgtaccaaattaaaaaaaaaaatcagagcaagctcccccccgttctatttttgcttgcctctgatgtaaactgaattaagattttaggtacctggacctttgagaacgtgacactagcaaggtggtgaccacagagaataggtacaaaggtcttgaagcttgcttagagctttgttccgtggtggcacacaaatcttggcttgctgtaccatcattggcaaacctcatcatatcacagttgggtgtgtttgtatgtgtgtgagcactagtgtgtgtgtgtacatattcgtgtgtatgcacactttgtgtacctgtgtacatgtgattgtagatgtacctgttgtgtgtaaactctgttaaaatgaaatttgcttcgcatttaatgtgcaactttgaagtagtgtaatatttatctaaaggttttcactacttggttttaatgtctttgaacgtgtacttctatcttcaagcaagcttatagtacgtgttgctaaactaacttttccaaagaaccgagttgacttctatttttccttgcctaccaaccaaagggatggtgggctcttttttccctcttgtaaattgtgctgaggagaggacgtggctatgagatcagtcattgttccagttactggtcactgctagggcatcaactttatcagttccttcagactcttctctttttccaacctaatcaaataacgcagtgtggcttttgttcattataacaacgcgctctttaggcaactttttttcaagccttctgtcaccattttattttttcaagtaagttaagtaataattgttcagaattgtgggaaaaaagattacttgggggaaaatactgtatcactttatttgcatattaggttcagaagctgccagcagacagggtacagagggtacagcacagatgtaacagttgctgaataaatgaatgagaaacctcatacacagtagtacgtattatacaaatagtaacaggtacacatagtcacaggtactgcataacaaatgcaatcttgttctcattatttattagtttacagacaattaatttattcagtattgtgctggaagaatctttgtggaatatgtttaccaacttatcacttaccttccagctatcagttcatgctgctaagaaaaaacaatgatggaatatttttgtgtgtgtgacctctacatttaatttgatatcaggcatagtcacttggtcgttaaaaactgaaactttacagttccaccagctaattacatctgctatttctgcttcacagatatgctttgagttgctttggctttgtcttcctttgtaaatactcttgtactttcttttccttgtaaacatctcgtttgcagttttgggagacgactttgcaactctgtatagtgtttatatatatatgtatatctatatatatctgacttgcctttccatacagctactcacaataaatgtgttcatgtaaattattcctgtagagattcattttttaatactattgtctctactttattataaatatattttcctgctttgtagtaggattgactgcatttttcagaatgaaacaaatggggtattttagggtttgggctaaaggtactttgcctagaaacatgaggcttttcaatagagtcaataaagtcaactcttgatttttcaaatgtagaggtgatactagtgtagaacaatttataaaatgacttacctaaaatttcatgcagaccttggataatgagtgaatcctatattgaagcaactactcaaggaggttgaggtgatcatttactttttttttttctgtctccttcccttgacacttaatcttgctctttaaattactctttttttttttttttgttttttttgagacggagtttcactcttgttgcctaggctggagtgcaatggtgcgatctcggctcaccgcaac

SEQ ID NO: 5786 - DNA, 1053 bp, Homo sapiens
tccacctgccttggcctcccaaagtgctgggattataggcatgagccaccatggctagcatttttttaaacttctaatctacaagaacaaacctatacattgaatcttaatgaagagacacaactagtaagagggaaatgtactgttcccactcagtgcttcatccagctgcaaatttgttacattttaaaaatccttgagcccaggagtctgggtggggctgcagtgagccataatgatgccactgctcttcaccctgggcagcatagtgagacctcatctctttaaaaaaattgtaaaacctttgatgagaaaatgaatacttaaaatgtatatttccagtttaatagacaatcttgtacttgaagcccactctgggggatgttttccatggattcttttaagatgtctcaaataaaatagaatacttggtactttgtggtgacctgatcttaaggtaacactggcatcccataatcaatttgctgatcatttattcctatcccttctctggtccagcaccttcttctatgtatctgatcaccccctgccacactccccattatgcacccactcaaaagcagaaagccaagagaataatgctggaacttttttcttttattaaacagatgggaatttcaagtctcctttgcaggtatgactttgttctattagaagaaattcaatgattgagtctagagaccatcaccaatgctgtacttaaatcctatgacttgtgccacataacctggtgaaggcagagtcaaacatgtagaagaagaagaaaaaaatctgtttctctgcacaatgcctggctcactcttgggctccactggaagaaagtagaacagtgcacgcacgtgcaaagatgctgtccaccagaaatgtcagtgacagcctgggggcaagaagaataactgcccttgtgtctttgcccagctgatattcctcacaggcagccagcagagttgattaaccatgtccatgcccaggcagtctcctctgtatatctctcaaaaacttctagttagattttgttttgttttgtgttgt

SEQ ID NO: 5787 - DNA, 1816 bp, Homo sapiens
ccttcctggactccctgttagaatcagcttggccagagagcccgcctcctcctctcggtcctcccttggcccacaggcctggagattgaccgggaggatttggcacagccggaggtggctccgcctcccgagcccgccgtctcctcccttgctcacctctactggtggccgctcgcgcccctccattgcgccggtagcaggatccgcagcggccgccgcgtgaggctgtggtcacgtgttgttttgcccgctgtcgtgcgctcagagtggagtgggcgggggcgcgggccaaggcaggagggggctggggcgggcagacgagggtagacagcctcttcccccaaccctccctttcctgaattccccctcctcctcgctcaccttaaaaccatcgtgcatcaccatggcgagttgctccttcactcgcgaccaagcgacaagaagactaagaggtgcagcagcggcggcagcggcagctctagcagcagtggtgaccaccccgcttctttcctcgggaaccccgaccgcactcattgggaccgggtcgtcttgtccgggagccatgtggctctccacggccactggctcccggtcagactccgagtccgaagaggaggacctgcccgtcggggaggaagtctgcaaacgcggctacctgcggaaacagaagcatgggcacaggcgctacttcgtgctcaaactcgagactgctgacgccccagctcggctggaatactacgaaaatgccaggaagttccggcacagtgtccgcgccgcggcggctgcagcagcggcggccgcctctggcgccgcgatccccccgctcattccaccgcggcgcgtgatcaccctataccagtgcttttccgtgagccagcgagcagatgcaaggtaccgacacctcattgctcttttcacccaagacgaatacttcgcgatggtggccgagaacgagtcggagcaggaaagctggtacttgctgctcagccgcctcatcctcgagagcaagcgccgccgctgcggcacgctcggcgcgcagccggacggagagccggccgcgctggcggcggcagcggcggcggagccacccttctataaagatgtgtggcaggtaatagtcaaacccagggggctggggcacagaaaagagctgagcggcgtgttccggctgtgtctaaccgacgaggaggtcgtgtttgtgaggctgaacaccgaagtggccagcgtggtcgtccagctcctgagcatccgtcgctgtggacactcggagcagtatttcttcttggaagtaggcaggtccactgtcatcggtccgggagagctctggatgcaggtcgatgactgtgtggttgcccaaaacatgcatgagctgtttttggagaagatgagagccttgtgtgcagacgaatacagagcccgctgccgcagctacagcatcagcatcggcgcccacctgttaaccctgctgtccgctaggaggcacctgggcttggtgccgctcgagccgggaggctggctcagaaggtcccgctttgagcagttttgccacctcagggccatcggcgacggggaagacgagatgcttttcaccaggcgcttcgtaacacccagcgagcctgtggcccactccaggcgaggaagactgcacctgcccagagggcgcaggtcaaggagagcggtttcagtgccggccagcttttttcgccgcttagcacccagcccagcacgtccccggcaccctgcagaagccccgaacaatggagctcgcctgtcttctgaagtgtctggttctggctctggcaactttggggaggaa

SEQ ID NO: 5788 - DNA, 1506 bp, Homo sapiens
gtatgttaatttcatatctggagactttactaaatttatcagatataagtgtattggtggagtttttaggtttttctagatgtaagatcatgtcatcaacaaagatagacaatttaattttctattttaaagtttggatgtcttttattattttttcttgcctgagtgctctggtttggaattccagtattatgttgaatataagtggtgaaagttgacatccttgccttgttccagttctcagagaagagtccacgtagtctttatttgttgaggtatgttccttctgtgcctcgtttgttgagagtttctatcatggagggatattgaattttattgactgctttttctgcaacttgagagagaatcatatggcttttattcttctttccattgatttgatgtatcatatttattgatttgggtatgttgaatcacccttgcatccctgggataaaccccacttgaccatgctgtatcatttttttcatgtgatattgaatttgatttgctagtattttgttaagaatttttcgcgaaggcccgcggcgggtgttgatgcgatgtgatttctgcccagtgctctgaatgtcaaagtgaagaaattcaatgaagcgcgggtaaacggcaggagtaactatgactctcttaaggtagccaaatgcctcgtcatctaattagtgaggcgcatgaatggatgaacgagattcccactgtccctacctactatccagcgaaaccacagccaagggaacggacttggcggaatcagcggggaaagaagactctgttgagcttgactctagtctggcacggtgaagagacgtgagaggtgtagaataagtgggaggcccccggcgccccccggtgtccccgcgaggggtccagggcggggtctgccggccctgcgggccgccggtgaaataccactactctgatcgttttttcactgacccggtgaggcgggggggcgagccctgaggggctctcgcttctggcgccaagcgcccggccgcacgcaaaagagctcctgaaggaagcgctaaacatggaaaggaacaacgggtaccagccgctgcaaaatcatgccaaaatgtaaagaccatcgagactaggaagaaactgcatcaactaacgagcaaaatcaccagctaacatcataatgacaggatcaaattcacacataacaatattaactttaaatgtaaatggactaaatgctccaattaaaagacacagactggcaaattggataaagaatcaagacccatcagtgtgctgtattcaggaaacccatctcacgtgcagagacacacataggctcaaaataaagggatggaggaagatctaccaagccaatggaaaacaaaaaaaggcaggggttgcaattctattctctgataaaacagactttaaaccgacaaagatcaaaagagacaaagaacgccattacataatggtaaagggatcaattcaacaagaagagctaactatcctaaatatata

SEQ ID NO: 5789 - DNA, 1132 bp, Homo sapiens
ctaaaaataactgtaattatttgaatgactaagaggaaagtacattttttgaaatgctgaaaattgcctttctgtgtttattcaaactgaaaagctgagaccaagagcaaggaaggtaaaaagttaacaggcaaacattttctcttagaaaaggtgataaaatcataagtatttggaattagaacccttgcacagcactgaacctgggaaagagatttaaactctgaatttatctttgataacagggattgattttaaaatgtacatgtattaaattacatttgtaatttaaggtctgtttgctgttgctgattttattcttgatcagtagtttgcatttcagaaagcctttcattttgctttaattttagcaaagcgggttataatgaatgacttccccaatatcttgcttgaacttacaggtgattaacttggatgagttttgggaagttaaagggaagaaaacactgttatcattttttcctgtttgggaagagcttagaaactggaaatactagatttgggagaagggcagagttacttgataagggactgatgtttgtgcagtaacttgggagtgtggtttctttttgaatctttaattaaaacctgggattatatatccctgataaatattcacacttgaaccatagttactgtaaaatgcaaaaaatcttaatactgttattctttgcactttttcttaatcattttttatatatatgcatatatatatgtgtgtgtgtgtgttgcttatgttgttttgtacagatgtgggccaccattgcaacaaaatacattctttttgctctaaaatatttatgaagaaaatacttaaatgttatgtatatggtggtaataagggaaaaatcaagtattataaacaagaatgaaggtttttgtaaagatttctgttcagcgttttgcaaggtaaaattttaggcaagttttccctgaagttatgtgtatgtgagtattctcattcttcccaacttgcctttgaagagtgaaataccattattatcaagtagactactgttcagcttttattcctgccctgctgtttatcccttaagaatgagtttcttagacttttccaatatgtgattttttttcccatttagaatggtga

SEQ ID NO: 5790 - DNA, 1216 bp, Homo sapiens
ttaagaacagaaaagctcatttggtgattttgtctgatgagcctcccttcccctgtcccactctaggcaacacagttgacctagaccagttccagtatttccagtttgaccgtgtttgacctacactgagcttcggtgcctcagtggtcataattttagcaagtggacctataggaagcaaccctgggagggaccgtccttctgcagaggcctgcgggcattgaggctatcaatccccagggcttggggagcaggaggggagggcaccaagtgctcttactctcctgagctccttttgatgcgtaagctttgtttttggccctctttgaaggcagggccaaacttttcttagtgcctctcaccttagggtggccctccagggaaggtgctccttgaatggctggattggccctgcccaccgtcaaactgctacatgtaggaatagctgatgaggaaatacacaaggcctcagtgccccttggcctctttacaaaaggagaagttggaaggggattgtgggaggagcccctgggggcctggtctgtcctccaccagaacttggagttgctgccagcagaggatctgtgcctcagctgaagactagctccggaatgtcataggggtgtgactgtgtaggccttctcctcctcctcgtttctgtggcatggcacaggttgcctggttgctcgagccttccccatgttgacatcctccacaagcttgcctttgctctgtctacagcttagtaccccattctggagggcactttctggtgcttggaaggagagaagaaagcaaaagccacatgcctggcatggccaagccagagacagatccacctgtcagaggaaggaagaagtaaagggggcatgcagggcttttgggggccagattggctcagaaacatgtaggtcaaaagaatagagggggcccagtctataggcttcacaaggagccatggcctgtatttggggcattggggagcataaggcatctgaactggtccagatctcactcttatcttgggccaagccaacgtggagagaagcaacccaaccagactcttggcagcctgccttacagggtagcccaccttatagggtagccctcatatctgccctgtgccggccctctactgccccagctttggtacaggagtgagggagaagctggagcttgcacacccagtggccagtggggctgtcttcccagctcc

SEQ ID NO: 5791 - DNA, 1789 bp, Homo sapiens
ccctcagtatttggttttgtacaccaaagatgatctggcccatcttcctcccagaggcacaacagtaacatgttcctctgtcagcctgtgaaggcatgcagggttctgaagccacagactcagtctccccaagtcagcaatctctttctctctctctcctcaaacttcatcgcattcatagaagctgcttgcagggtcgccgggctaaccagggtgatcggcgaactttaccgtacagtacctcagtctagctgtcagatcaccccttttgctgtagcctctgttgaggtttttatatttgtgatcattggtaattcagtgtcctatgaagtgggcacagctccccacagagagcaagttgtcagcaggtctctgtgcactggtattggggcagggcagtgccctgggggtaagctaggtggctcagggagtggcagaagggccatttttccctctgccaaaaagacttccttggatttgtagatgttgacccagagtcctctgtcccctcctgaagaggattttcttactggtttctactgaaggggaggtaggggaggaggaaaaaaggaccatgtgtgatgctgttagacaagacactgacgctgattatggagggtctcctgcaggcccttgtgggctccttggcaaggccccaggctgggaaggagctccccccactgcccatcctgcccgctttgtggcgggtagagtcagtgacagggaggcagccctccttttgtgtatatagagtgagctgatttgggctcaggaaaacctagtcgcttgttgctctcgtctgtgacatttttgtacactggtttgctactcatggcaagaaacagacaaagccccatgaaaaataaaacaaaacaaaagtcatttcaaacaaagctgttgttttgaaaactcttgctttcttttggtgtccattttgtgttctattttaaagaatctttcatttatattggtgttattgtagtgaagagaatgtgataggctgatctgtaatggtttctgtcaggagcttagcaaatgcctctgcccctcttcccctacccctgtccttcctcagttcccagctgggattgctatgcactgggcagacccgtcactgtctcccctgaacccccacacagtggcttcccttagaaccagtctttgtactctccctaaacagcagcaggcttaggatttttgtcaggctggttcttgcgtgctctgtgcccccaccagtttgctcacctcttggggcattttgtaatgtgttttctctgtcttgtaaaaccttttgattgtaccgaaatggtatctgcagtcgcctttggaaataaatggtcattaatttgtgtacttagcattctgaattttagtctcaggtgtttctgttgttgaagatccttgaatgaaaaggaaccctcaccatggggcttactgttataatgtttcttcatttactgttattaaaagatttatgagaacccaggagtcctggccttgcttcccagaaccctctcagaaggccctctgctttgaaaaatagacaaaaggggcctctggccctccgtactgtggaagaccctcaaaggacagctgggctttctcagcacacttttgtcctgggagctgcgtggctggttgcccttgaattcccacacattgcctacttctgccagggacccagcaggccatttgctcttagcagagggcttgtctgccgggcacgtttgctgggctctctggtacccaaagtgcattgggctaggctggaggactgagctggagaagg

SEQ ID NO: 5792 - DNA, 1177 bp, Homo sapiens
ggctgaggggacaataaaatttttaaaagaacaatttaaacaaggagtagtagagtgcaaagagcactggactcagacttttgatttccaagttctgatcttagctttgctacttactatctctgtgaccttgggcagtcactgcttctctctgggaccccgtttcctgatctataaaattatctttaaggtccttcctagcagtgacaatggcatgtcacctacttctcaatgttaacttttctcttccctgactttctttcaggtatcgtagtgaaaagatgaccctgagctatgctgaataccttgctcatcgccagcatcatcatttccaaaatggcattgggcatccccttccgccatacaaccattattcctgacactgagccgcacaaccagtcactgggcctctctgcagacctcttcccaggagaccctacaccttcttggtctagctatctcttttactgtaccattttatgatgatagtttccgttgccatggtgaagcttcgacatcgtcaactaagatcatcatggtaacgggtagaaaaatggcatttgttaagatcctgttttattattttagatcgttgattttttttttgcagcatatataattttgggtttttttttccttataatattatgtagaattttgctttgctgtctcagtcaggtttctgtttttctgtcctccttgcctttcttcccgttttgcttcctgttttccttcttccttcccgttttccttcttccttccctgcctcccttcctttgactgtggatggaagaaagtgtgcagtttttagggattttacttaggttcgtctttagttttcctcagtaagatagttgttttttgatacctgagtttgggattaattcatatcaaattcaggtatttgtatattactcttgatttttgtctgaaattcactttgctatgacagcctagtagttgggtcttcactccttaagtatatgtttttcccatggtgaaaatacatgaactttagttctagtagtgagcattcaaaggtccgtgatagggcttgtcacagagagagagaaatcatttatccctattgtgctggttatcatagaagagactgcctcaccactttatagaaccaatttgcaaactaaaacactgtttggagaaggtacaaactacc

SEQ ID NO: 5793 - DNA, 1109 bp, Homo sapiens
gtcattttgaatgtataattgaaagacctagtttgtagttctgtcaacttaagttttttaacttttgatttctagctataaagcttcgtggggaccttaacttatttcaaattgtgttgaacaaatttgatttatatttgtaggtgcaggaagctgtttggagactctggaaaaaggaaagccactcgtagtggttataaacgaaaagttgatgaacaatcatcagctggaactggcaaagcagctacacaaagagggtcatctcttctattgtacctgcaggtatgctagagactgattattattatctcttgccttaattcgtcccttgcacttcctcttatccacctacctaacccatctgtctcttctgcctcttaccttctcccagttaccaaaccttttgattttctcagctgtaaaatcctcccatttgtttgtctcccattttgcaatctctgtgttgtatttctatgtgtatctgtggctgtttctttgcatatgtgaatatctgagagagtgtgtgtatgtgtgtttatttaggcgtgcatgtctccaagacactaattttggagttctaaattttgagttcattatttagattttcattattcaaggaagacaatttgctcattttagttaaaagttttgcctatagtaaatccactaaaatccctaaattatatttactctttcatttattcagttacacccaatatataaaaggcactgttttaggtgctgtggatacagtagtaaacatgagataaagtccctgttcttatggtgcttacattctagtggtggaaaattgataataagttcacaaataaatgatcaaggtatttcatgtggtgaaatgtactatgaagaaagtaagacagggtgatgtggtagctggggtgaagactgattagaattgtcagagaaggcttggcagagtacctaacattttgatctgagacccgaaatacaaggaagagccagtcatgtgaagatttggaggcagaaggaacagcaagtgcaaaagcctaagtaaggaatgaacttggagcttggtgtgtttgaggaacagagggaagattagtgttgcaggagcatagtgagca

SEQ ID NO: 5794 - DNA, 1238 bp, Homo sapiens
tgttgaggtgaagatgggtgtgtagtgggaagttgattgcaaacacttattaattaatggcttttctaggttcagagcaatttaactcaattgaaattgtacacttactcaaaatatggttgttcaggctagaaaggacatttttttttctcttttgggtaggagtttagcaattcacagatgtaatactgaccatatgggactattctgactggtggctatttatgttttttagaaaaaaaattgttatcttatgtattttagtaaaaacaaaacaaaacaaaacctcaaaccccagggtccacagttgtggtagttaggggagataagatgagctctgagtggtgaaagaagtttgaaaacctctgatgtggtacttcatgccccacgcatgattttatttagtcttcacaacaccctgcacagtgggtgctgttatctccattctgcaggtgaggaaactgagagttacagaagttaagtattttgactaatatcactcagatgaagttggggctttgtccaagagctgcataactttaaaatgacaggtggaataaaataaagattttcagattgcttcagaacctctctctctctctctctctctctctcactcactctctctctgtctctctctttcaaatccatatcttatctgagagggttagattgaaaaaggtatgattatctgaaggccaaattcagttatagcgcttgagatgatgttgctctgacaaggacagaggaaggagaggagtgattattaaggtatataagaaccagcaaatgtcactcaaatgacaaagtcataaagatggatgtcaaaaggaaatttaagaaaaaaaggcaaagaggctgaggagttgagtattctcagcatggaatttagaggggaaagggagatcaaaaggaagtggggaaattttgatgcctctcatatactaaacactataatatatataaagcttatacgatgctaatagcttatcaccagactgcctgactttcacaaggatcctgtgagaaagttatgctcatcatcattgtatagttttgcattcaattctccagatatacaaatatcagttaaacgccaagtactggctagtgtgaagaaactgagattcagagagattaagtaacttgccactccaaggcagaaccaaatcttcaacccatgtctgaccaattctaaaacccaccgttcagcacatcccaccggggttttaaaaatt

SEQ ID NO: 5795 - DNA, 1099 bp, Homo sapiens
gagaaaccaatcccacttctttctaggagattgggtatcttagataatcttttggggttcctctgtgagtataggaatggtatccttcctaattatcttccaaaggaattattttgtgtgtgtgcctgtgtgtgtgtagagacataaaggagggtgatgtgattttcagctagtcctttcacattttcaataatgaggtaatcatgttacatacacattagtcctcagttataaagtgaatctcagatagaaattaaaagtgcagttgtgttaagactctttcatactaccctttagtcataaggagaaaaaaacactcaaatagtagaagcagcaagtagcaaacttcaggagagctactttctatccaaataatttaaaaaacacttttcacctactcctttcatggttataacacattggcagactttttgctggctctgggagccatgattttaatcacattctgcaaggtgacaaatgtcatacattccacattgtgtggtagccatctctttagactcatgtgttttggggaaaggaagaagttcttggctgagtactattttgaactttccagaaccctctcacaccagagacagttcttctctgttcagtttccaatccccgataatttgctaaaataacattgtacatccaagagagggaagaagagtatgtcagtatattatgcagaagatagatacagccttttcagaagatctccactagtttttgttccaaaaattcaagtttatgggagaaatctcaattagccaccttttcacagttgtgtggatataacatttgggggatctttctggactcctacctatctgtgcattttaccggcacctcaggaaaggagggtgaccaggttgtcttagcttgtactgcttggtgatctctgaggaccttctaattcagttgtaccccagtgttccatgtatagaaaaacttcattagaacaaactttacttgatatgaaactcctattaacagtctttttttgaaataaaaagtagcttgagctttcttttaaaatcatgtatcttgattgttgatttaatgaaggatttccttttaatgctgcttttga

SEQ ID NO: 5796 - DNA, 1177 bp, Homo sapiens
aagggagaaaatagtaactttacaacggggaaactcagcaaaatccaacttaaccaagtgatcaagttcaacaacaataataagactattgacatcatgagctgcttaatatgacacactgaggtcacaacaccatcttgtgatatgtttgggaaaaaccccataatcttaatctagttatgggaaaatatcagaaaatgtttaaattgagggacattctatctgaataactgaccaatgcttctcaaaagtgtcaaggtaatgaaagaaaaggaaagatgattgataaactgtcgctgattggaaaagacaaagcagaaatagtaagtaaattcaatgcaggatcctgagcaagattatgaaagagaaaaagtgcactaatggaaaaacttgtgaattttgaagtaatgtctgtatttagtaaataatcttttactaatgtcaatttcctgattttgataattatactaagattatgtaacaataacattgggagaagttgggtaaaatgttatataggagcgctgtattatttttgcaacttttctgtaagtttacaagttcaaaataaaagattaaaagacgttgttaggctgggtgcgatggttcatgcctgtaatccccgcactttgggaggccaaggcgggtggatcgcttgagtccaggagtttgagaccagcctgggcaacatggcgaaagtccgtctccacaaaaaatacaaaaattaccctggcatagtggcgtgcacctctagtcccagctacttgggaggctgaggtgggaggatcgcttgactcctggggggcagatgttgcagtgagccagatcacaccactgcactcaagcctgggtgacagagcaggaccatgtctcaaaaaaataagaaaaaaatgttgtcaggaaagcattacaaaatttcgagaattactctgttagtgccaacagaggtgaaccaacagtcaagttatacttgtatattggttgagaagttaggaggctttgaaacagcagtttcaagaaatagatatagcaacaattgtagttgaagattttaatgtatgcttcttagaaaatgatataacatacaaacaaatataaacatcactctccatgatgtacttatttcacattattccctgtattaaagcatctcatgtaccccataaatatatacacc

SEQ ID NO: 5797 - DNA, 1181 bp, Homo sapiens
aaatctaaatatacattttgatgaactttatatatcctgtacacttgtattttccttccttccttcctctctttctctttctctctctctctctcttttttttttttttttttttttttgacagagtcttgctctgtcgcccaggctggagtgcagtggcgcggagatgagatttcaccatgttggccaggctggtctcgaactcctgacttcaagtgattcacctgcctcagcctcccaaaatgctgggattacaggtgtgagccaccacacacctggcccacttgtattattttcttaacttaaatgcttaaagatatgttattgatggattaaaacatgagtgtacatttaaagcttttgatatgttgtctccagaagcttttatgtttgcattcccacaagtaacacatggatagctttacttccatacttgttaacactatacattatcaatctatttaatctttgccattctaaaaagaacaaattatatcaaaatgttttatttttcatttcagtgattaaattagtgatgatgagtattatttcaagtttttattgcctatctatattgcttcttttgtaatttgtttgtttgcatctgttgtggtcagaagcactttctattgttgaaatatattgagtatttttatggcccagaatatggcctatcatggtaaaagttctttaggaacttggaaaaaaatgtattctgtggttattggttagagtcttatataatgtcaactatgttaagttggttgatagtattgtttaaatcttcaataccttacctattttctgttttcttgttctatcagttagtaagagaaggttattgaaatctccaacactaattgtagatttatctttctccttgcagttctataatttttccttcatacattctgaagctctattattagatatataaatgtttaggattgtattgtcctcttggtgaatttgtactgtcattctgaaatgacttttctttatattcttgataatattctctgctctgaagtccacttttctgatattaatattgtcagtccagctctcttttgtttagtattagcatgatgcgtgtttctccatccttttatttttaactgatttgtgtctttgtagagaaagcgcatttcttatagttagcatatggtagtatcttcctg

SEQ ID NO: 5798 - DNA, 1179 bp, Homo sapiens
ccaaagtgggtggatcacttgaggtcaggaggagttcaagaccagcctggccaacttgatgaaacccagtctctactaaaaatacaaaaattaggtgggcgtggtggtgcatgcctgtaaccccagctacttgggaggctgaggcatgagaatcacttgaacccgggagatggaggttgcagtgagccaagatgggccactgcacttcagcctgggcaacagagcaagatcctgtctcagaaaaaaaaaaaggaaaataaattaaacatatatatacatatatatagaatgtctctgctatatatcctaatgcaattatttacatagctttagtaaaactccttcttatgcttggcaatgaaatgcaaagttgtaattaagtttgttaattttcaaaggtcttgcaaaagttacatgaccttcattttctaaattgtttcaaataaattattccagctaagcttaaacttttagtttcatagtattttcctctattcccttggttttaaaaaagtaaaaatgggccaggtatggtggctcacacctgtaatcccagcactttgggaggccaaggtgggcggatggtttgaggtcgggagttcgagaccagcctgaccaacatggagaaactctgtctctactaaaaacacaaaattagccggtcgtggtggcgcatgcctgtaatcccagctactctggagactgaggcaggagaatcccttgaacccaggaggcagaggttgcagtgagccgagatcacgccactgcactctagcctaggcaacaagagtgaaactccgtctcaaaaaaaaaaaaaaagtaaaaatgataagaaagaactgaagatttgtgtctatgatattgattcactacacaagaatttgcattttactttctactttagtaaagaaatcgcttaagtggatgataaaactatttgagtacaagctttggcttgacaagaaatctctgaaatcagagatagcacaaggctgactactgtgctggagtcttctcaatgaatcttttcaaagctgcccgttgtgatactaatgagctcactgttttgtgctgttttctctccacaaggaaagacttgctttatcatctgtgagctaactcctgctgtacttttttcaggaagccataaccactcttgatctatacatctttttcagt

SEQ ID NO: 5799 - DNA, 1161 bp, Homo sapiens
agaaaacaaaaagcaaaactgttctaattggaactatcaatatggaatttttgcatcccagcataataattatatatgaggaaatagatgtcttacgtggtgtccttaactgacaagaatttcatcctgattttgtttccccctaaaataggtatgcagtgtcaatggctagaagaatcggagccagagtgtatgctctccctgaagaccttgtggaagtaaagcccaagatggtcatgactgtgtttgcatgtttgatgggcaggggaatgaagagagtgtaaaataaccaatctgaataaaacagccatgctcccaggtgcatgattcgcaggtcagctatttccaggtgaagtgcttatggcttaaggaactcttggccattcaaaggacttttcattttgattaacaggactagcttatcatgagagccctcaggggaaagggtttaagaaaaacaactcctctttcccatagtcagagttgaatttgtcaggcacgcctgaaatgtgctcatagccaaaacattttactctctcctcctagaatgctgcccttgacatttcccattgctgtatgttatttcttgctctgttatcttttgccctcttagaatgtccctctcttgggacttgcttagatgatgggatatgaatattattagacagtaattttgctttccatccagtatgctagttcttattcgagaactatggtcagagcgtatttggatatgagtatcctttgcttatctttgtagtactgaaaatttgccgaagtaactggctgtgcagaatgtaatagaagcttttcttattcttttattcttaagatcagtatctttttacagtattctttctacatgatccttttttgtacatttaagaatattttgattatattaaacaagactgctgattttgctactttttttaaggggtcttcaagtaagtaaaacatacatcgtagctagaagaaaaatgtaccttaaatttgcatcttccctctcatacccaagctgtaaacaattgaaatattttgtcttaaatcacttggttcaatacatgcttatttgttttaaaacctgtatcatcaaactctctctctaaatttaaaatgctgttgaatatgatacttttgaggagagagtgtgctcagaac

SEQ ID NO: 5800 - DNA, 1318 bp, Homo sapiens
gggtgagctttgctgatagcaatatagtgtccccagccagtacctgggtgttccccaccttgggcatcatgcgtcacaacaaacaggccactgagaatacaaaggaggaagtgaggcaaattctggggctgttggatgctcacttgaagacaaggacttttctggagggcgaacgagtgacattgactgacatcacagttgtctgtaccctattgtggctctataagcaggtcctagaaccttctttctgccaggcctttcccaataccaaccgctggttcctcacctgcattaaccagcctcagttctgcactgtcttggggaaagcaaaactatgtgagaagatggcccagtctgatgctaaaaagtttgtggaaagccagcctaaaaaggacacaccacggaaagagaagcgttcacgggaagagaagcagaagccccaggctgagcaggaggagaaaaaggcggctgcccctactcctgaggaggagatggatgaatgtgagcaggcgctggccgctgagcccaaggccaaggacccctttgctcacctgcccaagagtacctttgtgttggatgaattgaagctcaagtactccaatgagacacactctctgtggcactgccatatttctgggagcactttgataaggactgctggtccctgtggtactcagagtgtcgcttccctgaagaattcactcagaccttcatgagctgcaatctcatcactggaatgttccagtgactggacaagctgaggaagaatgccttcgccagtgtcatcctctttggaaccaacaatatcagctccatttctggagtctgggtcttccgaggccaggagcttgcctttccactgagtccagattggcaggtgggctatgagtcatacacatggcagaaactggatcctggcagcgaggagacccagatgctggttcgagagtacttttcctgggagggggccttccagcatgtgggcaaacccttcaatcagggcaagatcttcaagtgaacatctgttgccatcacctagctgcctgaacctgcccttcagggagaaggggtcattaaagaaaactgaacattggaaaaaaaaacatttttggggttgttatttttttatttttatttttatttttatttatttatttatttatttatttatttatttatttatttatttttgagatggaatctcactcttgtcgcccaggctggagtgcagtggcacaatcttggctcactgcaacctctgcctcccaggtataagcaattctcctgcctcagcctcccaagtagctgggattacagg

SEQ ID NO: 5801 - DNA, 1141 bp, Homo sapiens
ggcaagggataaaagactacacattgggtacggtgtacactgctccggtaatgggtgcaccaaaatctcagaaatcaccactaaagaacttatccatgtaatcaaacaccacttgtttccccaaaacctattgaaataataaaaaaagttaaacagaatgggaggctccggcggctcgtgctcgcgcacgcagggtggaggcagggagcgcacgacgtgcgcgcaccctctgccctggtccatcgctgccgcctccttcttctgcagctcctggtgctgcttgtgtgctcgtttggtgcggacctggtacctcttttgtgaaacggcagctgaggagattccggcgcttgccatggccgacgaaaaacccaaggaaggagtcaagactgagaacaacgatcatattaatttgaaggtggcggggcaggatggttctgtggtgcagtttaagattaagaggcatacaccacttagtaaactaatgaaagcctattgtgaacgacagggattgtcagtgaggcagatcagattccgattcgacgggcaaccaatcaatgaaacagacacacctgcacagttggaaatggaggatgaagatacaattgatgtgttccaacagcagacgggaggtgtctactgaaaagggaacctgcttctttactccagaactctgttctttaaagaccaagattacattctcaattagaaaactgcaatttggttccaccacatcctgactactaccgtatagttttctctattctttcatttcccccttccctattcctttattgtacataaagtaactggtatatgtacacaagcatattgcattttttttaactaaacagccaatgatatgttttgattgacatcaagtggagatgggatggggaaaaatactgattctgtgaaaataccccctttctccattagtggcatgctcattcagctcttatctttatattccagtaagttattttgctctcactgttttaacaaaaacaacaacaacaacaacataaaaatccttgcatacctttttcaattggagaattttaatgattttcatttatcattgtaaaaccaaggacaattttataactttttcgtacatagctgctacatgtagggcaatctg

SEQ ID NO: 5802 - DNA, 1429 bp, Homo sapiens
tcacacccggaagctgactggtccacgcatggccaaagcatgagaaaactcattgcgggactcattttccttaaaatttggacttataccatagggacttcaactgaccttcctcagactgaagactattcccagtatatacgtcaagtcactgaggtaggaaaaaagttgctacagtcctattattttatggttattataagtataccaggactctaaaaagaacttgtttgtataatgctattctatacaaggtatgtagcccaggaaatgaccaacctgatgtgtgttatgacccatctgagcctcccatgaccacagtttttaagattaaggactgaaacctggtgggggctcataaacgatatgagtaaagtgttagccaaaacaaaagaaaaaggggtgcccaaacaagtcaccttgaagtttgatgcctgtgttgtcattaatagtaataagttaggaataggatgtggttctcttaattaggaaaaaggctatatggcaaaaaaaaaaaaaaagtacatttgtcataaattaggactgtatggaaatgaacgtgcatactggtcttgtgtcatttcggctacttggataaaaaatgaaaaggatcccgtccaccttcagaaagggaaaagtggcccttcctgtacaagtggtcagtgtaaccccttagaactagtaataaccaacccccttgatcctcactggaaaaaaggggagcgtgtaaccctaggaattgagggggctggactggatcctcgagtaaatatcatggcttgaggagaagtttataaacgctctcctgagccagtatctcaacccttctacgattaactgaatgtgtcagtaccagaaattccaggaaaaacaagaaatttgtttttacaattagctgagcatgtagcctagtctctcagtttcacttcatgttatgtatgtggaggaactataatgggagatcaatggccatgggaagcctgagaattagtacctacagacccagttcctgatgaatccccagttcaaaagaatcaccctgataacttctgggtcctaaaagcctcaattattagacaatactgtatagcaagagtggggaaggacttcaaccttcctgtgggaagactcaactgccttgagcaaaaactgtataatattactacaaaaacagccacctagtggagttcaaaccacactaagaaaaatccatttagtaaattcccaaagttgcaaaccatgtgaacccacccagagtcccactgggactgggcagcccccactggattatactggatatgtgggcatagagcttacaccaaattaccctaccagtgggcagatagttgtgttattggcactattaaaccatctttcttcctactgcccataaagacaggcaaactcctgggcttccctgtctatgctt

SEQ ID NO: 5803 - DNA, 1174 bp, Homo sapiens
gatttcaacctttagatgagttctaatgctgaaatgggcccagagacagtggactggtggggcacataacctactgaaacatcagctggggtggctaagaaagtgtgggcattacctctcccctaaccccaagctacatagctcacagctccaaaagagaccccttccttctgcttgatgagagaggagggaagagcgaagaggactttttattgcatgttgaataccagctcagccacagcaggataggacactggtcagaatcccgaggcccccattccaggccctacctcccaggtaacgtttctagacacaacccaggccagaaaggaacttgctgccttgaagggaaggacccagtcctcgcagcatttattacctactaaccgaagagccctagaccctgaatagcaagcagagatatccaggtactactttgaaggacttcagtgggactctgagacttactggcttcaaacatgtctcagcacatttccaactgtagtggctacagggcgagacttcttctgcttaagagcagaggaaagagtaaaggggactttgtcttgaaccttaggaaccaggtcaaccacagggggctgtaccaagtgggctcttggagtacacaattccaggacttgcctcttcaatggtattcctggacctctcctgggccaaagggaagcccactgccctgaaaggtgagtcccaagtcaggcagcattcatcacaaacagacataggagcccttggacctaaagggaacattgacagtggtctggcaatactccccatgggcctgtgatggtgatgaccacagagtgaggcttctttacatttggaaaggggaggggagactggaacgactgcattttgtgccctcactgacagctcagccacaatacaatagaacaccagcaagacttctaaggttttggactcttcttcctgactccaagatggcactcttggacccacatggggcctgggagcactcactgctctgaagggaagggtgcaggcctaactttccacctgctgattttagagtcccagggccttgagtaaatataggcagtagccagggagtggttactgcaggcgttggaaaacatgcagtgctgtgctggcttcaggtctgacccaacacagtcatagtggtggtggccacagg

SEQ ID NO: 5804 - DNA, 1199 bp, Homo sapiens
cactctaggcgccttccttctaaagatatgttggaaacgcaccagacatctcggtccctcatagcaaatgttccacctgactgcgtctagttggccatcttgctcgatcctctttatccctttgaataaactttctacccctatctttttctctacctcctctttaaaacgaataacttttagatttgaccttttgaggctgttttctacattctgtaggtgtgctttattgtttttccttcctttttctttcgtttcctctgtatatttccaaatagcatgtctttaagctcactaattctttcttctgcttgattaattctgcaattaaagggctcatgcatggggtgcagtagtgcatgcctgtagtctcagctacttgggaggctgaggaagaaggattgcttgagtccaagagttctggactatattgcactatgctgatcaggtgtccgcactaagttcggcatcagtatggtgacctcccaggagtgcgggaccaccaggttgtctaacgacgggtgaactggcccaggtcagaagcgaagcaagccaaaactaccatgctgatcagtagtggaatcatgcctgtaaatagccactgcactccagcctgggcaaacatagcgagaccccgtctctaaaaaataaatgactctgatgcattcttcagtatgccaattacattttccacctccagaactttcacttgattctaattttttcaatctctttgttaaattattctgatagaattctgaattctttctctgtgttatcttgaatttctttgagattgctaaacacagttttttggggttctctgtctgaacgtccccatatgcctgtttctccaggattggtccctggtgcattatttagttcatttgatgaggtcttgttttcctggatcgtgttgatgctagttgatgttctttggtgtctgagtatggaagaattaattatttattttagtattcactgtctgggcttatttgtacctgtccttcctagcaagactttctagacatttgaaaggacctgggtgttgtgacctaagctctaccttctttagggagtaccctaagctcagtaacactgtggttcttgcagattcgtgaaggtaccaccttgatggtcatggaccagatcgaggagaattatctggattaccaggcagagactcttgttttctctct

SEQ ID NO: 5805 - DNA, 1155 bp, Homo sapiens
ttcaggtttgtttacatcaaaattcagaatttaattcaacaaacttttatagagtctgctatgtgcagatattttccatcctcaaggactttataatctactatgaattataagaaatgtggtgataatggcattttttacttagtgctcagtagtgccaaataccgtttccttagactgcttcctcacaggcacctattaggtagaataattattatcttaattttacagataagtaaagtgagtcctagagatgtcaagtactttgcccaaggtcagtcacacagcttacgatgatggtcttgggaataaagcccaggtttgtctggtgctgaaggacttaattgacaaaggactataataccaaacttattaacaatgactctggcatgaaaacctgctgggcagcctccaagaaaccaaagcctgtgggtcccttgcggcagagtgacagagagtagggttgcagagttgacactcagaggatgtgacagaagggcaccacgaggtgtggagcctgaggctgaatttgactcaagagtggaaacttcacctggcctggatacggaaaggactgtcaggactgacagattgatagctctcttgattctgtagaagactgtgcataattgtcttaaatcagtagcgatttacatgatcaatcccattaacaagacaatacagatgtgataagtggcataagggagctttatataaaacgccgttgtgattcagataataaaaaataaaaataaaagcttgcatttccacaatgctttctctgtgtcaagcactttgctaagcgccttacaggcatcatctcactcaagcttcgcaacacttaccttatgaaatgagtaacttttctcacgctcatatataactctgatacatttagcatcttgttcaaggccacacgactagtaagtagtggagctaggttcaaacccagatctgtgctgggtgcactggctcacctctgtaatcccagcattttgggaagtggaggcaggaggatcaattgaggtcaggagtttgagacgagcctagctaacatggtaaaaccctgtctctactaaaaatacaaaaattagccggatgtggtggcgcgtgcctgtagtctcagctacttgagaggctgaggcaggagaattg

SEQ ID NO: 5806 - DNA, 1183 bp, Homo sapiens
gtttcgccatattcaggctgatcttgaactcctgacctcaggtgatccgcctgcctcagcctcccaaagtgctgggattacaggcgtgagccactgcgcccagcctctcttccactttttgttttccacattttctacgtgcacacaagacttttcagtcacaaaatatatacacattttttaaatgtggacttgtctgtagtaagtgtatagaagtatttgtcttctcatctcctctattcaacacctccttacttttatttctgaacaggtctccaggaaaagttgggctttcaacattcaaggtaagttgtgctttctgaaagttatgtttttagaaattgtatactttttattcgtgtttttgtgtaattcttcattttcttgcttttgcttttttttacttactttttgctcagtaatgtagtcattatgtcctacttggtatacataggtactctagaaatacctaactaaatattatgctgtaaagaaggaactgtaagtattttttagatttctactgatttttatttgtttataatatctagaataaaagaacgtgtgtgtgtgtgtgtgtgtgtgtgttgaaaaagtgatacttggccaggcatggtggctcacacctgtaatctcaacacattggggggctgaggtgggcagatcagttgaggtcaggagtttgacaccagcctggccaacatggtgaaaccccgtctctactaaaaaaaaaaaaacacacaaaaattatccaggtgtggtggcgcagacctgtattcccagctacttgggagactgaggcaggagaattgcttgaacccaggaaatggaggctgcagtgaactgagatcgtgccactgcactccagcctgggtgacagagcgagactccacctcaaaaaaaaaagcaaaaaattaatacttgcatgacaaaaatgtacagtaactgaaacacatgtatacttcttgtgggcccatgtaccatcactatatataaaaatcaatcccagcttatattcaggcagaggagtttggtattgagatattatgccactgagagccattttaagtataagatatcaccaaatggaactatttatatcagatagagtatatattgtatatgtatatttatatgtatgtgtaatctcaaacatgctatatttttttcagttccagtatac

SEQ ID NO: 5807 - DNA, 1148 bp, Homo sapiens
aaaggacagactgaatggtattcgacgagtcctggccttcatatcccgaaaccaaaactagtgagtggattgccgaagaggagctcccaccttccccactgccgtcggggggagtcttcttgtaaatatatctaattgcaataatatcttaacagaagggggtgtcaaacagaggcatcagcctgctgttgatcacagagagaaattgagtagaaagaccaaaagaatgtgacctatttgaaactttctgtcttaagatgcttcttgacatgctgcataactacataaacagcagaggtgtttaagagcccagaaaaacataatttgattttaacattaaaatttccaaaagtttaaagtggttttgctttaatattctttctttcatagatcaatgactgtgtggttgaaatgtgaaaacaaagatactaataatgttgctgtataatttcactgacttgaggtctcattccaaatggttcaggttttatagagcattgtgtaaaataatgttcatacttctttctgttttaataatttattttttgcactactgtatccttttttctacatgtatgtttgtaactatttaagcgtacattgctgaaaagtccattgctttatttattgatgtggtttaccatgtacctagggggaaataacaatactagaagtgtgcagtttttgcttttatcttttttttactacaatgacactagttcttagaccatttccgtatctatccaaatggatgcttaaaagaagttcagaatgatgctaagatcatctgtcttcagagtccacttttttttttcagtttgaactaaacaatataaaatacttaagggatttggcctagattatggtatatgccaaggtaaagtaaaataattcattttctgtgtgtaatacagaacaaagctgaaagaattatttttattataggcatttacttcagcaatctaattgtacgtgtatctaatttttccccagtgcagttaggaatcggattttgggcaggatcataattaactcttcagaggaaatggtgttcagtttagcacatcacagtcatgcccaactagcctccataacccacctctccccggggttctgaggatcaagacctggacagaaacacttgataa

SEQ ID NO: 5808 - DNA, 1222 bp, Homo sapiens
aaaacatagtgattacaatatttagaaagttttgagcacttgctataagttttttaattaacatcactagtgacactaataaaattaacttcttagaatgcatgatgtgtttgtgtgtcacaaatccagaaagtgaactgcagtgctgtaatacacatgttaatactgtttttcttctatctgtagttagtacaggatgaatttaaatgtgtttttcctgagagacaaggaagacttgggtatttcccaaaacaggtaaaaatcttaaatgtgcaccaagagcaaaggatcaacttttagtcatgatgttctgtaaagacaacaaatccctttttttttctcaattgacttaactgcatgatttctgttttatctacctctaaagcaaatctgcagtgttccaaagactttggtatggattaagcgctgtccagtaacaaaatgaaatctcaaaacagagctcagctgcaaaaaagcatattttctgtgtttctggactgcactgttgtccttgccctcacatagacactcagacaccctcacaaacacagtagtctatagttaggattaaaataggatctgaacattcaaaagaaagctttggaaaaaaagagctggctggcctaaaaacctaaatatatgatgaagattgtaggactgtcttcccaagccccatgttcatggtggggcaatggttatttggttattttactcaattggttactctcatttgaaatgagggagggacatacagaataggaacaggtgtttgctctcctaagagccttcatgcacacccctgaaccacgaggaaacagtacagtcgctagtcaagtggtttttaaagtaaagtatattcataaggtaacagttattctgttgttataaaactatacccactgcaaaagtagtagtcaagtgtctaggtctttgatattgctcttttggttaacactaagcttaagtagactatacagttgtatgaatttgtaaaagtatatgaacacctagtgagatttcaaacttgtaattgtggttaaatagtcattgtattttcttgtgaactgtgttttatgattttacctcaaatcagaaaacaaaatgatgtgctttggtcagttaataaaaatggttttacccactatagtgtggtgacttatttaaatttttttaaaaaccttattctagggaatctgattcagacattttactttggcttaaa

SEQ ID NO: 5809 - DNA, 1264 bp, Homo sapiens
gcacaactcaaatccatgttgttcaaaggtcaactgtaggccgggcgcagtggcccacgcctgtaatcaccacactttgggaggctgaggcaggccgatcaacggaggtcaggagtttgagaccagcctggccaacatggtgaaaccccgcctctactaaaaatacaaaattatcctggcatggtggcacacgcctgtaatcccagctactcaggaggctgagacaagagaatagcttgaacccaggaggtggaggttgcagtgagctgagattgcaccactgcactccagactgggcaacagagcaagactctgtctcaaaaaaaaaaaaaagaaaagaaagaaaaggaaaaaaaagaaaaacaaaagttggttgctttctgtaaatgtgaccagatttgaatgaatgcatgtaaatctatgctgtactttgctggggaggtttttgtcagggataaggatgggggcaaactatgttaagggaagtgatgacaagaaagccttccctgcgattaagaaattataataatatatgcttaactggcaggggagataccatgatcacaaaggtggttttcccagggcgaggcttatccattgccctctggatgtgctgacccctgcgatttccccaaatgtgggaaactcgactgcacaatttgtggtagtgggggactgtgttcgcgctttcccttgagaaaaaaaaaaaagaaagaaattataggccgggcacggtggctcacgcctgtaatcctagcactttcggaggccgaggcaggcggatcacgaggtcaagtgatcgagaccatcctggctaacacggtgaaaccccgtctctactaaaacacaaaaaattagccgggcgtggtggtgggcgcctgtggtcccagctacttgggaggctgaggcaggagaatgccgcgaacctgggaggcagagtttgcagtgagcggagatcgcactactgcactccagcctgggcgacagagcaagactccgtctcaaaaaaaaaaaaaaagaaagaaattataataatataataataactaccacttattggtcacttaatgtatacaaggcagtttattatcccatttaactgtctttattgaccctatgaaataagtactcttagtactcctattttatagatgaggaaacaaggcacaaggtgtaagtcacttacccaaccatcacatagctagtaagtaagtggcgaagctgggacttgaacctatgtctctccttcctcaggccctttttt

SEQ ID NO: 5810 - DNA, 1097 bp, Homo sapiens
ctctccagtgccggctctagagggcgctcctgggctagcgtgtagggctggcggcggcggcgctcgggtcacctctgggagcggagtgggggcggagcgagacggaagcagctcaggagacttgaggcgtaggctgcggtccccaaggtgaccgcgccctatgtgggactcgccctaatgcctctgaacctgggtttgaggtaatgacctttctcctaggtctgaaggtcacgggtccgctggaggatgccccctctccactcagaggggtggaggcttaatgctactggtgcagatcacctcttcccctgtgacagcctcagagggttgggagggtccagccagtatgatatacgaagactagatttgagagaggggagcctaccttaaagggcattgatcgagatggcataagctcttctctttcccttccccatggttataactgtccctgttggcttccttcctgtctgttaggtgcagcatgccagcaagcagatcactgcagataagcaatacaaaggcattatagactgcgtggtccgtattcccaaggagcagggagttctgtccttctggcgcggtaacctggccaatgtcatcagatacttccccacccaggctcttaacttcgccttcaaagataaatacaagcagatcttcctgggtggtgtggacaagagaacccagttttggctctactttgcagggaatctggcatcgggtggtgccgcaggggccacatccctgtgttttgtgtaccctcttgattttgcccgtacccgtctagcagctgatgtgggtaaagctggagctgaaagggaattccgaggcctcggtgactgcctggttaagatctacaaatctgatgggattaagggcctgtaccaaggctttaacgtgtctgtgcagggtattatcatctaccgagccgcctacttcggtatctatgacactgcaaagggtaagtttgctgtgggctttaacgttgtgttcttaggagacagtttaaaagagcattgtaccaacctaacagtccaagagctaaagagttgtttttttaattgctaaaggaagccaagatcatccaatgcaac

SEQ ID NO: 5811 - DNA, 1143 bp, Homo sapiens
agaaaaatatatattgatgtgtttgtcacctccctactcctgtcattacatttactttattaaaagcaaaataactgttgtgctgtttccatcttccttgccaagttttcctaccccttctaccctctccttaaacatcagaaaacaccctctatgaaatcaaatgtactgtacctgggttacttgcaaaaattactaatgcttcagtttttctgttgtatttcatttccagttttcaggcagttatttttattattgtactttaagcttttaagatgaattgttatacaagaggtgcttatgcttagcttgatgaccaggatgttatttttaacaaaatgattgctgaagtgtttcatcctggctggtccttcacttgtgttggatttagaagtgaatgtgtttggaatatggcctacagagaatagaaacaaatccatgtaaacaattttgaaggaggcatgggagctaaaaatcctgtgatactaagatctcagtcatatgaattacaacgtagtatttactggcaagaaggagaaagttgaaggactcagctaaaggagtacagcaattgtagtaactgacacatcctctctttgcaagctgctgactgggcacactcatgccaagtttcagaattattggtcttctgggtttttgctttttaaaagaggtgtgggagcagaggaatggaaacaatcgtgagtttttgagctagggaaagttggagctcctttaatctttttaaaggatcagtgctgccctaagtgaataaactcaattgtccatctttattttagagttttaatgaattcaaggaagggagcatagcatatctgtggcaaactattttccactcaaatcctgagttattgctgcatgctttaatttcttccctttcagcatctgagaaccttaaagccaatgtctgcgatctttttttggatatttatacttttagatatatagtacctttaagtagcagtatgggacaaggcttgtaaatgttttgtctaatgttctattgtcaccttttatgcatttatcacttccaaatctaactttgcacaagtaacccatgtaaaaaaaaatgtacatttttcaaaagttgtaaataaaaataaccttaaaatttcatagtca

SEQ ID NO: 5812 - DNA, 1168 bp, Homo sapiens
ctcaaaaaaaatatcatgcgggagcttttatatgtttgtgacccattatgagggggttcagagtatgtctgtgtacctccaggtccattgaatcaaaagtgggtacaagtacacttggagagagtgggcttcgccactactctgatcctagttaagagcctagccttcaaattattttgagaggataaaacttgacttggctagtttttaaacacatagggaattattttttttactctccagaaagaactccaaacttgttagaggagagaaaagcagtaccctttgtattttgtggtacctaaaaggttatgtgaatgggaacagctacattgctgtcagactgcctttgtaacttgacatttttttctgtgtaggtacaactccaaaaggagacattggagaagaaccaagctgggtctataaggaattgcacatgagatggcacacatatttatgctgtctgaaggtcacgatcatgttaccatatcaagctgaaaatgtcaccactatctggagatttcgacgtgttttcctctctgaatctgttatgaacacgttggttggctggattcagtaataaatatgtaaggcctttctttttaattgctgttgtattgtggtttgtcaattactgaattctcccttccctgccaaacctaataacaacactatccagtagaactttctgcaatgatagaaatgttctctggctaccatgtgcttgaagtgtgtttagtgtaaaggactgattctgtaaattttattttatttttttttaatgtatttatttattttgagacagagtctggctctgttgcccaggctggagtgcagtggtgcgatcttagctcactgcaacctccacctcccgggttcaagcaattctcttgcctcagcctcctgagtagctgggattacaggcgccccccaccacatccagctaatttttgtatttttagtagagatggggtttcacaatgttggtcaggctggtctcgaactcctgaccttgagatccacccacctcggcctccccaaagtgttgggattacaggcatgagccaccacgcccggcctcacatgagttttacaattaatcaactcccccattcacgtctagtgcagggaaatagcaatcgcagaattttatttttagtagagatgg

SEQ ID NO: 5813 - DNA, 1099 bp, Homo sapiens
tttaccactgtcacgggtcttctgtatcattggattgtgggtcacccgcttcttttccggtcgaaccacagtgcagccttcgtcgctactgctgccgctttctccgggctctgggtcgcaggccgggcgctttctgcgtccagcagcccctttccgcccaggctttttgaaaaggaaggtgcacacctgatccaccgcctttcctggagaaagctgctctgccattttagagtcctgagctccgaaacagccgtggctgcctgggttgcacttggcccctgcacgtcactccacgttgcgcgctccgccgggagtcgaagcaaaagacactgacggaagaggactgcgagagcccgagcgcccgtctctcttgtgccctagcagattccgtcgcttcttccggagccgtacgtggcaccgccccgctcgcgggcggccgcggggcttgctgggaagagaggcgaagccaggtcacctttcaaggacccagaagtagggttttggcctaggtaacggggcagagatgtggttcgagattctccccggactctccgtcatgggcgtgtgcttgttgattccaggactggctactgcgtacatccacaggttcactaacgggggcaaggtaagccggcttcggcccgggggccgactccacgggctgatttccgaaaagggtggtgggcagggagaccgtcagcctgcgaaccctctctccgaggtcggccctctacttgcttccggttgcctagaagccgaggcttgcgaaacgaagcccgatagaaactacatcctgctctagtgaaaaacagcgtttctgggtgtatcagagtgggccttagggcagagtagcgacgcgggggccgggaaggtagattagaaaaggtggctcaagcctgagaatcgctcactgcaacctccgccttctgggttcaagagattctcctggttgggcgcggtggatcacgcctgtaatcccagcactttgggagaccgaggcgagcggatcacctgaggtcgggagttcgataccagcctgaccaacatggagaaaccccgtctctcctaaaaatacaaaattagctgggcgtggtggcgc

SEQ ID NO: 5814 - DNA, 1189 bp, Homo sapiens
cttgactttgaacttaaagctttaatcataatttctcatgtatacatcgttcttctgatggtaagctggatttgaaggtagtggtttcagtgtttcttaagttggtagctgagggtatcaggcatcagttcatgcaataatacaagaaaaaaaatcctttgcttgccaagaggtagagtgatgtgcatttatctgttttctgttctgtaagtctagaccttcaaaccatttgtaaactaacccctgggaaatttgaaattacctgataacttaagactctgtgatctctggaatcaccatatgtttcttttttgtgtagatattaataacattactctttgactatagtgtgcactctgaaatgtactcagtgaaaatttgttttgagtttcattaatgctatttcaccagttagacataattacttctaccgatgtgaatgatacggatgccggcagagcttccagatctttcagactcaactgctaggtcaattagtttgtcataataaaacttggcagattctacaagtctattatgacaaaccaggaactaattctataatggaaaactatccattctgaataataggtatgtaattatttgctgctgctgctgtgctctgtaaattctgaatatgacatttaaactctgtgcctactaaaggtatcttctggagtttttgggaggagagaaactggaaaattaaattgtatttttgccagaagactcttacttgcatgtgtctcagggtcttcagtttttctataagtttccatatccaaagttcagaattcatgtgaaatacttctttggggcaaaagtccttcattcctggtatttattggattggaaatctgtagcaagatgctgtttaaaattaccatattgtttttttatcttatacttagctctctggctattgaacttccttttcttgtttgaagttagcttcaaatttgctcctatgctaaattacctgtaaatattctggataggaactacttgaaatagtaatttgttaaaagatatgacaaaatgaaaatgcttaaactacagaaatttaaaaatgccataacaatcttgcgagactaactttaaaatatactttaaatgattattatgattttggtggtaacgatcccccacacacaaccactatgaagaaataatgccgcatttttccccc

SEQ ID NO: 5815 - DNA, 2454 bp, Homo sapiens
gaagcagtgtaattaatggaaatagttgagtggactttttctcagtggttaacatgcccattttaaagagtaatacttacctttaagaagaatgttgttgaactctttgcatgttatttagtatgatgtgcagaaaacacttaagaacgtacctggtcttcatgaattcctctttggaactgggaaagagatccctgtggctattaaaaaggggggagggttcttacacaccattaattatgaagcaaaaggtttatttgcttaaaatgtcatttaaagatacttaaactgcatgcaaactttatttactgtacagagttctggatgtatttatcaaatagaaaaaccacccttgacttggttgttcacccgttttgtgatttcccttgaaaagagaaatgaattgtcatagctattgatattttactaggtgatgttctgttacactgaaagggatgttttttaaaaaaaattatttggaaacaagttttcaagtagggggacagttgcttacataatatcttgtatattcacatcctaaaaattttcatttatgagtatgggatgtgtgtatatggcttagccccaagttaactgtgctgattaacaagtacttataaaaatagctaaagtagaaaattaatgatcagttgtactagaggaacatcatagaagagaaaaatccaactctttatattaaaaatgaatacaataagaaaattgcaaaagagaccaaaatgaacgtgttttgtaaattgttacaggagcaaaaactttgcaactagttttcaacatactttagactttaaatgttgtttggacagttttgtcttcaacttggaccaattgtagattgttacaggcttcctaggatttagcattcctattttctctaccaaagttttttttagaagcatcccaactcttctctttgttgataaataagcctttcctgtcatcttcattttaacttgctaaaaccctagatacaaaggtcctccctcatttttcccacagagcccctgtttgggaatttgagattctgtgtcatgctggttttcctttcagaattgcttgaaatcgagttctcttagccactggacacctagttttcaggagaatgtcccaagattgtttatatatacaaaatggcaaaagtactgtttttcgaattgataattcaagcaaaggcttctctttactgtcactgatttttttttgtttttattttgtttccttgtttctatttccttgaagctttgaagggaggagaagcagaaaattttgtttatgtttgttaaaaatcagaactacttaatgctttttgccacagcatatttccttgcctgttggagccgttaggaagattacctatgtcctaatcttcaacctgagaagatttttgactcttgtgtctactgttgattgtttgcttgagttctcaaagacctgtggccaggtattttaaaaagtcgtctatttctttctagttgcatcaacttgcacactggtgtctaactatatgtggtattcggaacttgtaattcttattgagcagccattgcctatattttctcagctcctcactgatttctttatatgagctcagctgacaagcaaatgcagctattttgtttaccctctcttcataccggaccatcaacaacagtgttctaactcatccctgatggtctgtgagatgtagactattacacaagattcaagttactcgtaagcaacttttagatagagttggtcctgttaggaggagactcttgatgtcaccttcagtatcttgaaagcgggtcccctccccgaggctcttaattctttgaaaacttgatgctgtttcagctgaaaaattagcaagactgttaaaaaaaaaaagttgaggggagctgtttaagaaactgaaaagtaattgcaaactacattggataattgtgactttcagttgttgttctgtatcagttgaatttttgtgctcttttccctgtgtacgtggtggttctatttttctccaataaaacttttatttaaaaaaagtttctagagaagatctttaaaattcaagtattgtaagaaagttataaaatcacaggacttaaaatcttcctaacaacttctaatgaactcacatttgttgattttgttatttttaaactttttaaaaattttgtaatggttttgtggtaatgctataagagtatgggggagggcatggttaacagggtgaggaaaattcccaggaatcctcaaggtggataattattcttaaacatgcggatacaagtataaacattgcttcattcaaatcctcagtgtcaaattgtttcataaagtcaatatgaaatgagtctagatttgagttcaggggagaagaaaagattactcttagttatggcatttgctctgccttttctgttaatagttttttgagttctgggccagata

SEQ ID NO: 5816 - DNA, 1175 bp, Homo sapiens
cccagaggaggatgccaaagctccgtgcgtcactctcagaatgatatctcccataattaagagcttctggtgctgtccatttaatgggaatctgctttaagtcagaagatgagtacacaccaccatcctcttgacgagacattccaaagtcactgattttcagaacattattttcacctccaggcagtttcttacagcaaggtccctgtgtatacattttttactcgagatacaccatccagaatcagcatctaatgaaaatttcactgagttttagttcattcttctttctctgaaaggagaggaaatcgcctccaggaaccagttccttaatgacgtagataggccgtctttgtgtgtgaactcctatacttttgacattactgggatgattatattgcttgaggattttggcttctagtaaaaattttaatttcagttcctggggaagacgttcttgacgtgttttaacagcaacagcaattttatcctttaatgtgaccttaaatgtgtcaccaaaatttcccttgcctcttgtaacgtggcacctttatgattgagaacccatttcttattctcctaatggccatactgtgataccatgatgctcttaattggaacattgactttttttttttttgcaatttaaacaattgagataaaattcatataacatcaaatttacctttcacttttttttttttcttttggagaccaagtctcgctgttgtctcccaggctggagtgcagtggcgcgatctcggctcactgtgacctccgcctcctgggttcaagcaattctccttcctcagcctcctgagtagctgggactacaggcgtgcaccaccacgcctggctaatttttgtatttttagtagagataggggtttcaccgtgttagccaggatggtctcgatctcctgacctggtgatccacctgcctcggcctcccaaagtgttgggattataagcgtgagccatgacgcctggcctcaaacttgccatttttaaagtgtacaattcaatggtttttagtatatccactatgttgtgcaagcatcaccgctgtctaattccagagcatttctgtcaccccaaaaagaaactccatgcctattagcagtcactcccagttcttcccttcctcggcccctggaaaccagtaatgtactttc

SEQ ID NO: 5817 - DNA, 1194 bp, Homo sapiens
caaaacactatgtatagtctgagccagatcaaagtatgtatgtttttaatatgcatagaacaaaagatttggaaagatatacaccaaactgttaaatgtggtttctcttcggggagggggggattgggggaggggccccagaggggttttataggggccttttcactttctacttttttcattttgttctgttcgaattttttataagtatgtattacttttgtaatcagaatttttagaaagtattttgctgatttaaaggcttaggcatgttcaaacgcctgcaaaactacttatcactcagctttagtttttctaatccaagaaggcagggcagttaacctttttggtgccaatgtgaaatgtaaatgattttatgtttttcctgctttgtggatgaaaaatatttctgagtggtagttttttgacaggtagaccatgtcttatcttgtttcaaaataagtatttctgattttgtaaaatgaaatataaaatatgtctcagatcttccaattaattagtaaggattcatccttaatccttgctagtttaagcctgcctaagtcactttactaaaagatctttgttaactcagtattttaaacatctgtcagcttatgtaggtaaaagtagaagcatgtttgtacactgcttgtagttatagtgacagctttccatgttgagattctcatatcatcttgtatcttaaagtttcatgtgagtttttaccgttaggatgattaagatgtatataggacaaaatgttaagtctttcctctacctacatttgttttcttggctagtaatagtagtagatacttctgaaataaatgttctctcaagatccttaaaacctcttggaaattataaaaatattggcaagaaaagaagaatagttgtttaaatattttttaaaaaacacttgaataagaatcagtagggtataaactagaagtttaaaaatgcttcatagaacgtccagggtttacattacaagattctcacaacaaacctattgtagaggtgagtaaggcatgttactacagaggaaagtttgagagtaaaactgtaaaaaattatatttttgttgtactttctaagagaaagagtattgttatgttctcctaacttctgttgattactactttaagtgatattcatttaaaacattgcaaatttattttatttatttaa

SEQ ID NO: 5818 - DNA, 1169 bp, Homo sapiens
gggcccctctgcttctcccccgccccatcatctccagcgcgtggtgggggaactgctggggaaggcgattggcatcgatctctccatcccttccgaggcccgacttcggtcagttttcttcgggcaacaattttctaaattggctggggtctggcggtgttggcccccgcgcgcagaccttgccccgaagggggccctgcctgcctggcatgggcggaggggggaagggcgggagtggaaggctgtttgttggggggttttggcgccacttttgttttagttttagtgctgcttttcattcccacccccacccgcactgtctttctcaaggcacgaactgagctgatccttgccccaggtaggcagcctgtgcgttttcactccacacttttattcttgctcggggtcgactttcttttttcttctcccctggatccggagatctgcggacggcgattttgggacgaaaagggtcggatgggccgtgggagagagaaggtgtgggaaacagcatcaagtagttccgcaaaactttgagccccgttcccattttcttttggcctagaattgtgaacgtattgttgatttcggcctttttttccccccgtcgcgagaatgtcttgttttgcctttagttttttataaaccgctgtactttcgacatttagtttccgctcccccttggtgcatatgtcattttatttttaatccttaactgtaatgggttatcgtgtgattttcgtgcttcagtgctcggctttaatttttaatattgtattagtagtttcatccggtttgtgagactttctcttccgtggcctagaatgttttttatgttgttgcctaccacccctcttccctctccctccttctttctcttggatgtagtttttaaattgagggccatggtgttggattaaatggtaatttacagtttacatgatatatctattggaaacttttgatctgtaaggttagatttaaagtaaacgaggcgcttgtgttggtttgcaatggttccttaaaatgcgcgggccacccccttctcccaccataaagccccatcttcccttcacactggagtgtaaattccataccccttttctcccacggaccgccgtatttcgcagcagccacaccctgtatttgtctctgtggattggactcat

SEQ ID NO: 5819 - DNA, 2133 bp, Homo sapiens
ttaaaaaaaaaaaaaaacaaaataacaatctgaagaggcatttggtacagatatgaattctcttacatttatttactggttgtactaaataatgatgacctctgctggatttctgtttacatccagaaaacaatgttaaggatgtatttattcccctaccctgaagaaagtgtaggatagaattgtttttagcattctaaatttaaatgcttaaaacgtcaatcaacaaaactttgttttaaatattgtaattgtggagaaaagtaaacttataagcagaacttttacaattttttcatctaaaagtattttaagatatttttaaaatccaagagcttctctatacttttcagaaatatccagatgcagtgaactgccagaaggtaaccagtctcaaacatgcttatcccattatcaaccctgaaagtttgcttgtcctttaagataaaaatgtaatgttgtgatattccttccagtaatgccactgtattttgtctccaaataaaagaagcttattgtagtatgtttgcagaaaaattctaaacaaaaattatacagcttattagagtgtgggaatagggatctaaattttaaataaaattatatatatatataaattggtgctgattttataattgcgcagtttgtttagttttttcttacttttaaattccaacttaaaattatgaggtttcagaaatatattgaaagtttaacaatgtttaaaaatagaaaagcatgagtgttcatgctttaaaatgatttttaaatttgtattttatattgttttatctatctgtctttgcaagcagtcttcaggttaaagatacttctaacaggttacagtacatttcctctgtatgtaaattagatgggataatagaattcataacccataatattctttgaaagctaagctttaaacttcattttatgtcctttcacaaataaattagtttaaaacagaaagtggctacttgccattttgacatcaactcattttgcgaggcttaggcagctagacatcgtttaaaacaaaatattaacttatattacatgtgtatctatctattgtcagtcgtctctcagttcttgaggtatattattttaatcattccatgccttaatatgcttgcaatacaagaatatcttcagatgggtgaataccaaaaggctttcagtttttagtcagaaatcaagcattgggctgtggtagccaaaaaccataggttagctaaaaagatcatgatacaattattttattaagtcatggttaataacaaatgaatccagacttgtctaacagattttccatcaacaaatattgttatgtgcaaaagtattgcctatgttgttttacacaccactgcattaactagaactgctgagaggactgtatatatgattttaaacctaagttgattttttttctcactcttgaaaggagtacttctttgtgaaagcagttcttacagctttgttttcaaccagctaaaaatgttttatatattactctaacctgttgtcctccacattctattgtcctaattgtactgttttctgatttgtatttatgtcttgagacagtaactttttgaataaaaataaacctacagtatgttgtatgttttctcttgtactcaaagggggagggtggctataaatggtttgcaaatttatatctattatcacatcttttaatgtgtttggggaataatttatagagaataccatcagtttatatttttaataaatcatatgtatttacaatgaaaccaaatccctaattggattattactttaaaataggaacctgtaaccattattgctttaattttcatctggtatgagttaaacacatttacaaatgtttacattgtttatacagggtacatttgagtgcctactgtgtgctagcatgtgttaagagatctctccttcatagatccattggggaaaacaaaataatgaaacttgtaataaatgccaggaaggaaacaagcaggatatgctgaggtagagaatgagagagagacagtaagagagaaacctgccttaaataaggggctcatggcatggaggtaaaaccatttgaaaaagaatttactaattgaattcttattgaaaactcat

SEQ ID NO: 5820 - DNA, 1199 bp, Homo sapiens
gccaaccttgggatgtttttaatactccatacacattaatgcagagcttctagtgggatatttacattttttttcaggcttcctgtgtatttatgtatatctttaataaagatatgccttttgagtttttaatgatttttaaattatacagcaatgacaagtgcttttaaaaaaattaaaaggaaatttaagcagaattgacagataaggcagaagttcttcaatccctgttctgtctcctactcccaactttgcctaaacccccattccccagccaggccactacccttaggagtttatatctttctagaccagtgctgtccaatagagctttctgtgatgatggaaatgtcctgtatctgtgctgtccagtccagtggcttctagcagcagggggctattgagtacttgaagtgtggctagtgcaactgagaactgaacttctaatttaatttaatttaaagtaatttaaattcaaattccctatgtggctagtcactattgtactggacagtgcagttctagacctttgtatatgcttttttgttcactcatagacaaaatactgatttgtgtgtgtctctatatcataaacggtcttatatgtatgtgttggtctgcaacttgatttttttttttaactcagcagtgtgtcttggagaacctcccatcttattacataaagacctagctcattgtactttttttcaaattcctaattttgtcagtaatttcctttactaaaatggatgtgtcaggttgtgaaattctttggggttccccccctcctcattatctttgatttgccattaagtgctgtgatcatgataacccgctgagaaaaagtttgattttattgagtaatcaccccatgttttggattcttgggcatgctatgattagaggctttaaaaaccacactatattttcaccaccattggcaccaatgactgttaacaaaggagccaagtgcaccgtggccaattaatttcagaagactttctgtgggctggctgagatagagctaggatagggttccaaccctgcacttggtactgtgatctgttgcattggttctcagacttcagtggatgtaagaattgcttagagagctttaaaaaaagtgtggatgcatgtgtcctcacccctagaggctgtgattagtagacccaggcagctgtgcttttaagacatactca

SEQ ID NO: 5821 - DNA, 1180 bp, Homo sapiens
gcagaacaggtttgtcatctccgcaaggccagaaagtgatcacaaaaagaggcagatgatagacactggggtagggtcataccacagggaaatacctttcctgggcttgttttctagcatatcactgacctgggatctttgggtgatcaagggtgtggttagtggaggctctgtgctgcacgtatgcagtatcctatctctttctacatcagatcaaaacactaagttggtgtactgcctcgaccttttttcagctcatcctggaacatatacagagttgagagttttagacaatctctaggtagaggagacaagatgtagacccagacagaagaaatctgcttccctaccatggctattccagcaccccaacctgtaattgccaagtcctctaaggtactaatttgtagctgctctgaagtaaggatttcggattcagctggtagggaaagactctgcacctgctgtcttagggaagaaatggttcaaatccatgtggtgacattgcattagtctccctttcactgttttcttattctgtaattgtttgttatatttcccaaaaacgtcttgatcactaagcaaagctgctagtgggattctatatttcgtgtcatcttttttattataatttattgcaaatttttttctgaataaatatatgttgtgtgaaaaagcaaagtgtgattttggtgaggaagcactcagaagggagggcttatgtgtcactgggttccattcgacttgactgcagtccccatcagctgtgcctgcactgtcatcacctgtcttacagggaaataccatttataagaattcttagtatattcaccctcagagatgagaagaaaccatgcgttttcagaggctaataaaggtgtcctgtactttcagaggccagccaagtacccttattttaaccctaaggattcaggcaacaaaacaactcaattagaggaaaggatgttgattcttaatgcatgtaaatgtcacactaggtcagatctgtgatccctccggccccagaaacaaaccctaagatacacatctggggagaacccagctacccctgctcagtagtctcagtagtttagacgcgcttccccaaagagcttgttttcacataatcctattttgcagcttttgaaaaccagttttgaacttttatgacttcttgggg

SEQ ID NO: 5822 - DNA, 1170 bp, Homo sapiens
ggaggggcgccgggggacgcctcgcggggaggggtgtgtgtgtaccgcgggggggcatagtgtgggagggacttagagagggacaagaagggacaacataagggagcgcgggggtacggagaaaaggggggcgggagtgctccaccacgctggccacgaaggcgaagggaggccgcgaaggagaggccgctgggactggccacacacagggacgggggtcctggggatggacagtcagcgagggaagggggtcggagcttccgcggtctcgggaggggaagggggagccgacacgggaaaagggggtggtgcggggacccgagggtggaggcggatgggcgtgtgtgcagcgctgagggcagggatttaacgcagctcttcgagatgacccaaagaccacggtgggggctgcacagacgggacggggctaccgatgcaggaggagaactgcccaggggaaagtgggacctacaaggattagagaagggtggcgggggcggcctcggactcggcaggaaggcgccaccaccgccctctgcccgtccccagcgtgccccgccccgtccgggggccctaagggcagcggcctgggccgtgggggagccgagccagggcggaaccattcggaacagagaggggggcttggggggaagggaggagccaggggtcagaaccctgttgggggcgggggggcgccacaccctgggaaaaaggcttgggcacatccagagtggaccaatcagcgagcaaggccagggtggcgtcaaggggcagcttcggccaatgggaagggagaacacttcggaggttcggaggaagaaaagaaaaaaaagccccacgaaacaacaatcgaatctgtttgggggcttggaaggctgggaatgggcgtcgtttatagcacgctctggcacctgccttctcctttgaaggatggggtggcttgcatcactcctgggtagtggggagcaaacggagctgaagagggtccggggaaagtagacggggattggccatttaccggggacacttgattgggcgcctcaatttggggggtgggtgggacggaggtagcagctttgtgctcaaaagagtgcaagagaatgttgtggtctcttaaacggaggcaggagtgggcagggctcccgcatcccctaccactggctactgact

SEQ ID NO: 5823 - DNA, 1176 bp, Homo sapiens
gctaagaccaagagttctagaatgctatagttctgcctgttgcgcttactagctatgtgaccttaaggaagtcccttaacttctctgcaccccaatttcctcagcagtataatgggtcagagggtgagagagaaataacaacagtccctgaaccttagcacagcaaatggcaaacagtaactctcatgagcactgatttggcagggaaggaaaactaaaaatggggcagaaaagagatgtaacacggattcccgggcagacagcagatggatatgaaggtgggcgatgaatgtaagcaggagtgaagggtgaaaatgccgaaatagtcggaaaccgagcaggagaatctggagagcactgaggaagaaagatgtggacctcacccaggaagatccaggcgctgtccttgtactcggagtgccaggacaccttatcggccaccccaagctggacctctcgttcattcagctcgttgatcagcttcaccttagttaaagggcttcacggtggcggggggggtggggagggtaggcagaaaagcagacaagtaagtgcgaaccggccggagctgaggaagagcaaaactaggggacgagctgttccagtccccgcgccgctcccgcccctcggccccgcagacgctctaccacaccagtcccggtggaccacccccagtggcccgctgctccttcctcaaaaggaagctgacgccttacttcatctcctcgggttcgcgctcagcactcaggaatcagcgcccgggaaaggcagcgcagcgcatgcgcggccccggcgccagtggccagtcgattcggtgacctcgcgccggaagagccggggcgtaccggggcgtggcgcctgcgcactagcagccttccgcgctgcgtgcggttacctcttggagaggtggtttttctctagtttttcgctttttcttctctgtgaaatggggtaaaggcacaagcctgggctgttgcaggacccccacctcttgaacgatatctgaaactggttagattagctataaatatttgctgagtgaacggaacaagcagcctgatgtggcgactttagtctcagccctcgctcccagtccagagtcccacttggaccttcgctcctagtcagttgctaaagcacagacccatcaaagcatccctgtcatggcagaaaagt

SEQ ID NO: 5824 - DNA, 1190 bp, Homo sapiens
ggcaaagcacagaggaaattggggtaaaaaacagaaggtcgtagtttgctttctttgtttctcgatgagtgtaaggttagtgagcaaaggcaatctctgcctggaggctgagaatcacagcccgaagggaacaagaatgaataggagacctgtatattcttcattctgctgaggtgttagcagcagcatttcatgggagagggtgttggcagctcatactggtagtagcagctggtaggagaggggctgggcagctggcctgcaaccccagagctaaacagcacagttagtccacagggctagaggaccttggcacaggtgcagaggaccactacgtttgggttttgtagtccttggaagcatagtactgtttcagagaagttggacagcatgtacaggtagcggaccatggcaaaaggggctggccaagcgaacaccggtagcatacactggcagagggattgctatgggaccatccatggacagagggccctggccgagtggttgagccacttatggggcagcaagacatgggaaaggaattgggcaatacccgtgagaagaaggctgtgatagagaacctgggcaacccacacaggtggagggccctggcagggacaaagattgcttcctccaacttctggatgttgggaagttcacagcaggtgcagcctataatttctacccctttgtggtacttctactcagccttccatcttggagctgttctacttgcattaagtaatgatgagctaacgtgtgcatgtttgtttattctaattatctattctctattctggttacgcacgttgctctccatgaagattgcctttgccgctgataacagtgcctttcaaaaaactactttgttggctgggtgcggtggctcacgcttgtaatcccagcactttgggaggctgaggtgggcagatcacctgaggtcaggagtttgagaccagcatggccaacatggggaaaccctgtctctactaaaaatacaaaaattagccaggcatggtggtgcgcgcctgtaatcccagctactcgggaggttgaggcaggagaattgcttgaatccgggaggtggaggttgcagtgagccaggattgcgccattgcactccagcctgggggatagagcaagactcccccatctcaaaaaaaaagaaaaaagaaaaaaaaactactttg

SEQ ID NO: 5825 - DNA, 1174 bp, Homo sapiens
atacacaattttatggcatcgattttctcctgatcagcacatggttatttttatcttctttgcaagttccatggctttgttaataatgagaaaatacaggactgattcctaactgaaaaacaataagacacatacaaaacaaagtcacaggacacagtcgtaagtcacagccttttaaagacactggaaaatatttctgttccaatgttaaataatgaaaccatgagacaaaatcctgttatctatctgattagcatttatagtcatttgtgtatttgtgtccattcaaatagggctgtgtgggtcttgtcaggctggagagctatccgtacccttatgttagagctccactacatatcggcctccccctcaacatgtaaggcctactgcctaggtcagatatggagtagaactgctagggaacctgggtaggcagtcaggacaagaaccacatggcctggtgcctagatttgctcttctccaagaccttaagggtaagctttttttctcttctctccttaggcatggatcactaaggtctgttcccaatacaagaagactctttgacatcataataaaatactgcagatacgatgctgagtgaaaaagagtagaaatgggaagacttggttgtgcagaaactgagttcttaaagagaggagatactttatgagggtgagtggataacctctcagtttaatatccaatggaaaccaaaagcaaatggctaagagtggaatatgtttacacaaattgagcgaaatgttaggtagtcatagtttctggtgtctttgtctcttcatggcctttttattgaaacatgtagggatgtatctgtaaacattcagacaaaaagctgatagtgtctacttttctttctttctttctttctttttttttttttttgaggcagtgtctcgctctgtcgcccaggctggagtgcagtggtacaatctcggctcactgcaagctccctcccgggttcacgccattctcctgcctcagcctcccaagtagctgggactacaggcgcccgccaccatgccccactaatttttttttttttttgtatttttagtagagacagggtttcaccgtgttagccagaatggtcttgatctcctgaccttgtgatctacccgcctcggcctcccaaagtgctgggattacaggc

SEQ ID NO: 5826 - DNA, 1230 bp, Homo sapiens
agtgaatatggaaatggttatcagtgtttaatatatagttttatgacattgcttttctcttcatcagcatatggttactgttttactttgcaagttctatgtcttgtcactaatgagaaaatataggacttattcctaatgaaaaagagtaagacacatgtacaacaaagttataggacagtcttaagtcatagccatttaatgacactggaaaaaatttctgttccaatgttaaataatgaaaccatgagacaaaattctgtgatccatctgattagaatttatagtcattcctgtatttgtgtccattcaagtagggctgtgtgtgttttctcaggctggagagctgtccgaacccttatgttagagccccactaaatatcagcctccctctcaacatataaggcctaatgactaggtcagatcgtgcagtaaaactcctagggaacctgggtagggagtcaggacaagaaccacatagcctggtgcctagatttgctcttctgaaagaccttaggggtaaaacttttttttttcttctctccttaggcatggaaacctaaggtctgtacccaaaactacaggactatttgacatcataataaaacactgcagatatgatgctgagtaagagtagaaatgggaagacttggttgtgcagtaactgagttcttgaaaagaggagatgcttgatgagggtgagtggattacatcactgtttaatatccaatggaaaccaaaagcaaatggctaagagtggaatatgtttacacgaattgagcaaaatattgggtagccatagtttctggtgtctttgtttcttcatggccttctttttgaaacgtgtagtcatgtatgtgtacacattcatacaaaaagctgatagtgtctactttactaaagtaatattcttgaggtcaaattttaagatttatctttatttgccaggtgcagtggctcatgcctgcaatcccagtgctttgggaggccaaggtgggccgatcacgaggtcaggagattgagaccagcctggccaacatagtgaaaccccgtctctactgaaaatacaaaaattagcagggtgtggtggcacacacctgtaatcccagctactcgggaggctgaggcaggagaatcacttgaaaccagaaggcagaggttgcagtgagccgagatcgtgcctctgcactccagcctgggcgaaagagcaaaactctgtctcaaaaaaaa

SEQ ID NO: 5827 - DNA, 1143 bp, Homo sapiens
cctggatcagaacatgaaatggaactcctagggaacctgggtagggagtcaggacaagaaccacatggcctggccgggctcggtggttcacgcctgtaatcctagcactttgggaggccgaggcagtcggatcaggaggtcaggagatccagaccatcctggctaatgcggtgaaaccccgtctctactaaaaaaaaaaaaaaaaaaaaaaaaaaaaaaaaaaaaaaaattagccggtcgtggtggcgggcgcctgtagtccctgctactcaggaggctgaggcaggagaatggcgtgaacccgggaggcggagcttacagtgagccgagatagcgccactgcactccagcctgggcaacagagcaagactctgtctcaaaaaaaaaaacaaatgaaccacatggcctggtgcctagatttgctcttctccaagaccttaggtgttaacatttctttgtttgtttgttgtttccttaggcatggatccctgaggtctgccccagtactataagacaatttgatgtaagaaaacacagcagatataatactgagtgaagaagagtataaatgagaagattggttgtgcagatactgagttcatgaaaagaggagatgattgatgagggtgagtggatcacacctcggtttaatatccaatggaaaacaaaagcaaaatgctaagagtggaataagtttacacaaattgagcaaactgctaagtagttctagtttctggtgtctttgtctcttcttggcctttttttgaaatgtgatgggcgggagaatagcgcctagagcaaagtcagttggcttctcccgtacaatactgccatcgtgcggaaacagtttcgtagcatccaaagccgtgagcgtttcctccatgtgagccctagcaattgaaggaaaagccagtgaaggctgaacagacccgagacacaagttgatcttcctatccttttctctgaggcctggcagaagcaatgaacaaatgcaaagtctccgtgaagtatctgctgagtgagggagcaggactgagccagctgcttccaggaagttttggcacaggaagtagaggacagggcctgttttctcatagtggggacaaggctagaaaatgatacagccaagtacagacccttggg

SEQ ID NO: 5828 - DNA, 1183 bp, Homo sapiens
tgtatggcattgcttttctcttgatcaccacattttttttagcttctttgcgaatcccacctctttgttactaatgtgaaaatacaggactgattcctaactgataaacagtaacacacatacacagcaaactcataggacatagttgtaagccattgcagtttaatgacccaggaaaatgtttgtgttacactgttatataatgaaactgtaagacaaaatcctgggatccatctgattagcatttatagtcattcctgtatttatgtacattcaagtagggttgtgtgtgtctgtcaagcttgagagctatctggactcttatgttagagccccactaaatagcgacctccctctcaacatacaaggcctactgactaggtctgaacatggagtaaacctcccagggaacctgggtagggagtcaggagaagaaacacgtggcctggtgcccagatttgctgtcctccaagacctcagatgtcaacatgttttttttcctttctctttagacatggatccctgaggtcggtccccaatacgacaagacaatttgatatcataatagaacactgcagaaacaatgctgagtgaagaagagtagaaatgggaagacttggttgagcggaaactgagttcttgaaaagaggagatgcttgatgagggtgagtggattacacctcagtttaatatccagcagaagccaaaagtggaataccattacgcaaatgtagcaaaatgttaggtagccatagtttctggtgtctttgtctcttcttggccttttttttgaaacgtgatgggcgggagaagagctcctggagcaaagttagttggcttttctcgtacaatactgccatcgtgcggaaatagtttcatagcgtccaaagccgtgagcgtttcctgcatgtaagccctagcagttgcggaaggaaaagccacccaagacacaagttggcattcctacccttttctctgaggcctagcataagcaatagacaaatgcaaagtcttagtgaagtatctgctgagtgagggaccaggactaagccaactgtttccaggaactcctggtacaggaaatagaggacagggcctcagtttcctcatagtggggacaagactagaagatgacagagccaagtgcagacccctggggcatttatgttatgaatatgccctt

SEQ ID NO: 5829 - DNA, 1217 bp, Homo sapiens
cattttaaaagtcatttcctattgggattgagagaccacttatttatgatatttatacacctatctgtgtacacatgtttactaaccatagtagtgattagtcatggtagtgattagtcatggtaatcatttcagttaccatgatctgtgcctatatccgtatgtatgtgtgtatgtacttatttatacaaaacaagatgttaaggagaatttgtacatgcatttaatgcaagcaaatactttcccttcaaaactttgtcagaatacacatctggtctgatccaaaccacaatgtacagattaatccaattttaatatagatttattttttgtgtgaacaaaatatagtaggcgtatgtatctatacattgaaaagtatggaagaaaataacccaaaatgttatcagttgtcttaacagattttatgatggtgttattcttcttgatgtacacaagattatttttgaactatatggcaaacatcattcttttttaattttttttttttagagactaaggtgtcagtatgttcttcaagctgctctgctcctgggcccaagctattctcctgcctcagccttccaagaagctgaaactacaagaacacaagactgtacctggcttgcaaacaccattgctaataagaagatattgtaagactgatacctaagagataagaggtaacacacacacacacacatgcaggcacacacacacacacacactcaagtcacaagaagaagctgaaaaatatttaatggcataggaacatgtggaaatataaattattcactgttaaacagaggacaatttttaaaactgtgtaactatcttttttttttttttttttttttgagacagagtctcactcattctgtcgcccaggctggagtgcagtggcgtgatctcagctcactgcaacctccacctcccggattcaagcgattctcctgcctcagcctcctgagtagctgggactacaggtatgggccaccacacctggctcatctttgtatttttagtagagacagggtttcaccatgttggccgggctggtctcaaactcctgatctcaagtgatccaccggcctcggcctcccaaagtgttgggattacaggcgtgagccactgcatctgccccaaaactgtgtaacttctaatgggagtttatacagatgtaagtatatgtatcatgccctgtggaacaatgtattaca

SEQ ID NO: 5830 - DNA, 1149 bp, Homo sapiens
ccaggaagagtgcctttaccagactcgaatctgccagccccttgatcttggacttctttcccagtctccagaactgtgagaaatattgtttaagccacccagtctgtggtattctgctatagcacctgaattgactaagatagtggtactagggttctaaacaaggttggcctacagatccagttcttcacagagttctctctgcccctctataggttatttggaaatgtgatggcatttgggttgtcacaatgacttagaagtgctcctgccatttttgtggtcatggatcagaatgctaaaatcctgcagtgtgcaggaaaattcaacccaatgaagatgcatttacacacagaatgcctttgagaaacactggttgttccccaattcagtgtgatcctatcaatgttgagtttctttcccttccttaaaaatctttattaatatgatactatgttttaaaattcagtatgacttatgagaggcaacttagtgtagtagaatgaccactgggctggcctggggtgtttgaggttataggtctggctctgtgcctgtgaaccagacacaaacttcctggacgtaggtgttctataaaacaaagaagttgcactaagttatttctaagttcccttccatctttaatattatattttttttatttgcgtgtttctgccttagaaattatagagtatgctgtttctaagaaagtgttttgattaaaataatcaagtaatattttaattcttatttttttaggtggagatgagttttcctaactgaaagtgattaaatatttttaaaaggctttaaccttgactgccagtaactcaaagcttcaaataattttatgaacagaaatgactataagagattttctttcctttaggcagaaccatatttaaaccattttaaagaaatggtaattaaacttgatggagagcctcatctactactaggaattcatgtcagtttaatcagttgctgaatttggtaatctttccttgtgtctaatctaattcttatatcctaaagcctgagttcattttttttctctcgtctctagtgagagaacaccactgatgtttctttgtgtaataatccttcatgcatatggagtcaggcttcattctcctcttgaagttaaat

SEQ ID NO: 5831 - DNA, 1157 bp, Homo sapiens
tcatttgaacatgcttctaaataaaataaaacaaaaccaaaactatacttttgatctataataagagctcaataactttgtcaaggaaagctctaatatatgcagtgatggtttatgaaagggtgtggcaattttaaatttatattgtgtgtgatgttcaaataaagtggtatctacattcatgtgatttatgggtcagcatgaccattaattactgagtagaaattgactaaactttgatttcctttttttaaatcgtgttgcatttgattcctgagcaaattccctcaaagtgaactcttgttcttaaattttgaattttatggtgagattgtaaagatagaggcaattgaaacattgttccttatttatgaactgcttgaagtgaatacttaatttaagtttgcactttaataccaaacttaaaaccaaacactcatttaaaagtaggttaagtgatcatggatcattgttattagctttgtggctttgtgaaattctaaaggaatcaaataattcatcatgatttaaattttctagagattttgatttttttataatgtttctttcctgtagattgtgttcttgtttctctctctctctctctctctctctctctctctctctctctctctctctctctctcaaaattacagtgttcattgtcattgacctcagcagcaaatttgacttgaattcacttaggatcgcaggaatcaggggaaagtgattttaaaggtggtttctccagcacattttaagaaaagggaccaaaagttattttagcttcctcaatagattgcatgttgcttattaggataataaattaatattaaatgcaatatatgtcttgtctttattatggcatctatttaggagttgttcaaatcactgcagtagggctctgcaaataaaataatgtaacctattatcatggatctaatgtactgtaactttatcagtgaaaggtaaaatctcaaataacaagtacaaacattgaacaattacctataaagatttgtaaaagtaaaatttttccaatagatttcattcttgtcattttgtaagacgaccctgcagtccacctgtttgtaacttttttaataaaatagacatctgtattactgaggttggtttctttaattatttggtgtatt

SEQ ID NO: 5832 - DNA, 1089 bp, Homo sapiens
tttcttgtgttgtattgtgttgtgctgtgttaggtttttacatactgtagtgttttgctgtatatgtgtggtgtttgatttcaactaaagtgttattagtggggaacagaagtatatgtgcttaagaacatgacaggttcatgcaaatatgctctctttctttagaatatttctgtaggtttcttgggactgacatttaaaacgcctcacttttgaatgtgcacaaaacctgctcattaacatgcatgtgtataatttgtacctgcagatctgatgttgcataatacaatcaaattactagattttttaaagagagaaataattacctgcacaaagcagagaacttcataaaacattaacccctaattcactcttcttaaatagcttggcaaataagactttacctttaaatgaatttctcagcatttatactaaaaattatgtaaagtgctcattagattttttgtgtgtgtggcttgagaatcccatctcctaaattgagtgtctaaaactgagccatttgtcatcttcagctgagaaactggtacttgggagcttaaaaatatgctaattacaagttataaatcaaacggagagatgggggcatggagatagtttttacgtactggaggaaagtgtgtaaaaccatggcaatgtcaccttttacacaaatgccattttccaaatgcaaatggctcatgctctttagactactctttgaataacaagtaagatgcaatctagcaaaagtcagtcagggtgaaagagaattggttgcaaatgaggacttccctccccaaatggacagtcttctctgttgatcacagagggagcctgagtacaggcttggagaaatggctaggacagggaacagggaagcacttacaattattccttgatttattcaaaagaactgggaaagatggttgtagttgtctttagcttcggttcaactgagtttcgttttgttaaacagttcagtgaaggagaaagcacctgtgatatatggcaagtgtccccctgcccaaactttaacatcagaccctctcacatcataaccaagcctcttttatgcttgtttggattcgt

SEQ ID NO: 5833 - DNA, 1275 bp, Homo sapiens
aaagtttagatgttgcctttacagttgcctttcaattcagtgttatactgtgtgtaggtaaaacaaatctcaatatggaattaaattgtctttttggggttggactaaatatgaaatccgaaagccaaaccagactcaccagaaattgctgtttagatattttaagaagttcttaaattagttatggagacaaagtgaaaacataaaatgtgaccatttaacttatggctaagaaatggactttaaattattcatgatacactgttaaaacccaatcttggaatcaaatattttttccaggggtgagaataagtataaacataaagcaactaaaatgaaacataaaaccttttattttcttctgattttaacaaggaatctatttaaatagaataacaactgatggtgaatcttaccgagctgtagaaaataaaaaattcctctccaaacatgggtagttttatgtcaaaatattggcttttcaagaacaggactcatatcttgatatttaagagatgtttaaaattttaaactttttctaccttctactgtttaaaggttttacacagggtgtatctcacattaaacaaaacacctttttttcaaaatgaaataccaatgtaaagatctaatttccaggcgctttcagggcactgtaatttcaacaatactggaatcattttggcgctgcttctcattcattttaaggcttctctgaattgtgctcattccaaattaacccatgtatagaatctttcttcatcatctaaatggtgtgttgctgaagttattgtggtatataatcctggattaaagtcaggactttctttctatagaattattttatcaatatttgtgtagtgaggtcctaatcaagaaacttgaacaggataatgtgtctaaaaatattgctgaagttattcttgatcagatagaatttaacctaaaatgtgaactcttacttactttttgtacatctctattgtaatgtttccagttgggccaactatttctagccctttagttctttttcatgttgacagatttgtagacaattacaaaagccaaaaaaggataaaataagcattaggaaggctagccagttattcaatagcaccttgataatgtgggcaaacccttctacaaagtttttgttttgaaaagagcaaaagtaaaaagtgttctgtagtgaggttacatatcaggaacatatgagttgagcagagtaatttggtagtgtaagtcgatgcaaaaatacttctatggtacctatta

SEQ ID NO: 5834 - DNA, 1195 bp, Homo sapiens
tgtatcaaataggagctcatgggaattatcaataaatgtatttttctgattaaactgtgggctctttttcagtcacaatttaagcttcaattctgagttatattataagagaataatttgcacttcatttactctgaattgtcaagaatcttgttcttccccaatgtaagtgtctgcaaagaggacttcttattcagtttgattgctttttaaattttactagtggagatgccctagtgagtctgagagaattggtctgtttcttatgaagagtttagttctaatgagttgcttccatgcactgttctgtgcgaatacagagcaattgaaatgtgcggtgtattgatttacctcaaatggattaggcctgtgtgcaccattccttgcattaattgactttctcccataactgtactaataactgcaaatcttcagtatagtattagcttcaatttactcataaagatccttgggtttttgctaacttactacaggagagtcaatgcaagcaagagtatttagaaattgactagggggaccaagttacatcatacaacccagaaatacttttaaagggctctttgatcatggcagccaactcttcagttattacaataaataggagttgactaaactcaccagttaagacctagattatcacaatggatgaaaataaaaaatccagctatatgctgtgtataagagacaaaggtaaaacataagaacataaagcacacaaaaaggattggaataggtacactatgcaaacactagccagaagtaaactgatgtggctatgttgatatcagacaaaacagactttaaggtagaaccattattgggcataaacagatcactgtgtaatgattaacagttcagtttttttttcagataacaattctaaacttgcatatgcttaataccataagtttgaaacgtataaagcaaaagttggcagagctaaaagcagaaattataaaatctgattttttttcagaaattgataggtaaaatgaacaaaaaatgaataaggatacagaggatttgaacaacatgattaacaaactcaatataatgggtatatatatatacacacacacatatacatatacatctaaaatacacacatacacacacatacacgcacacacacacacatatatatatataaaatctgcacccaattggaagaata

SEQ ID NO: 5835 - DNA, 1228 bp, Homo sapiens
tttgaaagtacgaattgctcttgtatgtcttctgatgagaacaagtggaatgaaatttctattccatttttttttaaactaggtgatgaaagtagtggagaaggaagtggaagtggctgtgagtatcagcagtgcccttcagagtttgactacaatgccactgaccatgctgggaagagtgccaatgagaaagccgacagtgctggtgtccgtcctggggcacaggcctacctcctcactgtcttctgcatcttgttcctggttatgcagagagagtggagataattctcaaactctgagaaaaagtgttcatcaaaaagttaaaaggcaccagttatcacttttctaccatcctagtgactttgctttttaaatgaatggacaacaatgtacagtttttactatgtggccactggtttaagaagtgctgactttgttttctcattcagttttgggaggaaaagggactgtgcattgagttggttcctgctcccccaaaccatgttaaacgtggctaacagtgtaggtacagaactatagttagttgtgcatttgtgattttatcactctattatttgtttgtatgtttttttctcatttcgtttgtgggtttttttttccaactgtgatctcgccttgtttcttacaagcaaaccagggtcccttcttggcacgtaacatgtacgtatttctgaaatattaaatagctgtacagaagcaggttttatttatcatgttatcttattaaaagaaaaagcccaaaaagcagtaaaatttccatttctccctgttattttagttgccttatctggagagacgtggaggtgattttcttttttttaaattattattaagacagaatgtgagggcacaagcaggcttctgagccacttgtcagattgtattcaaagcatcaatccaagaaggaggttatgtgtacttcatttattggtgatagttggaagagactgcagactactgctttgaatgagttgaattacataagctaagatcactataggtccatttcttgaacccacttatacataaaatgtaacccatttagaaaaagattctggatatcatcccccttgaaagatagaaagcattcaggatgtcccagttatcacatgttcacacttgggtttaggggtgtttttttttaaaaccaggcaggttagctagcccaccctgtgctagttttcatgttcacactgaccctatttga

SEQ ID NO: 5836 - DNA, 1197 bp, Homo sapiens
cacaacaatcactgtgggaaaaactggataatttaaagagcataaatagctttaaagacaaaccagaaaacagggtagaaaaaccatcctattaagaggcctaagaaaacgtccttttctttatccatgatacagtgttaatttacataaatgcacagtaaaataaagcaaaggtgaaaagagctgagatttgtaaatgtgcttaataaagacagaaacaattagcttcttctttatttatgcacatatctaaataaaaatgtctttctcctccctggctgtctgaggatagacagccatcatgaacgacacggtaactatccaaactacaaagttcatgaccaaccgactacttcaggggaaacaaatggtcattgatgtccttgaccccaggaaggcaacagtgcctaagacagaaatttagagtgcctaagacaggaaaaactagccaaaatgtacaagaccacaccagatgtcatctttgtatttggattcagaactcattttggtggtggcaagacaactggctttggcatgatttatgattccctggattatgcaaagaaaaatgaacccaaacatagacttgcaagacatggcctgtatgagaagaaaaagacctcaagaaagcaacgaaaggaatgcaagaacccaataaagaaagtcagggggaccgcaaaggccaatgttggtgctggcaaaaagtcgaagaagtaaagggctgcaatatgttatctgcggccattgtggatttttcatgagaggatttataaactaaaaactttcatgtgaaaaaaatgtctttcataattgtttgcatagcagtactacttcagagccaatgttaagctacgagggtgctagaaacagatatatccactttactccaagaagtacctgtgttctccaacaacagcctttcagaaattacaagtagatttcagtagagaggaagcaaaatctaggaaagaaacccagggcatgtaaatctgtttctctttctttttcttttctttttttattatactttaagtgtgcaggtttgttacatatgtatacatgtgccatattggtttgctgcacccattaacttgtcatttacattaggtatttctcctaatgctatccttcccccattcccccatcccacgccaggccccggtgtgtgatgttccctgccctgtgtccaagtgttct

SEQ ID NO: 5837 - DNA, 1165 bp, Homo sapiens
tggggtggtgtccgtcccaggagcctctgggtgcgcgctgcgctacctcgtgcccttggctttgccgtttgccatcctccgttttttctccccgagccctcgctattcgtctcggtgttggttactctgggcgcccagtgcccttctcggccctcccccgcagcgggccaaggctgcggcgtcgagcgcctgcacaacccccttccctacagctcctctcctcccctccccccttccgcccccgggccccggagccgagcggggccaccggggggcggggagcgccacagcgcgtggccacgccccccgagccggctttttctagggcggctccgggagcctctccgccggctgcgccgctcgcctccaagggagcgttccgtgctggcccctcgctcggctccgctccgcctccgccacgccgctctccgagcttcggcagcagccagcgccccctccacgctgcgaccccggctctcggctctccgtccctgtagctccgtgcccagcacctcgcgccccgcaacctcgccgtctcccaagtcccgggccccgcttctgtcgctgtccgtcgctgtccgtgtgtcgctcgctcggtctgtctctccgcctccccagcccttccttcctccctgtctccctcgctggcttgcacgttcgctcgctctcggacgcggcgaaacagcttcgcaggcaaatcccagaaacctttgcaaaaagcttgcaatgaaatttaagaagttcttcgatttcggcgccattttcgagtggagccagaggtgacatgcgattttttaaaaagggacttggtggctggcgtctttcccgactgtaacgtgggttacggcaggcagaaaaacatctggtgataattctgaaaaaagtgctgtggcgtttgggggggttgtaaagcacgttttgcgggcgggatgggggcaaatctgacatttaaagtgtttaacaaatgagtgcggccgggaaattctcaggaaacggactgggaaaaaaaaaacaacaactaacatggaggggcggggagagaaaactgagtaaggggcagtgaccgactgtcagcctcgctagggtcgggagcgactggttttgacagaatgtaaatgaacttttcctcttatttgcaagaagttagttatgtcttggaaagaaa

SEQ ID NO: 5838 - DNA, 1216 bp, Homo sapiens
cccccggtggccccgctcggctccggggcccgggggcggaaggggggaggggaggagaggagctgtagggaagggggttgtgcaggcgctcgacgccgcagccttggcccgctgcgggggagggccgagaagggcactgggcgcccagagtaaccaacaccgagacgaatagcgagggctcggggagaaaaaacggaggatggcaaacggcaaagccaagggcacgaggtagcgcagcgcgcacccagaggctcctgggacggacaccaccccacgctcacgggtcctctggcggtgtcctttgagctgccgggacggcgcaaggtggctgagcgaagctttttgctcggtgcttacagggagtacctgagatggtttgggaaaggaaacagggggtctcagaccgcttgggtgcagcgctctccccatgcgtttgagtgcagatctgtcgagacgccccagccctcgccaccccaccaagctctcaggtagagaggccccgggacagggtgagccccatagtcctttggtgggcataacacagagggaggagcaattgtttacacatgtgcccagtacaagaagggaaactgatatttaagactgaagtggggaaacgggagggaaaggagcccttatcctggatgttagacgctattaaggaccatgctattttgtatttgtgagaatgatattgaaggtaaggaggtccttatccttgaagatgcatgctgaagtgtacagaagtgaaatgtcacgatgtctgcagttttcaaatgatgcagctaacatacgcacacattatgagagagagaacagaaaggaagcaagtattgcaatatgttaacagttgttgcatcctgttgggggtggggggtaaacagacgttcgttgtaccgttctttcaacttgcctaaatatttgcaaaatgccataatgaaaattttggaagagttcccttataaaatagtgcctgaatgctaagaaaatgaacgcggcttcttttcctttccctgtcccgggtgggacaaatctgcgagcaagcagggctcaaggccagcggggtctggacgggaagagcaatgggtagagccggcctgcagctgccatagccctgggcaggccaggaggggccatcggagcctcggggcagataggctgccgggcgcaaaactatgcggaggagcagccgagcgcgttggccccgggggcggtg

SEQ ID NO: 5839 - DNA, 1204 bp, Homo sapiens
taaagaacgtttttgtgaaagtcagctttttttttttaaataaacactcgtcccttgataatgtatttctttttcataaaattaaaaaaaaaatgtgggttgtagtaggtgtatatatttatgtggtacatgagatgttttgatacaggcatgacgtgtaataatcacatcatggaagatggcgtatccatcccctcaagcatttatcctttgtgttacaaacaatccagttacactctttttgttatttaaaaatgtacaattaaattattattggctatagtcaccctgttgtgctatcaaatattaggtcttattcattcatttaactatttttttgtacctatttatcatccccatccccggttccctcccaccacccaccccactacccttcccggcctctggtaaccatccttctactctctagctccatgagctccattgttttgatttttagctcccacaaataaatgagaacatgtaatgtttgcctttctgtgcctgacttatttcacttaacataatgacctctagttccctctatgttgttgcaaatgacaggatctgataatgtatttcttataaacgtgtgtgtgtgtgtgtgtgcttaatttaatgcttgactaagccttcgttactggtgaaggagggacgggtgtctttctgtgcatctccaaagtgggctataggttcaaagtagtgagaaaagactttttgcccttaacatttacatatagtttacacagttttctaaaaaacctggttggctactttcaggctacaagaataaaaatttaaacgttactttgagtttccttttatgggtcaaaaatctcgctatggccctaagttttaaatatttgacaagcaattatcataacaaacggtttcagacatttttggctttcccagagattgaaaggtgaaaatgttcatttcttttgttcgcaatgaagcatttcatcttattatcacaaatatgactaacactgttatggatttttataaatcatgtcatcttaaaaattaaagaacattaccacaataaaggagaaaaacactcttttgaagtggcatttcaaaaggcaaatgaattagtcaatttgaaatgcagttttttcacaaggtgttatcttcccatctttagaatggttcctttagcttatggactcccacgccctttctcattaccagtcagtca

SEQ ID NO: 5840 - DNA, 1192 bp, Homo sapiens
atagatgcagacaaagtatttgacaaggttcaacatcctttgttgatacaaactctcaacaaattaagtatagaaggaacttacctcaacacagtaaagaccatttgtgaaaagcctgcagctaacatcataatcaatggggaaaaactggaagcttttcctcctctaagatccagtactaggcaaggatcccaatctcgccacttctattcaacatagtattggaagtactagccagagcaaccacacaccttttttgaaaggcatccaaataagaaaggaagaagtaggccaggcatggtggctcatgcctgtaatcccagcactttgggaggccgaggcaggcagatcacttgagttcaggagttcgagaccagcctggccaacatgacgaaaccctgcctgtactaaaaatacaaaaataagctgggcatggtggcttgtacctgtagtcccagctgcttgggaggctgaggcacgagaatcgcttgaacccgggaggtggaggttgcagtgagccaagaacgtgccagtgcactcctgactgggcaaaagagccagacccagtctccccacccccccaccaaaaaaaaaaagaaagaaagaaaagaaaggaagaagtaaaattatgcctttgtagatgacgtgatggcggctgcctataatcccagctacttgggaggctgaggcaggagaatagcttgaactaaggaggcgaaggctgcagtgagtcgagatcgcaccactgcactccagcctgggtgacagagcgagactctgtctaaaaaaaaaaagtgatattcagatttgatgtaatccctatcaaaattccagcagcatttttcacagaaagagaaaaacaattctaaaatttgtgtggaaccacaaaagaccccagatagctgaagcaatttttttttgttgttttgttttttttgttttgagacggagtcttgctctgtcgcccaggctggagtgcagtggcgcaatctcggctcactgcaagctctgcctcccgggttcacaccattctcctgcctcagcctcctgagtagctgggactacaggcgcccgccaccatgcccagctaattttttgtatttttagtagagatggggtttcgccatgttagccaggatggtctccatctcctgacctcgtgatctgcctgcctcggcctcccaaagtgctg

SEQ ID NO: 5841 - DNA, 1136 bp, Homo sapiens
tgtgtggagcatctacaaatgaatgaatagttatttacacacaaaccactgtgtacaaaagcgtccatggagctgtcagtgtctcgagtggtattatgaggcctcaggtgccttggggtacattgtcatgctataagggatgtatatcataaggtatggtggaagaggggccttatgtgaatgattgccacatactgtttctgttgctgctttttttccgattcctttttgtcattggatttgtttgttttgtcatgtggtgaatggtgttttagttattgtgttgctgccagaatcagaatccagttcttgttcttactgccttatagttattgtgttgccaccagaatcagaatccagttcttgttcatactgccttgtagtgagggcagtttaatatctacaaagaagcttttagaagctgaaaaagtcaatgtgattgtgcattctgcttttaagaagctgtttcagctatgaactgtgtatgtgctataagtgtgaggtaccataagttatttaatttttaaaagaggaaactcctgagtgagctgtttaagaaatctgagtgtgatctattgttacgttatttataactaggtaaaatgtctgtcgtgatagatttcttttaacgttcagatactgtggttgggttgtctatatttaatatgcagatttgcctgctggaatcataatccatttttaagtgaatgtaagaaatgaaaactactgcatttgtgtcttttgaaggcaaggatccttggattttaaaggaagagtatgtgctttgaaggcactcagagactagtaatagcatatggtttgaagggaaacccattctctttcaattacaagagagcatcacttagcgtgcagtacttctgttacagcatccgatgtgtcctttattttaaattgtaaccataacagccattaatggctttatttcttgtattgctctcatctgggaaaagtctctacttcttcaaacgtaacataaatctattatgaagcttgtcccctagtatgccattataaagaaaaaattcttcgatggtatgcagtgtatctattctgtttgtaaaagatcatgtcaaaatgttctgcctctataatgataatagatggttttgtctttc

SEQ ID NO: 5842 - DNA, 1216 bp, Homo sapiens
gaacatcttcacaggattccataaagggacaaaggaatggcatttgtaagagtagaaggggctcttttgtattactttgcagtctcaccttttcagttgtcactgtttccctcacttcattctctgcaatgtggtcaatacccaagcaagaggccttacctccaaaggatggagaaacataaaaagtgacaatatggaagatgaatataagaaagagaacagaaatacaattaacctctttcttttggtgattgggaccagtaatgacttgaagcctataattaagataactttaaacaaatttttgtgacactcagatccacaaagatttaataggggaacaaagtagcctttggatggttcagtgccctgaggccttggttctcaggggaatcctggtagaatatactagtgaaaggtcactccccacttactaccagtggcctaactgcaatcctgtacacagagtcaaccttaaggcagagatgtagtaaggaaggggatttcaaagggaccctttgtgagtgtccctgatctgcctgtcactaggaggctggagggccaaaggagtaggctgagagattgagtaccagaagtcctagatgcagggatgcttcctccaggtgccactgcagaggtctgatgacctgcctgcttctatagatactgcaacactgttttgtcttccatcatgaaggtcactcagattacacaggtactgcaataagcagttctgagcatcaaagagcctaaaatgaaaagtatgaaatctgttgggaccaggtatgggatggacaaaggtcagtcagaacacatacccagtgaaatgaagtaaaatgaaaggccatgatgatctcaaactatttaatgacatggggaaatgatctcatctgaacagtaaagaataaaaggagtctacaaagccttcaaaacttggtgagggcaatcaaagtccctctatcttaccaccactgaagctcatcacggaccccatactgaaagtacctggactttatgtgcatgaacaatccctgactttatgatgatggagaaggtggttcagggaaggctgcctggcttgattctgtagctgccggcccagaactgagctccttctcttccccgtacacagctgcttttggccctcttgacggttgtaccaccttctttcacttgtccccagtcctcttcatacccactctcttactggtcctta

SEQ ID NO: 5843 - DNA, 1197 bp, Homo sapiens
gactagcttattatcagtctctatcttgccctctccatccctctactatttttcatcttgcttgttcatggctttagccctctcattaccttattagaaagttgcatggatttcttcattcccagcatatctggactatctgtaacctcatggtacaaaggaatgaagggcaggcaattcttggaggtcataaaatagatctgaaattcaacattcatcctacaatcataagcacttcttaaacatattcaaaacagttttttttcaattcactgaaattttagttatgagtgttgaaatttacctttcctcttcctaatgtcaagtagatagtaaagaatctgagccctctctcccatggaagccattggtggttcctagagatctagtaatcttctttctcaaaatgctagtctgtatttcagtgaaaatgtaacaaaatataaaacgacttgcagaattgtcagaaatataagcttgctttgagacctaaccattttttctgctttttttaaaaaattttttttagcctccacgaacatctcatcctgttgtgaggttctcctgtgtagattgtgagccaatggtaatagacaaacttccttttgacaaatatgaacttgaaccttcgcccttaactcagtatatcttggaacgaaagtctccccatacctgctggcaggtacttatccttacctattagctaaatgtctgtaaccactctaggatctgggaattgttttaagaagcttcaaaggttattctcaaaataattggactgactgtgctaatgatgtttctcatgaatgctgtcaaataagcaacagggccaggcaaataatttcagactaatatgaatcattagtctactgtacattgccatttaaagcaatagagtctgatgaaacctatatatttgaagatttgggggaccccttgaagtctacccatgcaccccagcttaagaatccctaatctaaaggttgtacttcacttcaggtatggcgtctgcagctgaaacaaggtgtttagcccttactttgaacttgacagattggaagtacaggatagtttaggcagagaaccataagtcctgaaactaatttctgtattagtgtaatataataaaactcttcgtcctgtggtacaaatcacactaaaaaatgtgtgtaatgtggattttgcaacttggatgag

SEQ ID NO: 5844 - DNA, 1106 bp, Homo sapiens
gctaccagaatcatttcattaaggaggtcaccagattgttgtagttagcaaaggactctctcccaattaggaaattagtttttctattgagacctaataactgcagaaattagagcatttgtaacaactttttttttcgttttcttaaatatatcacattcaatccacctgttcttttaaattaagaactgaggacttgtgtaaaaaataaactttagttccatattaaaaccagttatgatcaggaggaagaaagggagaggtatgagaatagagaatagaagcaggatactttgatgtgtatcagtcactatgtatctggtgcttaacagcttacactggtttgtttgtttttcattttgtacggggcttttacacatacattatgtagttccttagaatagtcttgtggtaaggcaattatcatctaacccattttatagatgaaatggaggcttacaaaaggcaatttctccaaactcactgagctaaggatgtggctgagcttgaactcaaacccaggtcttccctctctttgaagaaagaaatggggagaaaggaactggaagagaaaataccggtcatttttgaggtgctggcagtatcattttactttcattctacactctcatcatatcttctttcaaatgttgatcagctaattgtttatgtgacacctttactgtaccatcctagagagtccatgtgaatgggtatttaatgccatggaaataatttgctgagctacagaggtagtgactaaggcagtgtcaccccaggagctctctactcttaatctagactgcagaagattttctttcttctcctgactcccattttaaaactctggcagaaaataattagcctaaatgagctccttggtggaatcattgcacttggcattgttagaaatgcaaagagtattattcacttgattatctaatctatttatatctaaaagtttctccagtatttacgtttgtccgttagtttccaaaatctgcctaattcccaacagacacaacataaagacatggtataacaggatatatccatggtctctcattcctttctgtcaagatatgaatggtctttaaaggccccac

SEQ ID NO: 5845 - DNA, 1144 bp, Homo sapiens
tctcttaccttaaaaaactcagccaacaggtagtattggtaaaaacaaacaaacaaaaatcctttgccctcagaagtgcatttccttattctttagtgtaattgtaatttttcaaattaaatgtgtatatatctctacactttatggattagtaataatgtgattctctatggcttctagcttcaccattaagctgcagttaagggtctgtcagtatcatttgatgctgtgccatttctccttttgcctgccagtttgtcctacccgcaagctggttgatatggggcagaggtttaatagacttctctcatgggtcacattttgtctatcttcaacctagttcctcctcagatcactctgggctacagcatccctcctgtttagatcagcacactgaggcgtggtgtgattaaatgacttgtctgagattagttttcaggcatgtgaaggacttatactcacatgctagcccttggataaagagctatatgcttttccctggagagtggggagatgagaccagtgttcctcacactggagggtgatagaccccaaggggaactgaagagtggagctcagtttcctctcttctcaccctccacctgttcctcatttgccattattcaccttgtcccttgcctgcccctctctattagtacctcatcctccactcaccgttccttatcatacttctcacctctacttagcccattcttgtaggatggaaatatttgagaactactgagttagaactttactatcatatgaatgtgttatgttatatgacaaattaatgcagcagttttacttaccttatgcacaaaggtattcccaggtaggggacaatagtagcattcgcagtggtgataatgcttcaaggtggatgtgtttggaagtttggcctttaggaaatggagagtagtgagcaaaacatcagatttcaccaaagaaccaaagtgactccacaattgggatgccgacacaccttgctaggaactgacaacaacttcagtatggtctggagcttaccagctcctaccagtccagtgtgcttataagtgcaaaagaaagtaaaggcaaccccagatttctaatctaccaagtgtccccctaacctcctttcctctctgctaatagatttttt

SEQ ID NO: 5846 - DNA, 2023 bp, Homo sapiens
aatgcagtgtaagttatatgtgaaatgagtctttggtatttcatataggaattattttttttttcatttaaaacaaatccacatcttttgtaaaagccactgttttgaacacatttccttgaaaaatgttggtggtttttgtgattatttatttttttagatttcttttcttttgcactacaatttttggaatccttttggaaatactgtgtgactgctgtgttttgcagcatgaattatagtaaaatggtcttcaattcttaacaaatggacttccctgatgagaccaaaatggtgatttaacagtttttcttgtgtcccctaaaaagtggctctgcttcagaagtacttgccagtttttaatttatttgtgacttttcaccctaccctgctcccatataccttctaccatcagctgtcttgtttcatcatttctctgagattctgtgtgcagtgagcaatttttgtgtcagaaattctttgtcagaacaaatatatgtaacaggctcaacttactgtaaagctacttgtgttctcttcatttgtctgtaaaaatttccctaattgattatatagtgtaagaatagttgaagactagttgaagaccttttgtgatttcattatcatgcctatgcagaagaaaaatcattgaggaaaattgtcattagccagtttaactgattcaaactctgtttatttcatactaaactagtgaataagtgaaataaaggaaactcgtcattaatctaaagacagagttcaaaggaattgggccaaatatattctcagtatttggaactaatgtttttaaggtttttaggaaaatcaggtcatttaagaaattgttttgtagtttctggtttatagcagtcttcaagttttccatcttcactgtatgttgctgaaagtgaggatgaggatacagagttgatatttttagaaacagtaattttacttttaaggaaattggctagctctttgagctagagagctgtaggaagctcaacatttctttgtagagaacgttgctttttttggattgtacaggtataaaaacattgcttttgttgaattgtataggtgtaaaaagggaataactgtatgcaggtttgaaaaggaaatgtgctttaggcatgagtcataagatgccattgtacttgtaggcattttattttcctttagaaatggacatcagctcttctcttctgactggtaacacatagccccaaagcatgagattatttttcattgggtttttattgttgtttagttttggtttgttacgccagcccagtctgtctgcggaacactgactctgctctctaatgagaacaaagttagaaatctgccgataacctaaaataatttagaaatgaattaaaaatgtgaaatcgggttaaagtgatgatgataaaatagcatgcaagaaacaagctccttccatcagacttggctactgttttcttctggtacgatttggtttggaagagcctcttgtttccttctctttggggtatgtcttcgtttcttaatatgtttgtaacattattgagatataattcacataccttacaattcacttattttaagggtacaatttagtggtttttagtgtattcacaaagttgtgtaaccgtgaccacagtcaattttagaacatttcgttaccccaaaaagaaaccctgtacccttgagcagtcacctctcattttctcccagtgcccaccccatccccgagcccctggcaaccactaatctatttctctctctgtagatttgcttattctggtcatttcatataaatggaattctacaatattcggtcttttgggactggcttcccaaatatgattttctatatggagtgagaaaattcttctcatcttgagaactcttattgctgtgaaagggagtggttggtaaaatcaatagatttcaggcaagagggccagatacctaacaggtttttctccgtgaatcttatgctgagtagtttttcctcataaccaagcatttatgatat

SEQ ID NO: 5847 - DNA, 1155 bp, Homo sapiens
ccgactgtgccaaaaagctgtaaactgacaggggctcctgtcctgtaaaatggcatttgaatctcgttctttgtgtccttactttctgccctataccatcaataggggaagagtggtccttcccttctttaaagttctccttccgtcttttctcccattttacagtattactcaaataagggcacacagtgatcatattagcatttagcaaaaagcaaccctgcagcaaagtgaatttctgtccggctgcaatttaaaaatgaaaacttaggtagattgactcttctgcatgtttctcatagagcagaaaagtgctaatcatttagccacttagtgatgtaagcaagaagcataggagataaaacccccactgagatgcctctcatgcctcagctgggacccaccgtgtagacacacgacatgcaagagttgcagcggctgctccaactcactgctcaccctcttctgtgagcaggaaaagaaccctactgacatgcatggtttaacttcctcatcagaactctgcccttccttctgttcttttgtgctttcaaataactaacacgaacttccagaaaattaacatttgaacttagctgtaattctaaactgacctttccccgtactaacgtttggtttccccgtgtggcatgttttctgagcgttcctactttaaagcatggaacatgcaggtgatttgggaagtgtagaaagacctgagaaaacgagcctgtttcagaggaacatcgtcacaacgaatacttctggaagcttaacaaaactaaccctgctgtcctttttattgtttttaattaatatttttgttttaattgatagcaaaatagtttatgggtttggaaacttgcatgaaaatattttagccccctcagatgttcctgcagtgctgaaattcatcctacggaagtaaccgcaaaactctagagggggagttgagcaggcgccagggctgtcatcaacatggatatgacatttcacaacagtgactagttgaatcccttgtaacgtagtagttgtctgctctttgtccatgtgttaatgaggactgcaaagtcccttctgttgtgattcctaggacttttcctcaagaggaaatctggatttccacctaccgcttacctgaaatgcaggatcacc

SEQ ID NO: 5848 - DNA, 1195 bp, Homo sapiens
ttaccaaaaagatgagccatggccatgtgtcaacaatatccttttttgagagctcaattaaacataataaaaccagttataaaagaattagaaaaacatgtaatccccatgctttggaaggccaagttaggaggatcagttgaggttaggagtttgagaccagtctgggcaacatagtgagacctcatctctacaaaaaattaaacaaaaattagctggctgtgatggcaggtgcctgtggtcctagctacttgggaggctgagatgggaggatcacctgaatcctggagtttgaggttacagtgagccgtgaccacaccactgcactcaagcctgggtaacagagtgagaccctgtctcttaaaaaaaaaaaaaaaaccaaaaaaaaaaaaaaaagaaagaaaaaggataattaaaaaggggcacttaccctgtagtaatcccacatttccagtaaagaagaaaggtaaatttcataaagatgggtaagctctatatagatttgtactgattttagagaagtaaattaatttgttgtgccattaacacctgtagttcctaatcctgcaactattctgatctcagtataattgtctgaaaaaaatttttttgttgttctatgttctatgttctgccctcccttcctctctcccttcctccctccctccctcattcccttcctcccttcctctcttcctcccttcctcccttcttcccttctttccttccttccctcctttcctccttcccttttttccttccttatttttttccttccccctctttcttttcttataagtggacaagtctaaattcttacttgctcataaaggagtctgatacttatagcagacaattcctcaagggttttgagactcccctaatgttttctctagtcatttacagaaacacttagataaatttgtttcaccagaaggatctataatttttcaaaatatagatgattttgctggtagcctcagaaactaaagagcaatgcaaaactaacactttggctttgttacaattctttgcttcacaagggcataaggcctcactagataaattgcaacattgcttttctgagtaaactatttaaggcatctgtgttcagctgtgggccttagagtggtataatctaggggtcatctcattttgcagatctaacagccaaatgtagtgctatggttagaat

SEQ ID NO: 5849 - DNA, 1205 bp, Homo sapiens
tcctgtgtctagcctgtgaccttgggagtcttttaaaaccatcgttaggaagggtgtgatgagtaattgaatctttcaaaggcaagaggactggaactaaaagttgctttttcaaatgttaagcagctgttgcttaagaacagctaagggtgatcaagggtagtggtaaaagttaagttggcccttttaaccagttttatgtaaattgcagtgttactaaactacttagttcaaattgcttcctactgtggctgaggcttagctcgttatcgttttctttagttattaaggaacaatggttttagtggaaaatatgagaaatgtgcgaaagtaaaagtgtccaataaacttgaggaactttttgcagtgaggtaatactattccttttcaacagactcaccggcccaaaaaaaaaaaaacatggttgaagcagatcgcccaggaaagctcttcattggtgggcttaatacggaaacaaatgagaaagctcttgaagcagtatttggcaaatatggacgaatagtggaaggtgagttgtctggcagtacaggctgggctattataattaaaatataagctatgatgaatttgattgcattgatcgtctgacatgataatgtatttttgtcctctaagaagttctgagctttctgtttacacatttactttggttatttcatttgacctagggtaacactttatttttctgaaaactactttttagtactcttgatgaaagaccgtgaaaccaacaaatcaagaggatttgcttttgtcacctttgaaagcccagcagacgctaaggatgcagccagagacatgaatggaaaggtgagattgtctacacgatggatgataacctgttactagtgcataaaataacatgtagttgtccaagtctggtctaggacagcttttgagttttcgttgtttttcagtatatacctgtctgggatccactcatcctgtttgtgatcctgttccaaagagtattctgtaattgcagaaccaaatctagtagtgagttatatcttatgctcgtaacattctctcagttcagaataattatggcattacatggtacttttttttttttttttttgatagtctccctccgttgcctagcctggagtgcaatggtgcagtgcccactgcagcctgtctcccgagttctaagcgatttttctgcctcagccccccccccc

SEQ ID NO: 5850 - DNA, 1205 bp, Homo sapiens; identical to SEQ ID NO: 5849

SEQ ID NO: 5851 - DNA, 1179 bp, Homo sapiens
tgagagcttgtcattgcctcccgtgtataacaggcagcaagaaactaaatttaaaagtctaacaccaatggaaatccataaagccacctgactcaatgactatatccatacagccattgtcgtttgttggcaggcaagtagctcaaagcaaatcaatcaaatctgtttttgattggctgactcacctaccataatagctgtgcatgaaaatggcaacaatcttagactaaaataagtgaagctatagagaattgagtgtgcgtgtctgtgtgtgtgcatgtacacaccccggatgctatgctgcatgtacatgccatctacagctaacgttataatgccaaaatgaagaaaaggaaaggaaattcacactttgtgaacacagtaaatatgttttgggcactttacatccaccacgcctatttattcctcatggtaggcttactgatcagaaggcagatataatctattaaatttttagtttcaggagtgcatgaatgatgtctgttttattcgccattgcagctacagtgcctaacacaatgtctggcacatggttggcactcaataagtatttttaaaaataattaagcggaggaagaggagggcgggcatcaagacctattttacagtgagtcacgcagctactaagggacatagctgggactgatatgcactttgttctcagactctatgctatgtctgcactgccatattgttctccacaatgacataggagggggagaaagaagaaaaacaatatgtcactctgtttggagattggtaggctacagaaacagtatcaattcagacgctcctaaaaacagccttgctgaaaagcttttgacccagagcgcgtcaggatgcttctagtccaattgtttccaattatacctaattcacctacaggagaaatttatcttctcacaaagcaccagggggacccacgatatttgctagtgactaacaaaaaatgcatttaggagttaatacatcacttccaaactggtcttcgtctgcttgagtttccaacaagccttgcagattctcctaaattcccacttattctccatacttttttcagcaaccaaatcctattttcgaatatgacaagaaataaaatgattttaggcactagagttgagaatttatagataaatgttacacttcgatgcttaattc

SEQ ID NO: 5852 - DNA, 1170 bp, Homo sapiens
aacccatgattcattgctacatgatgttagatgtatagagcctttgcatttagtgactcccgtctgttgtgtttgagctttcacgacacctttgaaagttttgtagtttgtctacccttcctagctaccccttccctctcctacttcttttcagcttatctgcccccaccagctaggtctccttttgccatcatcttcctggctgccattgcctgaggacttggggcttgggcctcctagatattaccattacttcattccttgcccattccccagtactgagatatctgcagccctacacctactagctacttagcctgatcacacctccagcctgtacgccagtttagaggccttagggcagagctcagctttctcacccttgttctttgaaaaacctgggttctgtttagttcccctcttctctggatccctggcccaagctagatcctttcataggtatcattgtgtactagttatcagatactatagcgtattgcctggtgcaattcgtaaccgtcgtgaaatcttttgtgttgtatcttttcagcttgccttggatacccgattctggacgtggataaatcactttgtgatttggggttctttagccttctatgtatttttctcattcttctggggaggaattatttggtaagcaattgtacatgtgtgagcaatatgtaaatagcaaagtagatacatgtgtatgtacactatatatgtaagcattcattatactttaaaaattttaattatataagatgacacgtctttaatattaatggcctgaaggttatttgttagctggtagtgctactaatttcaggtaagattttaaatacacatatatagactgcacaagtcactcagaagacctccctttggtagcttctgtctgtttgaaggtgttgtaaacatctctctagtgaaactatagttttcagcacaacctctcgtgattttcagaggaaatactcatcctgtgaagtttctacctgatatattgaccaacagatacattattgtccatttggacccttattttctcttgatagtatataaccatgattcatgttactacaggtgtgctcagggtataggatatatacaacttaataattcagagggttgtattttgaaattgtcatcttactgttttggtggagg

SEQ ID NO: 5853 - DNA, 1201 bp, Homo sapiens
cacgcacagacacacattctgtacacacacacacaaacacatattccgtgtacacacacttccatacacacagagacacgttccatgcccacacattccatacacacacagacacatccagtacacacacacacagacacattccatatacacacacacattccctacatacacacacagacacattccatacacacacccatactcattccatacacacagagacacattccatacacacacgcacacattccacacgcacacacattccatatacacacacagacacattccatacacacacattccatacacacacacacacattccatatacacatacacattccgtatacacacacagactcattccatacacacacagagacacattccattacacacactcagacacattccacacacacacattcatacacacacacattccatacacacacacagaatcattccatacacacacagacacattccatacacacagacacacatttgatacacacacacattccatatacacacacattccatacacacacattgcataccaacacacacacattccatacacatacacagacacacattccatacacacacaaacacattccgtacacatactcagacacacattccatacacacacacacattccgtacacacacacagtcacacattccatacacacacacattccatacgcacaaacacattccatacacacacacatattccataaacacaaacacattccatacacacacacagactaattccatacacagagacacattccatacacttacgcagacacattccacacacacacacattccatgcacacacatagactcattccgtacacacacatagacacattccatacacacacagacacattccatatgcatacgcaggtatgtccccaaagaaatagattgtctccatcatatgcacattaacccaacgaaatacttttggagctctgtaacacccaaacttgactcacaacacacatgaacactgaaccacacaaatgaaacctacactacccagacatacccattgtttgaagacttgctgcaaaatacccagccttacgccatgatatacagacttggcccattgacctatacctaccttgaatcacagggactgatagagcaacactcagatgtggc

SEQ ID NO: 5854 - DNA, 1230 bp, Homo sapiens
gatgacctcatttctggtagtagttggagcactaatagtcactggcatgatatagcagtgcaattattaaaatattcattggcggtaaactggaatggaataggggatagaaaagaatgtaatagtatacacaatatctgaggcctttacaaggttttaggagagtggtaattataaggggtatgaaattggatggttttgtggttattaatgatgcaccggagaaaaacaagcaaaggctgagtgtaacgaattcccaatttaaggcaaaatagaaaaatctgagggattcttttatataaagaacctctcatctcctgcagctgaagggcagaaaaagctgaggttatgaatcagaaattatttacaagggtagagtagctcaagaagcttgaatgcatggatgtgagggtggtctggctgtgacatctgtcaccccattgattgccagggttgattcggttgatatggctggctaggtgggtgtccccttcctgcctcaccactccatgtacatccctcctgaagctgcttgcttggtcaaagaggacaaccatccctgatagaggaggaccggtcttcagtcaagggtatacgagtagctgcgctcccctgctagagcctccaaacaagctctcaagaagattgaatgtttaatcctgattatgttagacagaacaatcacagagaagaagaaaactctgaatcttgggatggggccatctgtgtcaatatatctgcaattcttgattcctcgggttcccttgaacccactgggttggcccagtgtctcactgttgtctgtcaaaatagcatacattcttttcttgaagaaagtgcacaggtttttgctttgtacgacaatttagagtcacaattaatctccacccaccttctggccaacagaaaaataactaaggtgaagtcataacataacttggctagggaaagtactgggttggcaaaggagggaaagggagcatatgctgaatgaactggagatactaaaagaagggtataaacagggctagaccctggagatgatgactcaaagggagggaaaatgcagatggaaggggtgagtttatcaatatggaatggatctcttaggattaaggatttaaaaacccagcaaaggtcaaggagaaagtgcaaaaagtccctacttgaagtgaagaagggtaatgcaaaaagtgcctactctatgtgaaaaataaataccatggtaga

SEQ ID NO: 5855 - DNA, 1164 bp, Homo sapiens
gatgtaagacctagctgtctggtcagctattaaatagttttgttttcccctcatgaggaatagtcagcattttcagttgatgaaaaaatcattgttccttaaccatagtatatgttcttttaaaacaaaagatggcccaaactcaatgctttgtaaattaagatattaactggcaaatctattttaatcaagattatttacaatgtgtgattttttaaggttagctggttataccttgaatgtcatttatctatattcatacattttagcatgttttatttaatatcctatcatgaagaagtccccaaaatagcatatctgtgccttagcagtagaataattggataatagtgccaaattagacaactttaaattttattcagtataattttactgctgagtgtttttgttatatctctaattcttgacatcaataatctgttatctgtagtaattttctttttaaggagatcattcaatttcctgataattctgtgtaacagtgtttactgtaaatttagaactgaaattgaaatattccagtatatttttatctgatgaaaaggagaaaggttttattaagtaaaatgtcaaattatttttactgttatcttgtatattttaaataggaagtagaccagttgcgtttggagagattacaaattgatgagcagttgcgacagattggagctagttctagaccaccaccaaatcgtacagataaggaaaaaagctatgtgactgatgatggtcaaggaatgggtcgaggtagtagaccttacagaaatagggggcacggcagacgcggtcctggatatacttcaggtacaaactaagcattttactcagtaactttatctgttcctagacttatagctgctaatctctaatattcattagaaccccattataacaatttgccgctacatggtttccaattcacagtgggttaaattgtgttacaggagacatagagtaaaaacctgatgataaacacgtagagttcacagggccggtgcaagttctgttcatgctctgattgggggtaaatctgcaaagcccttgtgtgttgatgattttcttaaggcctctcctgattttataactgtatagtcaaaacttttttcatttgtgtactgtggctcatttttattttgtcaggta

SEQ ID NO: 5856 - DNA, 1223 bp, Homo sapiens
ggaaacacaaacctattcattctctctcctcccacccccatctttttgttattttagacaaacaaaggtgatgcacttgccaaccgagtccagaacacgcttggaaactatgatgaaatgaagaatttgctaactaaccattctaatcagaatcacctagtgggaattccaaagaattctgtgccccagaatcccaacaacaaaaatgaaccaagcttttttccagaacaaaagaacagaataattccacctcaccaggataatacccatccttcagcaccaatgcctccaccttctgttgtgatactgaattcaactctaatacacagcaacagaaaatcaaaacctgagtggtcacgtgatagtcataaccctagcactgtactggcaagccaggccagtggtcagccaaacaagatgcagactttgacacaggaccagtctcaagccaaactggaagacttctttgtctacccagctgaacagccccagattggagaagttgaagagtcaaacccatctgcaaaggaagacagtaaccctaattctagtggagaagatgctttcaaagaaatctttcaatccaattcaccggaagaatctgaattcgccgtgcaagcgcctgggtctcccctagtggcttcctctttattagctcctagcagtggcctttcagttcaaaacttcccaccagggctttactgcaaaacaagcatggggcagcaaaagccaactgcatacgtcagacccatggatggccaggaccaggcaccggacatctcaccaacactgaaaccttcaattgaatttgagaacagctttgggaatctgtcatttggaacactcttggatggaaaacccagtgcagccagttcaaagactaaactgccaaagttcaccatcctccaaacaagtgaagtaagtaatttttaaagttttgtttggtttcacttttttttagttctctgctctaacctctataatccagtattcacaagcagctctcatttaccttaatgagctgtataggatactcttcaagttcagggtctgaattttgatcttctgtcacttgtgacataactgattaacacgctgcaaatagagttaaatctcaataatttggaatgacagaagacaaggtcggtctgactgaaagaatgacaagttggagttataaaatagtttcataaaatacagttgtggtaatactatgtataaat

SEQ ID NO: 5857 - DNA, 1192 bp, Homo sapiens
gagaaagcagagaggaggaggctgaagaaaggaggaccaggaggagaggaggaggaggaaaggaggaagaggaagagtggaataagaggagcagaggaaaaggaggagggggtgggggaggagtggagaggagaggaggaggaacagagttggaggaggtgaaagagaaaagaggagaaggaggagaggaagagagaaggaaatgagaaggagaaaagtaggaagaagagagaagagagagagaggagaggatgaggaggaggagaggagaaggagagcaggaggtgggaggaggaggagagtaagaggaggaaatgaggaggaagaagaaagaaggacagcagatggagaggaggaagagagaattaggagaggaggaagaggggaggagaggaggagaaggaaacgaggaggaggacgaagctgcatcacccttatcaggttccagttctcggtgcgccccgttctgcaagacactctcctgtggtcagccctggcctgcagaggattcccgcgctggatctctgaaggatgctggcgccctctctgcagcacattcctgatgcccttgctgacacatgtgtcctctgggtcctctcctgaaacctgatcctccggggtgtcttctggcctcacctcttctgtccagttccagcaagctcactttgcttagcctttgaatcccttccttcactgtctgctgtgacaattcgggcctttcactgtcactcaggcctggaccatcactgttgcccatcccatgccatcaacaggtttgccccatcccttcggctccctaccagggcattcagttgtgttgagcagcagagtgcctccaagtccccactggttgagctgcatccgggtcccatcccacagggaccccccctggccgctgcaggtgcatgctgatcctgcagctcctcgagggtgtcatcgctttcccccttcccagacccagcacaccctgcctgcatggcgctgcgctgcaccttcactctggtcacgggtctggcagtcggctcaccaattcgtcctgcttccctgggactcgccggcttttagcactgcaattcactcagcaaactgggactgttggtcaccctacctggcagccagtgataaggtgagggccactcctgggagggaggacacctgtggggaaaattcttgtgttatttatttctccttc

SEQ ID NO: 5858 - DNA, 1190 bp, Homo sapiens
gagtcggccctagacacccacgactcgcagggtccatggttccggaggccgtgagacctgccggggctgacaggtgccagggcccatgctgcgggagcctgtgtgctcagccttcttgcggacggtacctgagggctggggtttccctggatgtggggctgggaactcgtgcggggcgcgaccgaggcgccttttcctgtcccctgctgtcggcagggtctcggctccgctccttctaagcgcgtgtacccgcgacgtgcgtctgcgagtagaaagcccgtgtactgctccacacacagcggccccacctcagtccggtcttccctgcctcccgttggcccttctgctgtgagctcgcctggacctgaggccgggcggtgcacagctctgtggcctgtggcgccgtgctcagcgtgacctacccagaattaagctgaggacaatgggatttagagtcccaaacactcgccccgtgacaatgggaggggaagtgtcatttttctcccttcgaatggagcatgcttggctgcaagaatgctgctcaacatggtgaaatgattttctgccctgcgggctggtgcaccctgtggtccttgacccagacaggtgcggagggtcccactgctgtgattagcagaaccaaactgtgatgtgcacatgtgtgttactgataagaccaggcctcccagctcttcttggtttccaatgcctgctaagtacatgaccttcttagggccattaaccagctttgctgtcttgcacttaatgacctttcctctttatcttccttgttgtgcaggtaaagaagctaagtggaagagtgtttcctcctctggccgtaaagcaggtactctctgcagcaccaggtaggaggggactcaacccccttcttgccttttcagttacatcagttcctactagggattccacatacacacagttggcgtctgttgtgattttgtggtgatgacgagaaaagggttggctaagaaactgggcggcagaaaagaggcaaacattcactgtagccatttatcccgatggaagtggccaggccctgtgggggacattcagcctccgtcagaagtaatccagaaccaaggaacctggttatctttggtcactcatcagaagaataatcatgctcaggggccacaagtgtgtgaggaaatggcaccatggatgggttg

SEQ ID NO: 5859 - DNA, 1143 bp, Homo sapiens
gggaagagaagcagagcgtgggactgtccctctgtgctggaagagggctaacaccagccccgactctccgctctggctaggccgagggggccctctgtcctctgtgttgccctagggctcggtgacctctgtcatagcactgaccacatgctatcctgcctgtgccttcctctagctgtccccgccctactccggaccgccccaaagactccatgggatggacctgagtcagccgaatcctagccccttcccttgggcctgctgtggtgctcgacatcagtgacagacggaagcagcagaccatcaaggtcagtgcgatttaggccacctgagagacacggggggaaggtcaggccactgcccatgagcttgaagggctggcgtgtgatgcgcttctgtgcttccgcaggctacgggaggcccggggcgcttgcgaagatgaagtttggctgcctctccttccggcagccttatgctggctttgtcttaaatggaatcaagactgtggagacgcgctggcgtcctctgctgagcagccagcggaactgtaccatcgccgtccacattgctcacagggactgggaaggcgatgcctgtcgggagctgctggtggagagactcgggatgactcctgctcagattcaggccttgctcaggaaaggggaaaagtttggtcgaggagtgatagcgggtaagtgacaatgtaccaaatgcgcagacaacgcctagggctgctgcccaagatcttgcttgggaatttgggggcttctcttgtcatctgaactgattggcgtgtataacacagtttcctttggcaacacaccttcaaaggggcggcaaggaccttgggctgggggttggtatggctggcttccgcaagctctggtaaatcatttctccactctgggccgcagttctgtttctgatctcagtgagaagcctggtcagggccatgtgcacatggtgtttgtggtgtttggctgtgtgtatttgcacatacatgtgtgagtgcacatgtgtggcagagaccatgaaaagcagcccagcccgccgaatgggtcaggtggcctctagagttgggctgcccgcctggcttcatgaacctgccccagccccaccactcacagcaccctgggaaagtcc

SEQ ID NO: 5860 - DNA, 1099 bp, Homo sapiens
caaaaactattttatagagagttttactgcattggtagatcagaaattcatctctttgacgtcattaagctctgatggttgtatatatgaaaccttgatgccaatacgtccaactgacccagaaaaaaatcagagcttagttagatcactgttgctcaaggctgttgtgtctggtaacacttgaaatggagttgcactcactgcgctggatcaggatcacgtcacagtcctaggaagtccactagcagcttctaaggaatgcctctctgtatggaacataaaatttcaaacactacagacttcaaaagagttaccacaagggaccagtggtcaactctggtattatggggaaaatgtgtttatgctacgtggaaaatctctgtgattccatacaactgtgaagtgtcatcattagcaggtgctcatggaaaactcaagcatagtcaagatccaggaactcatgtcgtgccccattttgtaaactgggaaacacctcaaggatgtggacttgggtcccagaactcagagcagtcaagaagaattttaaggagacgaaaaattgaagtgagtttacagccagaggtatcaccatccaaacaacttttgtcaaccataatgaaagattcagagaaacatactgaagtagaagtatggaaatttttggctctgaagcagacccctgactttcatactgtcactggggacacagtaacaggacttctggaaaggtgtaaagcagaaccatcattttatccccggaactgtctgatgcaccttatccaaatgcatgtgctttcttacagtttgtgccctgacttaatggagattgccttaaaaaagaaagatgtacagttgttacaactctgtctacagcagttccctgacattcctgaatcggtcacctgtgcttgcttacaaattttcttgagaattggtgatgacagtattcaagaaacagatgtcagtatggagtcagtttttgactatagtaattctgtacatgatgagaaaatggaagagcaaactggaattcttcaaaatggcttcaatcctgaagaagataaatacagtaactgtgatcaagagttaaataaaaagc

SEQ ID NO: 5861 - DNA, 1198 bp, Homo sapiens
ccttctataagaagataccagagagatttattcaaggtaatttgataacctaaaatcaattctccattttttatcatatgtgggatttgttgctaagtcgtgttcaacaatagcttttatgttcctaacatatctgaaagcttatttatgaatggatatactggattattgatatactgattttttttttaatggggacatttgccattttcttcccagaaatatgtaatcccctggctgactaggactgttaaacatagtgtggactggatgatgccttcgacaaaccagagaagccaagttggggggagctggtgcctggagtgggccctgtgcacctcacctggcggaggctggggggggctctgtcagcaggaccctagaggagactctcattcgattttaaagaagcacaacgggtcattttcctttgtatgttcctagcgcagaactgtttctaaaacaacttgaagtatagttttgttatctaagcaatttttgttttaagtaagtaagtgtactagaatgcgaagccgttatggttcaggtttttaaaaactggtacagtattgtatttgtctcatctgttgcactgtatttcaatcatctgtaattaaaatgatcatatgtttgctccctggtcttttttaagtaagtaagtaagtatcttagtagatttttcctttgaggaaaatcggtaataaaataacatggattgaatgtttactgtgcgtcaagcacagttaatatatgatgatgtaaagtaactaactttatgtgatttaattcattcagtaaattgtaaatgtatcatgagtcttaagtaagtaagtaagtaagtaagtaagtattttggctgaaacaggaaatactgattgattgattgattgattgattgatgattgtaaagtcagaaacgccctcagctctaaccttgagaaaacgtggacgacttggggaaaggtctggagacacctgagaggagccagtcagggtgatgagtccttcgcatgcaagtgcagtgctctctaaggcctcagactgcccccaccccaaaggaaggggcgttcaccttttcagggccacgaaggcctggatgaaatcacaccaccccctgtgccctctgtgtgttgtcggtcttcttgttaagggtgtggggtccctgtccctctccacacacgttactactgagtgagcc

SEQ ID NO: 5862 - DNA, 1819 bp, Homo sapiens
atgagtcaccagacaggcaggatcttacaaaactcacgggcctctttggtctgcatgatggccccatgcgtttcataggctgtccactgagcgggattgtctgctgagtgggatgagccaactccagtttcttaaggaaaccactggaatctgcagcccccacatgcatctgtctaacgcatgcctcgtgttcgttttgcaaacatgcctgtggtggagggtggtcagttgtagccctgtgcgtctcaaggctgccttgtgaggccattcccagtgcgtgcccttgagctccttaccaccccttttcctgctcggccctttaatccctgacagacctggactgtgtggctgaagggggacctgcagcactgcagaaatgcctctgcgtggtgccatgaaggaaagaaaccttggcctggtctcgagaagcttcccatgcttcaggaagttagtaagggtggggtggcttgcaggattggcctgtttccagggcctcccacactcattggccagattgtgaactttgtcaggcttgtccctccctgataccaagtatgtcgagaaccgatggccccaccctctggctggtgctgggccggaggtggctatggaggattttggcatgcgtggcctgtcgccacctggacagcgtgacctcaggggttgtccactttacctttatggtgaggcctgtcggatggctaagtccttgaaaccctagagctgtgacgtagaatatgtgctgtctgtgagaccgtgttcccaggagcactgactgcagttgagagagacccattttgctctcccttaccgccccccgccccgggtgctttctgcacaaagcctagagcctggcactcaagcccaccggtggcagctcctagtgactggacatgcctggaagacccctcagccttctgtttgcagaacgttcatttcaggagcttctccttcccacagacatcttacacttgctcgacactgccacctgcagaagcctggcgggctctggtcaccatgtgtctatctgaaggttgcactggccagcatgggcctgtcccaagcgagaggggagacacagtggactgaaaggactggttgaaagtggccaatctctatcagcttaatttggcagagaaaatttgtaacaactctgagcacatgctgggtgaagtcacagctcaaggaaagataaagctgggcggaaggaggtgtgcgtggcttctggggtgggacccagaggggaggctctgggacaggggctggggttcagtgccagggccctgaggaagaaatggggactgatctcaaaattccagaattccctgtacatctgttcacgtgcttgtgtccaggtgtgacttgtaaactgtctagtgtttgcattaaataaaatggcaccgagcagattcttgtcttctgatggtgttaaggcacgcccttggtcaagtgttgccacttttccctaaagtaagtaatttatgatgcagagctgccctcctccccctccccccgccccgcccccagctgaaggtatttctcgagaagcttagaattcttgcatttacccctcagtgactggctcagtgtcaggacttccaagggtgactcctcaccgtacaagcagctaaggccaggggatgtggagcgaccaatgtcctggggttagagagggcagaggcaggagcagagtgctgcggggccgctcccgggctacatgggttgcgcagtccggggcctggaagcagcaaaaagtcccaggctcacaaatcccaagtcgactgctctgccgccttccaagcaggctggtaaccagtgg

SEQ ID NO: 5863 - DNA, 1279 bp, Homo sapiens
tgaagaagaggaggaggaagaagaggaggaggaggaggaggaggatgaataaagaaactgtttatctgtctccttgtgaatacttagagtaggggagcgccgtaattgacacatctcttatttgagaagtgtctgttgccctcattaggtttaattacaaaatttgatcacgatcatattgtagtctctcaaagtgctctagaaattgtcagtggtttacatgaagtggccatgggtgtctggagcaccctgaaactgtatcaaagttgtacatatttccaaacatttttaaaatgaaaaggcactctcgtgttctcctcactctgtgcactttgctgttggtgtgacaaggcatttaaagatgtttctggcattttctttttatttgtaaggtggtggtaactatggttattggctagaaatcctgagttttcaactgtatatatctatagtttgtaaaaagaacaaaacaaccgagacaaacccttgatgctccttgctcggcgttgaggctgtggggaagatgccttttgggagaggctgtagctcagggcgtgcactgtgaggctggacctgttgactctgcagggggcatccatttagcttcaggttgtcttgtttctgtatatagtgacatagcattctgctgccatcttagctgtggacaaaggggggtcagctggcatgagaatattttttttttttaagtgcggtagtttttaaactgtttgtttttaaacaaactatagaactcttcattgtcagcaaagcaaagagtcactgcatcaatgaaagttcaagaacctcctgtacttaaacacgattcgcaacgttctgttattttttttgtatgtttagaatgctgaaatgtttttgaagttaaataaacagtattacatttttaaaactcttctctattataacagtcaatttctgactcacagcagtgaacaaacccccactccattgtatttggagactggcctccctataaatgtggtagcttcttttattactcagtggccagctcacttagggctgagatgaaggagagggctacttgaagctactgtgtgattttgtttgtgtctgagtggcattcagatgaagtctggaggagttaggagaacgacataggcaaggttcagcagccttccaaggtataggaaggtgggtgattaggactgaggctatctaggtttaacttttgtcccacctccaccccctattttgtggggccaaatgcattgctaaacagcaatttcagagtgtatggtgt

SEQ ID NO: 5864 - DNA, 1178 bp, Homo sapiens
tatcctgtttaacctgaaggctccagtaaagttcagtgcccggcgctgggagctctgtgcagggcgctgaatgtgccagtgcgcggctctgcgcgtggacgtggacgcggcatgtaactgaaacaggcacttctgctaatccttgcaggattttttctcctcccccccacccccgcccacctcgcgccacccttcccgcccgccctctcactacttctttggtctcagactaaattttacagggcttccctgcttcccctcagttttcactcttaggttacctcggaacggtaagtatttgacttggcaaggttttaggttactgcttgatcccatcggaaaagactgtttaagaagatggcctctaatgccttttctcagaatcttctctctagtaatgtgtttattataaatgcaatgctaggctataggagggagatggctaatttatctttttctaattatttaattatttttaatttttttagtttgaggcttcctgacatccctccagtgtctctccttgccccccactctccagcctccttcctaaaaacaagtccctctagctcacctctactcccctcctccttctccctccccctcacctccagtgaaggaaacgtttgcattttgtttttctctaagatggtggcagcatgaccctgtctcattgtgaaggctcctggcagggattttgtgctcactgctgtctgtcttatgttcgcttctttctcagagcatttctttaaaagaattctggaattataaaaggtcataatccagctggccttcccctgcaccttaaatgtgtagatttctgtacttaaaccacttattcttctctgtctttcccctttctccctccctcgatatgtttttcaggcaacatcttcgtggtcagtctctctgtggccgatatgctggtggccatctacccataccctttgatgctgcatgccatgtccattgggggctgggatctgagccagttacagtgccagatggtcgggttcatcacagggctgagtgtggtcggctccatcttcaacatcgtggcaatcgctatcaaccgttactgctacatctgccacagcctccagtacgaacggatcttcagtgtgcgcaatacctgcatctacctggtcatcacctggatcatgaccgtcctggctgtc

SEQ ID NO: 5865 - DNA, 1099 bp, Homo sapiens
tgcttgcccactggcccttgaaagtagctgagctgctagctgtgcttactactccctactgaaaaaaaaggcttttttttgtattattttgtgatgttttttgtattattttgtgatgtttgcaagtcctgaggtccaggatgtgccacgggctcacagcatctgctcgcccaccttgttcaggcatccccttcccactccactcattcctcttgctttgctttgtgtgttgacctccagcttgcttttcttttcagtgtgggatttgcagtaaaccgatgggcgatctcctggatcagatcttcattcaccgtgacaccattcactgtgggaaatgctatgagaagctcttctaggtgggtgctggcactgcaaaggacaagtggccaagagactcattaaggagtagagatgcaccctggtctctcctggagtctcagccccagacacagctatctttcttggctcttccttatgttcagggggccttgtgtcctcatgtccctatgccttgtgatactttgagatcttaggtggcatggacaaaggccctcaatgaggacacttccaaatcacaccttccgtccagcacctgagccgagccctctagctaccctgggatactcgctcggccgctgttgttagccccattttgcaacaaggaaataaagatatagaaagggaggggacctggagaaacccaggtagaatcaggacctcaccccaggtctttggattcttgtccagggctctctgttcactgtcactcgcatagcttcagatcaggactgcatagccatggtgctcagtgaaacaagcctctgggccacattatgagaactgcctgaagatgtgtgtttgcatgctcatagccagtggaatttatcacggtgtctgagcacagagcagaatatatcccttgaaggcagtagcaaccaggctttccactagctccatgctgatggtcttctctccagaagacacaccttgagctaggtggtaactcctgatgactggagcagtcacccaccctgagggcctctagctgatgtgtttccagtctcatggctacttctgttttcttttagcgaccccccac

SEQ ID NO: 5866 - DNA, 1161 bp, Homo sapiens
tatgatgacattttctctagaattttaattacaaacaaaaagctgcaaccccagcccatcagaaggtgagtacaccaggtgggcaggctggatggaaatgggccagagaagcaggctctttcctcatccgagatgcggactccctgtctatctgtgggcaccacttgactatccaacctgaccactgcggcacactggagatgctcccatcatagattagccagaactctgtgactgctcatcattatagaccccgccagcagcagtggggcttggcctcacctagatcaatggagtggtccaaacttggtctgggagcaagcagcccagccatcctttgagctcctgggagccttggcaatgctccgagtggattcagtgactgagcagcagattcacccaagaaacatctccttggacacaagaagacttgcctagaccacatcctcctttcagccggtgactctagaactagaaagagattggttcataggcttctgctgtgggcagctaggggaaaattcacccatgtgttctggcatcacttcctatagccacacctaagtgagggcaacagagcagaggctcggagaggaaccctgcccctccgatggcttgtgcgttatgctgatagaagctggcagcactgccctgggctatgatttgcaacagccatgcccaggaggagcactaaagcaaaggtttggagggcagtggaacccttctgaaagcctgtgtggcatagaagtagaagctggtcctcctgggtctgagctaccatttccagtgggctcccccaagaggaacagcagcaagggctagcgaggaacctgcccctccagtggcccacagaagccacagatagaagccagccccaccagggctgtgctgtgacttcccagcagctgtggctggggacagggacactaggagggcctggcaaggaagtgtgcccttctcgtgggcccaccaaggctgaggcagagcttcctagcagacacaacttggaagggcttctcaggcacccatcctgacccccaggctggagaggagccaaaagcacttgttacatagtgattccttttgccctgtgggcctcagttcttgcagtagttgtgaatctgtgtctgaaatcactactttcttctcggatcctttttc

SEQ ID NO: 5867 - DNA, 1213 bp, Homo sapiens
ctatgagtgagaacatgcggtgtttggttttttgtccttgcgatagtttgctgagaatgatggtttccagcttcatccatgtccctacaaaggacatgaactcatctttttttatgggccgcgtagtattccatggtgtatatgtgccatattttcttaatccagtctatcagtgttggacatttgggttggttccaagtctttgctattgtgaatagtgctgcaataaacatacgtgtgcatgtgtctgtatagcagcatgatttatagtcctttgggtatatacccagtaatgggatggctgggtcaaatggtatttctagttctagatccctgaggaatcgccacactgacttccacaatggtggaactagtttacactcccaccatccttttggtttcttttctttcctctgcagctaccaagatgaatgaactaatggagaaatagaaagtcttcagtgatggcctacgccaaagcacaggatggggcgggcaggaagccctctcccaagatcgagttggccgaggatggatgattgtggcagcagaagccgttgcagccccacgttgtgctctaggcagggacctttggcccctttggggagggagagacagacgggcggtttgacttggacacaaagaaagccttggtttctaagcagttgcctccagcctgctttctgcttcctcagctctatgtctctctccttccccttgtcctgagctgctcaggtggcccaggtctgggcaggctggcggcggccctcctgtcatcttggcgggcctgggctgcgtcctcttcctgtggctccactcctccctgctgctgccagccacttgaaagcagagaacccactgtcgcctcccccggctggccttagggtcctgtgcgagacgcacccctcagccgccctccttgagtgcccctggatcccccgcggggtaccagtttcctgctcctccctggctgggcgctcagctctgggctggggaattcagcctgactggttgtccaggaagatgctgtctgggcttcccagggtgacccagtatctccctgagcagtgtgcctgtcacagctgcctccctccctgtgagtaccggaacaggcgtgactggtagggcctctgcctccttggggccattgtacctgctgctgcccgccccaccctgctccctcctggcaccatctcctttgcttccccaaggt

SEQ ID NO: 5868 - DNA, 1103 bp, Homo sapiens
gagacgccgggcaggccgcggcccctccccgctccctccccgcgagccgccagctacagtgcccctcctgggcagggggcggagaagacggcgactggaggggaggaggcggcggcagaggcggaggaggcagcggcggcggaggcgggatttggagtttccctccgcagcggcggcggcggctgcccctcggctccaggagaggccgccacccggggttccggtggcgttaggctgcagcagtggcgcttcccgccgcccgagcttcggaaacttcccggccgcgacgcagggaaccggcgcggagaaccgagcagagcggaggtgagtggagcaagcggcgccccggggacccccaccccccacccggcctggctgcccccgccccgacgtgcgctcctccaccctgcacccccaaagtcctgacaacgcacaccccacgaagccggcgcacgcgcccctacgacacccattcggtgctgctccgcacacccccgcacgccgcccgtgcacctcccgtgtctcctgccacttgcaccggctgcacactcgcgcgcatacaaaccacgcaccacagacccgggtgcctgtagtgcacacactagctgcccctgccccaccactcaccactgtccccaactcatgccaacccaccgagaccctgccacgccccagtacacacccaggcgcacacgcacgcttccaacacgtctctgccatacctgcaccaacatagctccccctaccatgcccccaccacctcgaactccccatctgcccattacagacaccccacccacgttgccagcccagagacactgcagtccacccatcctggagcgaggtcccgtcagaaacccacatcccagtggctgacgctccccacgtcccaggcacacacctccagcatctccaacgcgcactctcatccaccccagcacgcgcgcacacctgctggattcacgctctccagcatcctgccccgcccccatcacaaatagccttcgacaccccccagcacatctctgagtccctccctccctcacccccaacacctggcacgcgggctctagaggctgcagcatttggtggcatccctgcca

SEQ ID NO: 5869 - DNA, 1172 bp, Homo sapiens
gaaacatgtggcttatagtgccaactcagccaccgcctggccagggggcccgacttggtcacttcgtctcttcaacagacctgttgctctcccgggttccctggcagcatcctcaactccctcacaacccccccaccacccccattgagtcgatgaccaagctccatctttccagtagtcccacatctcttgccttgttctccacatggttcaggcttgtctcccagccaccagccctgccctgccccacttccaggccatcgctcacaccgaactccaaagggatctttgtagggcccagctcccatgccccatttccaccactgtgcaaagacctccctggttcccacttaacaggacataaaattgaggcacagaggagcttaaaggcaacacaagccaggtggcatggtggctcacacctgtagtcctagctactcgggaggttggggatgacttgagcccaggagttctgggctgtagtgtgctatgtccatcaggtgtccgtactaagttcagcatcaatattctgggagcagaggaccactaggttgcctgcggaggggtgaaacagcccaggtcggaaacggagtaggtcaaaactcgtgtgctgatcagtagtaggatcacacttgtgaagtgaatagccactgcactccagcctgggcaacacagtgagacctcatctcgtaaaaaaaaaaaaaaaaatggcaacacaaaccatctgcaagaccccaactcaaatccagcgtgggttcccccagcccagggttctctttccttcagacacacagagtttgcattcacaaagagaagtggggaaagaatgccgccttgttttcttcaattccccacacaatcatgtcccaagcaagacctcgcttgcatggatgcaagcaagaggatgcagtggcagagtgtgggttcaaatcctcactgtgccacaagctgtatggctttggctcacttagcctctgtatgcctcagtttctccatatgtgaagtggggatgatgatcatgatagcagctatctcacaggtgaggttcaagttaatacatggaaagctcttcaataaagagtcgttactagcatgctttttttttttttttttttttgtaaaggtgggttctcgccatcttacccaggctagtctcgaactcctgggctcga

SEQ ID NO: 5870 - DNA, 1292 bp, Homo sapiens
gctctgcagcacacccgtgggtgacccctcaccccagaagcagcagtggcagcttgggaaatgtgaggaagggaaggagggagagacgggagggaggagagagaggagaagggaggcaggggaggggcagcagaaccaaggcaaatatttcagctgggctatacccctctccccatccctgttatagaagcttagagagccagccagcaatggaaccttctggttcctgcgccaatcgccaccagtatcaattgtgtgagcttgggtgcgagtgcacgcgtgcgtgagtacggagagtatatatagatctctatctcttagcaaaggtgaatgccagatgtaaatggcgcctctgggcaaaggaggcttgtattttgcacattttataaaaacttgagagaatgagatttctgcttgtatatttctaaaaagaggaaggagcccaaaccatcctctccttaccactcccatccctgtgagccctaccttacccctctgcccctagccaaggagtgtgaatttatagatctaactttcataggcaaaacaaaagcttcgagctgttgcgtgtgtgagtctgttgtgtggatgtgcgtgtgtggtccccagccccagactggattggaaaagtgcatggtgggggcctcggggctgtccccacgctgtccctttgccacaagtctgtggggcaagaggctgcaatattccgtcctgggtgtctgggctgctaacctggcctgctcaggcttcccaccctgtgcggggcacacccccaggaagggaccctggacacggctcccacgtccaggcttaaggtggatgcacttcccgcacctccagtcttctgtgtagcagctttaacccacgtttgtctgtcacgtccagtcccgagacggctgagtgaccccaagaaaggcttccccgacacccagacagaggctgcagggctggggctgggtgagggtggcgggcctgcggggacattctactgtgctaaaaagccactgcagacatagcaataaaaacatgtcattttccaaagcaggctcctgcttccgcctctgctgctctaaggaaggggtcggggtacaggaggcagggggaacctcctccagctggagctgctgccgtgagcaaggctctgctctggaggcctctgcggccggcacccttctggggactgggaagggggcagggaaggcagcagcccaggggaaggccttgtccccctggagccgaggcagttggggagagcaggacgagagtgagctggagagcagccacacccgcgg

SEQ ID NO: 5871 - DNA, 1241 bp, Homo sapiens
gttgtgcttctggaaccagagtctctcccgtttacttcttcaggaaacgctggggccagtcttcaccttctgtcaactggccgggggcagagaccctttctctcatcttgaaagccccagtgcattgcctgcctgcagcccccacccccgatgtctctgctgaggatgccttcagtaactcgtccaggccgtttgtggctctgaattgaggctggcgtggcccccgggcctccgtgtcataggtccaagtgttggcatgtattgtccagtgaatccagcccccacctgtccccagttcgctcttcctgcacacctccagaaagccggccttgcccctccccagccttccttcacagccatcccgcctacgttgccattgcatttgtgaccgagcacttggatctgtctcgcatatcccacctggaaggggcaggaagagcgcatgggtccccagctgatccgtgctatgaggcagggccgggccatcctgccctcagaccgggatactcgagctggccttacccaggcatctctccctcttccccgcagccgaggcctgcctggagccccagatcaccccttcctactacaccacttctgacgctgtcatttccactgagaccgtcttcattgtggagatctccctgacatgcaagaacagggtccaggtgagacagtggggtttcagacaggagggcgggtggggggtgctcctcactgctagttgatgggggacctgtgtcgatagagggagaatcaagattccaactcttggggtgccggagagatcagggcacggtgatgccagatcctagccagtgttgacaggtcaccttcctcacctgctttgtgtgctgtgcctacacgaggtaaccctgggctcaccacccgctgtttcctgaatgagtatctggaccgggagaaagggccaggagtcagcccaccccggttgccattggccagtttgtctgtgtgggtgttttgtttttgtttttgttttttgtttgtttttttgagatagggtctcactctgttgcctcagctggagtgcattggcacgatcttggctcactgcagcctccacctcccgggttcaagcgattctcctctcagtctcctaagtagctgggatgacaggtgctcgccaccatgcccagctaagttcccataagtccaaagaaggaaatggggccttttttgggtatggccctcttagggtaaagcaccccttgggcagccca

SEQ ID NO: 5872 - DNA, 1691 bp, Homo sapiens
cctgctcagtgaccccacaggaagcttacacattttctcagaggcctttgtgctcccacctcttctaccctccccctcttctttcccattttaaaaaagaaaagaaggaaaaagaaaaaaggggcaaggagccccgcggcggcctgggcagcgcctgtgcagacctccctgcaggccgcactgccaactgctgcatttgttgtgttttttaggttgcaattggtgaagttcacactttcattgtaattttagcgtgtggggttttgtcccttttttgttgttgttagctgtgtacagaatgtgtaatcttttttcttttctcttttttttgttttgttttgttttgtttttgtttttttacttttttcttcttggctaattcttggcagggatctttctggaggaaaagctggggccagccagggcaggagaggtgtgaaatctgccacgaggggcctgctgtttgccacccagcccaacttcctgttgctggcccctgccctctgcccttttgcctgtcctcaggccgctggaacaaaggaaggacagctcattcctcatgggcgatcactccgcatctatagggtcgagcctaggggagcttgagggagggctggggcctccttgtcctggatttccagctctccccatgccccctccctgagcaccaccggcaccgcctcccaaacagggctgctggtttccgcagccactgctccacctcccccaaatcgtcatggaaagggtggagaatggaggggaaccaggcgtccttggaggcagcttgggagggtgactgtgtagtgtcacccacaagggaggctagggcaatggagcaggccaccagcagcagctgtgcagcatggaactcaggccaggctccgaggctgggggatctgcttggagttttctgccccccaccccaaacttctgtcgaggagcaaggcttgccagcaagtcagaaggatttgaaccgagcagccaatctttccagccctcccctaccgacctctgcctggagacgcagcagcctgtgtcctccagggcctctggtttgttgtattatagtatatttcgctgtggaaaatgtcacgtttagtcaccttggagcccactcacctggtcctgttgttttaccccatcccttctctcgcgcgcctattgatttgtttctgaggagagtacaccgttcactattgtagagtaacccctgtgactcaatattaccatagtgcgatgtcgttttgtgctattttgaacaattaaaagactttttttgaaataaccactaggtgtctcactgtgtcccggcatcctctcaggaagcctgagcgggaaggctgagacctgcccgaggctcacgggagccccctggagggagacctgagctctggtgaaagcgtagaaggccccagagtgaggcctctgctgtggcctccggtctttggaccaagtcggaccagggtccagcaggttgcttggtagctgccttgcagggcaagggccaaagagccccttgggcagctgctgctgacttcctgtgtctggggcccagatctccctccctcccctcctgcactagaggataggatggggcaagggcctggcaggtcaccagcggcagcctccttgggtgggttggggggaggtgggctgagtcaagtacaccacgggtactgcagaggtggatc

SEQ ID NO: 5873 - DNA, 1203 bp, Homo sapiens
ggaccatcacctaggagaccagaggaagtccgggaggtcagagcagaggccgggtctcatccccatggctcttcgtagcctgcagcggtcactgttttggccacttgaaagtgctgctctgggctctggctgtcctgaccctgtgatgaagggacaaaaatgtgggctccagggaggaggagcacaggcccaccaagagggtattttggggagaaattcatgtctgatcactgagtgctagggaaggaaggcagtggctagattcccagtagctgatgagggatcttgcacagtaacttcccgctcattaagatgaccttggcgagaagcagggtggtcacaggctcttttgcactggcctgaagtcgaggggtttggaagatggcccaggtagcgcagctggagttgctagagcgcccgcagggatggtgctggctcagcccctctcaccaagcttgacggctggcacatttggggaatgagaggaatgggggctcccgggtgttctgacttctgcctccttctgttccccagcaaccaaccagtggttcatcccagccgtgaggggggacattccccctgggtgtgcagcctatggcttcgtgtgtgacgggactcgcctcctggtgtttggtgggatggtggagtatgggaaatacagcaatgacctctacgaactccaggtaaagcagccccaggttctcactctgcctccttggccccatgtgacctgacggtagtggcttcagggttgaggcaagcgggaggtggaagggacgcttgagagtctgccaaggctgctctgaacttggcccacctcagaagaaggcagcaaggaccaacacccaggaccttcttgctccagcaaggcacctcgctcacccccggccatttcctcctccaccacaagttgccccgggtccctagtggtggccttctcatcccacggttcagtctccaggtcttgattttgcaggcgagccggtgggagtggaagagactcaaagcaaagacgcccaaaaacgggccccctccgtgtcctcgactcgggcacagcttctcccttgtgggcaacaaatgctacctgtttgggggtctggccaatgatagcgaggacccaaagaacaacattccaaggtgaggcttggtccttttctctggaaccccccgggtgggtgtgctctcacatgcacagggctccat

SEQ ID NO: 5874 - DNA, 1722 bp, Homo sapiens
cagcacttttggaggccaagatgggaggatcacttgagcccaggaggtggaggctacagtgagctgtgatcaagccactgcactccagcctgggagacagttagaccctgtctcaaaaacaaatgaacaaacaaacaaaaaccctcaattcccacgaacgccccaggagataagggagcatggcccaggccttgagccagggcttctggcagtaggggagcctcccccatttgctaagcggactttcctcttccttctgtaggcttgggcctggaacaggacaggcaggggcccgaagaaagtgatgaatttcagagctgatgtgttcacctgggcagatcccccaaatccggaagtcaaagttctcatggtcagaagttctcatggtgcacgagtcctcagcactctgccggcagtgggggtgggggcccatgcccgcgggggagagaaggaggtggccctgctgttctaggctctgtgggcataggcaggcagagtggaaccctgcctccatgccagcatctgggggcaaggaaggctggcatcatccagtgaggaggctggcgcatgttgggaggctgctggctgcacagacccgtgaggggaggagaggggctgctgtgcaggggtgtggagtagggagctggctcccctgagagccatgcagggcgtctgcagcccaggcctctggcagcagctctttgcccatctctttggacagtggccaccctgcacaatggggccgacgaggcctagggccctcctacctgcttacaatttggaaaagtgtggccgggtgcggtggctcacgcctgtaatcccagcactttgggaggccaaggcaggaggatcgctggagcccagtaggtcaagaccagccagggcaacatgatgagaccctgtctctgccaaaaaattttttaaactattagcctggcgtggtagcgcacgcctgtggtcccagctgctggggaggctgaagtaggaggatcatttatgcttgggaggtcgaggctgcagtgagtcatgattgtatgactgcactccagcctgggtgacagagcaagaccctgtttcaaaaagaaaaaccctgggaaaagtgaagtatggctgtaagtctcatggttcagtcctagcaagaagcgagaattctgagatcctccagaaagtcgagcagcacccacctccaacctcgggccagtgtcttcaggctttactggggacctgcgagctggcctaatgtggtggcctgcaagccaggccatccctgggcgccacagacgagctccgagccaggtcaggcttcggaggccacaagctcagcctcaggcccaggcactgattgtggcagaggggccactacccaaggtctagctaggcccaagacctagttacccagacagtgagaagcccctggaaggcagaaaagttgggagcatggcagacagggaagggaaacattttcagggaaaagacatgtatcacatgtcttcagaagcaagtcaggtttcatgtaaccgagtgtcctcttgcgtgtccaaaagtagcccagggctgtagcacaggcttcacagtgattttgtgttcagccgtgagtcacactacatgcccccgtgaagctgggcattggtgacgtccaggttgtccttgagtaataaaaacgtatgttgcaatctcgggctctacttgtggactttgttgcaccgaaagccttgagctttc

SEQ ID NO: 5875 - DNA, 1151 bp, Homo sapiens
gagggtggctttgggtgcgtgtaccgggcggtgatgaggaacacggtgtatgctgtgaagaggctgaaggaggtgagtgtcgcaccctggcagggaccctggaaggccatcagataaccctcaccacttctccagcctttccccctcgcttccccacacaactccttcagccctcattctggcgtagggtccctggccccttggtggttctgggcctcgggtaggtggcactggtggcccgaaggccttcgcttcgagagcctcacgctgcccgtcttccctgccccttcccccaccgcaccctgggggctgcagaacgctgacctggagtggactgcagtgaagcagagcttcctgaccgaggtggagcagctgtccaggtgaggccagagggggagccacaccaggtcccgtggggcttcagaccgcacaccacaggacctggctcccttgggcacctgaggcctggcaggcccgggcgagctgaggccccagccagggctgcccacccagtctggcctgatggaaagtgctcccctttttcaaacaggtttcgtcacccaaacattgtggactttgctggctactgtgctcagaacggcttctactgcctggtgtacggcttcctgcccaacggctccctggaggaccgtctccactgccaggtaggctcacctggcccggcacgcttcccaggacccaaagcactcctgacacctggctggagccgggcgcggggcctagggctttcagcctgtgtgagtgggtcctgccagcaggccaggcctgcacttccagctccccagcagcacccggctcaggatttggcccacggtggggtcaatttttttttttttttttttttttttttttttgaggtggagtcttgctctgtcatccaggctggagtgcagtggtgtgatctcagctcaccacaacctccacctcccgggttcaggcgatcctcctgccgcagcctcccgagtagctgggactacaggcatgcaccaccacacctgcctaatttttgtatttttagtagagatgaggttttgccacattggccaggctagtctcgaactcctgaccccaggtggtctgcgcgcctcagcctcccaaagtgctgggattacaggcgtgagccaccacgc

SEQ ID NO: 5876 - DNA, 1160 bp, Homo sapiens
agggagcagccccaaattgtcacctgcttctctgcccagcttttcattgctgtgacagtgatggcgaaagagggtaataaccagacacaaactgccaagttgggtggagaaaggagtttctttagctgacagaatctctgaattttaaatcacttagtaagcggctcaagcccaggagggagcagagggatacgagcggagtcccctgcgcgggaccatctggaattggtttagcccaagtggagcctgacagccagaactctgtgtcccccgtctaaccacagctccttttccagagcattccagtcaggctctctgggctgactgggccaggggaggttacaggtaccagttctttaagaagatctttgggcatatacatttttagcctgtgtcattgccccaaatggattcctgtttcaagttcacacctgcagattctaggacctgtgtcctagacttcagggagtcagctgtttctagagttcctaccatggagtgggtctggaggacctgcccggtgggggggcagagccctgctccctccgggtcttcctactcttctctctgctctgacgggatttgttgattctctccattttggtgtctttctcttttagatattgtatcaatctttagaaaaggcatagtctacttgttataaatcgttaggatactgcctcccccagggtctaaaattacatattagaggggaaaagctgaacactgaagtcagttctcaacaatttagaaggaaaacctagaaaacatttggcagaaaattacatttcgatgtttttgaatgaatacgagcaagcttttacaacagtgctgatctaaaaatacttagcacttggcctgagatgcctggtgagcattacaggcaaggggaatctggaggtagccgacctgaggacatggcttctgaacctgtcttttgggagtggtatggaaggtggagcgttcaccagtgacctggaaggcccagcaccaccctccttcccactcttctcatcttgacagagcctgccccagcgctgacgtgtcaggaaaacacccagggaactaggaaggcacttctgcctgaggggcagcctgccttgcccactcctgctctgctcgcctcggatcagctgagccttctgagctggcctctcact

SEQ ID NO: 5877 - DNA, 1132 bp, Homo sapiens
agcactgcttgcccctcctctcgtctggtctggtctggtctggtctggtctggtctgagagcttctttggggctctgacaggtatacaggctctcatctgctctacagctctcttgtagtacattcctctctgttccattagtcaacatgttcttgcctacttccagcatctagaaatttgctgagtgtatcttatccgttcagaggtcctctcctgctattgcctctgttagaaatttcttccctttcatatgtctgtacttcggtttctttgaggtttgaagggtcaagtggcaattacatgtaggcagttggccatcctctggtgaaggctttaaagcccaggaataacaagatccattatgtctaaaactagcaaaaaccctacctgtcacatggtgaactgaattagaggtgatggggacagaagccagattggagtgagtggaaggtgagggagtggagattgggtatagacaactctctttaagaagttttgttgtgatggtgaccagaaaaataggagtggggtagagggggatgagggtgtttttcacgtgggtgaatatgagagcatgtttacatccttctgggaatggcccaggagagaggggagcgtgagaaggaggaaatggggacctggaggagcagactccttgtgtggaggggggaagcggcatctagagctgttgcaggaggtgggctttgagtaaatgcttcctctttggtaaagacggggaacgggaacggtagaagttgcacggaccctttgttaaagctcagaagctgagcgagaattagagcttaagtttatggagtagtcagaataaagtacccctaactgtattcttgcacagtgcaggaagccaggggtctgaaatcaagatgttgcagggctccattccccccagagcctctagcatggatccttccttgcctcttccagcttttggtggctgcctggcagtcctagactttccttggcttgcagttgcattgctccattctctgcttgtgtcttcacatggccttctctgtgtccccgtattcttctctggatgcttgtcactgtattaggcccaccctaaatccaggatgatctcatatcaagatccttcacttaattacagaa

SEQ ID NO: 5878 - DNA, 1164 bp, Homo sapiens
accgcgagccttctcagttgtcaggaaactccggtttcaccatcaggcctggggggtggggaggcaagtgtcacatccccccacgctgcagcaggactccgcctcaccgcgtccacacacagcaatgggggccggggccaggccagaagggcgcaggcagccgtgtgcccagccagatgctggcgttcagcagtgtgggccatggtgctggacgaggctgagtaggcaagggagtggctgtcaacacttaggctggagtgggcccttccttttcctcccaggcacctgggtgctactgtcgggcctctcccacatgggcacttgaggtggtcaggagaaaccttcctgccttctgagaaaccactcgccatcccagcttggaggggcagggcggggcaggaggcctggcggcctggctgtgcttggtggtggcaatgagaggcctgtgtgggcggcaggcggacgggaacaacctgaacccgagctcacacgctggcccccctttggggacccaccctgccccaccaggtgctggcatcggccccaccattcagattggggaggagacggtgatcactgtggacactaaggcggcaggcaaaggcaaagtgacgtgcaccgtgtgcacgcctgatggctcagaggtggatgtggacgtggtggagaatgaggacggcactttcgacatcttctacacggccccccagccgggcaaatacgtcatctgtgtgcgctttggtggcgagcacgtgcccaacagccccttccaagtgacggtgaggaggggtggggggtaggtcagcaggggtgtctggcaggtcccggcctgttcccctggggcccctctgtgacaacagactctccagcagctctctgctttgccctgcaggctctggctggggaccagccctcggtgcagccccctctacggtctcagcagctggccccacagtacacctacgcccagggcggccagcagacttgggtacggcctggccagctagggacactggggctagccagctgggtgttctgtgagcccctagtttaccatgtgtgaggagggaccccagatcctcccactgtccctcacccatgccctgtgtctccactgcaggccccggagaggcccctggtgggtgtcaatgggctggatgtgaccag

SEQ ID NO: 5879 - DNA, 1181 bp, Homo sapiens
ggattacaggcatgagccaccacgtccggccgcttcatttatttttatggccgcataatactccattgtgtggccagaccacattccatttttccgttcacttgctaacagatattgaggatgagcttgcctttggtgatcatgaacagtgctgttaacagtgagtccaggtgtttgcgtggacatttgctttcatttctcttgggtagttgcctcggagtgaaccggagcatcacacagtccctctgtggtcaactgaggaactgccagactcttcccaaggcagctggaccattttgtgtgcctgccagtgtagctgagggagcttctgagtctcctccaggctgctcatgcccttgcccttgcccctgtgccctgcaggtgaatgtgggagctggcagccaccccaacaaggtcaaagtatacggccccggagtagccaagacagggctcaaggcccacgagcccacctacttcactgtggactgcgccgaggctggccagggtaaggcctggctgtgggtgggagggcaggtggctggggtgtccctgcgaggtctcagcctccgctcctctccccgccgcaggggacgtcagcatcggcatcaagtgtgcccctggagtggtaggccccgccgaagctgacatcgacttcgacatcatccgcaatgacaatgacaccttcacggtcaagtacacgccccggggggctggcagctacaccattatggtcctctttgctgaccaggtgggtgctgcgctcctggccgctaagatgtcattgcggatgacgtctgccctcctctaaggccttctcctcccactgcctgcaggccacgcccaccagccccatccgagtcaaggtggagccctctcatgacgccagtaaggtgaaggccgagggccctggcctcagtcgcactggtgaggacaggtaccccatggcaggttgcggggcatcaagggtaggagggcttggggcagggtgcccctacatggtccctgtgtgttcctcaggtgtcgagcttggcaagcccacccacttcacagtaaatgccaaagctgctggcaaaggcaagctggacgtccagttctcaggactcaccaagggggatgcagtgcgagatgtggacatcatcgaccaccatgacaacacctacacagtcaagtacacgcctgtc

SEQ ID NO: 5880 - DNA, 1197 bp, Homo sapiens
tccgccgctagccaatcctcgcgttgatgacgtttgggctcgcggccccagcctcccagctctcagggcacggccggtctgtgccggctgctcccgcggttaggtcccgccccgcgcagcgcgcgcagcctgcggagccagcggccgtgacgcgacaacgattcggctgtgacgcgacaacgattcggctgtgacgcgagcgcggccgctcccgatgcgctcgtgccgcccccgccgtgctcctcggcagccgttgctcggccggttttggtaggcccgggccgccgccaggcctccgcctgagcccgcacccgccatggacaactacgcagatctttcggataccgagctgaccaccttgctgcgccggtacaacatcccgcacgggcctgtagtaggtacgcggcggcgggcgggaccccttccgggccccctcctcgtgctccgcctcgcgacctccccgctgccctccccgcgcgccttccccggcccgcggccctgaccgccccgtgtccggccaggatcaactcgtaggctttacgagaagaagatcttcgagtacgagacccagaggcggcggctctcgccccccagctcgtccgccgcctcctcttatagcttctctggtgagagcctcgcctgtggggacagcctgggacgcggggaggatggggtcgcgagggtgtggcaggggggccggtcgagagcggcactggagaaaggggagggaagtctgggggggcaaacagttctgtctcctcctttcaatccagacttgaattcgactagaggggatgcagatatgtatgatcttcccaagaaagaggacgctttactctaccagagcaagggtaaggcaggggttgggtgggcacgctggcaccttcacccgacttcgtcagggaccccgctcacagggaggacctgagacctcagtcccaaccactccagcagccttaggagggagaaactgttacaggtcccgaaatgggattcagattagggccatcaggccaggcggggcacaccgatgccccctctgctaccgctgccccccttcccaaggctacaatgacgactactatgaagagagctacttcaccaccaggacttatggggagcccgagtctgccggcccgtccagggctgtccgccagtcagtgacttcattcccagatgctgacgctttccatcacc

SEQ ID NO: 5881 - DNA, 1180 bp, Homo sapiens
cggcctcccgggttgacaaaggaacgcgggcccagatccccgtatggcgcttcaccgccggggcctctagcctagaaggaggcacggagcgcgtgtccgagacccgtgcaagctcagggacactctcgcggtcgccgggaggcccacctagggtactttccttttttccactctcagaaatatacgtctgtcacagttaacggcaaagcctagggcaagagttctacgcccaagatggccagccggaagcgggcttctcgcgaccatgtggcgaagccccattcgtcagctggccgcccgcggccctggtacccggtcacctctctgatctgcgcatgtgctgggctacgcccgggcgcaagcgccaagagcggctgcgtctatggtcatgacgtctgacagagcgtccacccgtcttcgacaggactctatggttcttacgcgcgcagacagaccgcctatataagccatgcgcaggcggaggagcgcctctttcccttcggtgtggtgagtaagcgcagttgtcgtctcttgcggtgccgttgctggttctcacaccttttaggtctgttctcgtcttccgttccgactctctctttttcgttgcagccactgaagatcctggtgtcgccatgggccgccgccccgcccgttggtgagtcttgaatccgtgtactttcactgctgggaaacgggcggggaaagaagtgcctatggccgctgaaaacaattgtggggtggagcctcccccgtgcggcggccctgtcttgggaactgaccctatgttttacacctcccggctattttttagtctgcaatattactgtctgttccttcgttcccgtgtcggtgtggaagcgacggttccctcgtatctctgcctgtgtcctgcaagctcaccgcattttcgggcgctagatacgctcttggggcctttgtgtgcgttctctgtcttatttccgggcgacgtgccgcgtgcgttgtcggacgtgaagggcagtccgggaaaaacgggtgcggccgcctcctgtgtcctacagggggcgccagacgcatttccactcggcttggaggtggatttagtgccacgtgcccgaaagtcttaaattgggtgacctgagctgtgcaatgataatgcggcgattttgtagtacgcagtgtcttgaagagagaattttta

SEQ ID NO: 5882 - DNA, 1192 bp, Homo sapiens
ggctgtggggtcaggacaggacaggtcatctacagcacaggacccaggaccaggaccttgttttagaggaagagtggcccctggggagtgtgtggcacagcagggccggggcttagcttctggctcccgggttgcttgggctggggctgtgggcactcctactgctcctcatcactcttggcggccaccccacagaaaatcactgtgctgatcgggaagcccttcagtgccctgcctgtactcgagcggctccgggcggagaacaagtcggctgtgagtttcctcctgggtcccccgtagctgtccccggaccccctgctgctggcttccagcagggtgcctccaccctctccatcccgtcaccctcccagggcaccctcccagggcaccttggccaagcttcccgaggggtgcaggccatccctggtcctttccctcaggtggagatgcggaaagccctgacggacttcattcaagaggaattccagcatctgaagactcaggcagagcagctccacaaccacctccagcctgggagataggccttgcttgctgccttctggattcttggcccgcacagagctggggctgagggatggactgatgcttttagctcaaacgtggcttttagacagatttgttcatagaccctctcaagtgccctctccgagctggtaggcattccagctcctccgtgcttcctcagttacacaaaggacctcagctgcttctcccacttggccaagcagggaggaagaagcttaggcagggctctctttccttcttgccttcagatgttctctcccaggggctggcttcaggagggagcatagaaggcaggtgagcaaccagttggctaggggagcagggggcccaccagagctgtggagaggggaccctaagactcctcggcctggctcctacccaccgcccttgccgaaccaggagctgctcactacctcctcagggatggccgttggccacgtcttccttctgcctgagcttccccccgaccacaggccctttcctcaggcaaggtctggcctcaggtgggccgcaggcgggaaaagcagcccttggccagaagtcaagcccagccacgtggagcctagagtgagggcctgaggtctggctgcttgcccccatgctggcgccaacaacttctccatcctttctgcctctcaacatcact

SEQ ID NO: 5883 - DNA, 1108 bp, Homo sapiens
tttaaggaaaaggattaaaacagggattggccgggtgcggcgatgcgcgcctgtagtcccacttttccggaggctgaggcgggaggatcgcttgagcccggggactcgagaccagcctggccaacatagctagaccccgtctctaaagaaaaaaaaaagacaaaagaagagaacaacaacaaaaaaaccaaaataaaaataaaaataaaaacggacgggcgaacgcgtcgggtgggcgtagggttccgcgaagcctccctgtccctcttgtctcgtcctagtcggtctagctgggccccatcccctttcccactcggagcgtgagcgcctggagacacgtacagccaaccagtgagaaggagtggccgcgagtggcatgcacttggtccaattacctgcggccctgccggtcggcccgcgctggggccaatggaggtgcgaggcggggctcgggcgggggcaacggtcacctgatctgcggctgtcgaggccgctgaggcagtggaggctgaggctatgatggcggccatggcgacggctcgagtgcggatggggccgcgatgcgcccaggcgctctggcgcatgccgtggctgccggtgtttttgtcgttggcggcggcggcggcggcggcagcggcggagcagcaggtcccgctggtgctgtggtcgagtgaccggtgagcgggccggggtgggatgcgctgtggcggctgaggcgccctcgcccgactccggcgctgtcctaggcgaggggtggtgaggcccggaggtggactgttccttgctcgggggctcgcagcgaatctgccggcgacagagctccagtccacatgcgcccccgtctgacagcacctcttctgtgccctgccagggacttgtgggctcctgcggccgacactcatgaaggccacatcaccagcgacttgcagctctctacctacttagatcccgccctggagctgggtcccaggaatgtgctgctgttcctgcaggacaaggtgcgcccgccccagcccactctcccccggtcatcgggaggcagccaggccccctccccccatgacactgacgcccattccccaagggaagcttcagtgaccttgtccca

SEQ ID NO: 5884 - DNA, 2330 bp, Homo sapiens
gcccgcacgcagccctctccctggcagatgatgcttcaggacttccaggtatggagcgggcgtggcccagcttcaggtgggggagcccaggctagtggttgagagacgaagagaggcttgggcttgggcatgtagttgagagtcctgtccctgcgctgcccctgtcccagttcttgctgggcctcccaacggtcctttctgacccgtgtctgtgtgtctgccagatccaggctttcaacgtaatgggggagcagttctcctacgccagcgactgtgccagcttcttctcccccggcatctggatggggctgctcacctccctgttcatgctcttcatcttcacctatggcctgcacatgatcctcagcctcaagaccatggatcgctttgatgaccacaagggccccactatttctttgacccagattgtgtgaccctgtgccagtgggggggttgagggtgggacggtgtccgtgttgttgctttcccaccctgcagcgcactggactgaagagcttccctcttcctactgcagcatgaactgcaagctcccctcagcccatcttgctccctcttcagcccgctgaggagctttcttgggctgcccccatctctcccaacaaggtgtacatattctgcgtagatgctagaccaaccagcttcccagggttcgtcgctgtgaggcgtaagggacatgaattctagggtctcctttctccttatttattcttgtggctacatcatccctggctgtggatagtgcttttgtgtagcaaatgctccctccttaaggttatagggctccctgagtttgggagtgtggaagtactacttaactgtctgtcctgcttggctgtcgttatcgttttctggtgatgttgtgctaacaataagaagtacacgggtttatttctgtggcctgagaaggaagggacctccacgacaggtgggctgggtgcgatcgccggctgtttggcatgttcccaccgggagtgccgggcaggagcatggggtgcttggttgtttccttcctaataaaataaacgcgggtcgccatgcgttgggcctcttgtcgctcatttctgcgctgggctttaggcgcgtgctcgccggagggatgcgggaggatggagcctggcgagggggaggcgaagaggcatccgcggagaccgggaggggctttagcaagctgggccctaaccgctcagggtagggaggggcggtcgggccgagtcccggtgcgcttcggcgtctcaggaggccgtcgtgacaatggcagccttcgcgtcgtgagggggccgccccaggctgccgcagcggcgcgcgcccggccgcggggccgcgccgagactcccgggggggtgggcgggggtggggaggtgggcgggcgcgcgcggggcggggcggggcggggcgcggcgggtggggcggggcgcgcgcggctcccgcgcacggattcttcctgggccgcagcaccggccgccggcccgccccgcccgccccgccccgcgcctctctagactctcggcgagcagcgtcgcccgcggagccgcgctggtgctgtggcccgggccctggcagccctcccgggaggcgagccggggaggcggtggcccctgccggttgcggcggggcgcgggaagaggcgggactctttgacgcggcggaggggtcgggcgacggccgacgcgccgccatctttggtccagtgcggtggcggcggcggcggtggcggcggcgactgctgcggtgaaggaggaggaggagccgagcgggcgctggcaccgaggcctgaccatggacgaggaatacgatgtgatcgtgctggggaccggtctcaccgtaagtgcggccccggcgcccctggccctgcgtcgtgccctcgccatcccccgcgatgatgcggccgccggcccatcctctggtcactgccatcttctgcgctccgctccccgaaaagccggcgccgtgcccaccccgctgctcccccagcgacgtcgcctctgctcgttgccatgaccccatctccccgaagaggcccccttcctggccgcctcctgggctacccgggtccgacccccggcgccctcccatcttccctacccctgcccgctggaccggaaaacgcacccccactcggcccgatgcccacgaccccgcccacccatcgcccccacccatcacggcatccacccgtcgcccgcacccattgcccgcctagcgttgcctctcagcgtcccttcccatcttgcgctaatcccggtggggatgaagtagaaggacctggggtcagggggcctcgccagagtgggccctcagcccgcctcctc

SEQ ID NO: 5885 - DNA, 2330 bp, Homo sapiens; identical to SEQ ID NO: 5884

SEQ ID NO: 5886 - DNA, 1194 bp, Homo sapiens
acaaacgcatggctggcacggcctttgactttgagaacatgaagcgcaaacagaacgacgtctttggagaagctgagcagtgattgtggccgcccccagcccctgctgccccagcctgtgtctgttctcctcgagggctccagcatcctctgcttcccccaccacgttcccatcacccacctcattgatccactgaccaaatccttaaccctagcgatggcttgggagatggggggttggatagcatcctctttcttggcccttccttatcctaggaaaagagggttcctctccttgtgtgtgtctcttccccccacccctaattcttctgctctgtttgggaagacgtggaggaaaaggtgacttctgcccccaccgctcttacccccactgtagtggcctttggagatgcccccacctcccccccaccaactctcgcgtgttggagagaaggggccctcccagcacaaagttgcattcctcccccctaatttattctaatttattaactttgacccaccctttctgagcctgcagccttcccgtgtggcctgagggctgtcgagtgagctgccccagcccctcccagcccttgcccagcctgggggagtggggaaggcttgggcatggccccgttggaggttgatttgctgttttgtttcttgtctttgtgttctgtggtacttgctgagagaaaagaaaagtgagccaagcagaaggaggtgggaaaacggacccaaaccccagtgtgccctgccccatgcctttcctttagtggtgggaaacccttatcttgcaaagtgaatgtgtccccttccccaccctctagtgtatttcacagaaaacaaaacctcccaataaaacggttgaaacctgaatctctggatcttgatggttatctcccaaaagctgggtacctggcagggctttggctgcctgggttggggctctggcttagcttcactctggactgtaaaaggtggcattcttcaccagggaattcctcacccagagcacgctggggccaaattgacttaaagcttaaggctacccagtgagtcgatgctggcaccaggactgcagccctcagtgctcaatgcagggggagtgtggtggagggcgggtgtcaacgtggaggaagcagagggagcgggggtcctggcctctggcttgaaaggagagggcagaggggac

SEQ ID NO: 5887 - DNA, 1156 bp, Homo sapiens
ggcccaagccagcttccctgtccacagtctcctgggtggtgcgctgagccccaaggctgctctcagtggggctggagaccaagaggcagctctgccttgtaggtgaggagatcgagatcaccttcagctactgggatggctctgggcaccggcggacagtcaaggtaggcagcgtgcagcctgcttcctgctcaccatgggcccagcctccctcaggttccgtgggaaggaactgaccttcctgacttgggaagccccagggatcctgaggataactggctccagggcctggccccctgtctggggagtgaggcccaggcctggctgaggctctgcagcgtctggcagggccctctgggcctctgccttgttgagagcccttctgcaggcttccgccttcccttcccaactcctggattcccggatacagatgagaaagggcaacaccatgcagcagttcctgcagaaggcgctcgagatccttcggaaagacttcagtgagctgaggtgtgaggtgtgcgtgtgtgcacggtggtgtgtgtggcacctgtggctccagcctgggtgccagacacccagtgtgatgtgggcgctgtctgggcaagcaagcagcgtgctgggcactctcctcccaaaagagggggtcaggctcctcttcccttccctcccaccagagagctttgctgagagcggcctgccttggttccttagcccaaaggtggagggtgctgggcgccagtcctgtgctcactaaaccatggagcttccctcacagccaactggccgctgcttcccagccccagcatgggctctcctgggctggctgtctcctccctccctgggcaggggtgctgtcctcttgcccacgccctcctgccttcctccctcaggtccgcaggggtggagcagctcatgtacatcaaggaggacttgatcatccctcacgtgagtcccttcagccccagtacccgcagtgggtgcagcaccctgggctttggctcaggctggtgggggcagtgtgcgcaggcggggggtgtggggaggggccgagatggaccatcaagacgccgctttcctgcccttggctcccagcatcacagcttctacgacttcatcgtcaccaaggcacgggggaagagtggtgagtgccgccgac

SEQ ID NO: 5888 - DNA, 1147 bp, Homo sapiens
tgaatggatgaatgccattattatgggtgagttagttaccttgaagttcagcccccttttttcctgcgtctcatatgcttgcttccaccttccacctttctgccacgggatgaccctcaccagatgccggcgccatgcttttggacttcccagcctccagaaccatgagccaaatgaatctgttgtctttataaattacccagtctgtggtattctgttatggcagcagcaaatggactaagacaagcctctactgactacccagttccaaagccatttccacatttttaggtatttgttacctaagcaccacacttcctggtgccaaaacctgtatccatttcctggaactgccatttcaactgggtggcttaaacaacagaaatggattctctccccattctgaaagccagaagtctgaaatcaaagtgtcagcagggcgttactcaccctgaaagttctacaggagggtccttcctgacctccccaggttccagtggccccaggcataccttggcctctggctgtgtcactcctgtctcttcctccactgtaccatggctgtcttccctctgtgtgtctttgtcacttctgttcttataaggacatcagtcatgttgcattaaggacccaacctactccagtatgaccccatctgaactgcaaaggccctatttgcaaacatcacattctgaagtaccacagattagaacttcagcataccttgaggggacagaattcaacccataatagaagccatcctgctccagtcctcccaaccaacccccatcaaaatcgggagacaggctgcaccccctgccacactaccccctgccacactgcctttgctcaggttggcctcatccatgcagctagacccccagcctgacttacttcacccctgctttgttcctggctgtgcagtggcccaggccagccctcagcatcctttcttttctcccaccagtaacagaaaatccttctgtcttgggtccctgtggcctcaccagtaggacacagagtatggaagtgtccccagcctcggcctgagccacatccccctacttgtgtcctgctctgcggtcacttgttctaccatgtgtgctggtcctgacctccccttcagatctcaggtgacctcagggcc

SEQ ID NO: 5889 - DNA, 1135 bp, Homo sapiens
gaacgcgcttctggacagaaaacagaccctaaggaaaggcagccagaggctcacgctggatcctgcggtcttccctatctgcgcctctgtacctcccttgcctttacaaagcgcatggatcaactttggaacaggttctaattctgccccagatccatctgcgtcttcccacgactcacaaatctgacctcagggtgcaagcgcagccccagccctctaagcctgggtaggcagggctctcccacccgagaaagggccgaggggagacttccggggcgggaccgacgtgggcccctcccactcggcggccggtgggttcagcctgaacgcaccgcggaggtggggccgacgagggatccaggggcgggacaggttcggggcgggacaggttcaggcccctcccatgcggcggccagcgcgagcggtagaggcgggtctggaggcggggcctgcgtggagccagacggcgcagctgctgccgggggcggggccggcgggctgtggccccgcccttagccgccattgccgggcctgcctggccaccctgcgcagcggccttgcgtcctctccgggggcggagcgggtcggcgggcctgacagggaacctccctgaccgagcccacgtctccccacggccagagaaatctccggcccggcccgcatcgccagcccccaggcccggaggaacggcccgagcccaggagaaccacatcttcgtcccagccccggaggctcctgtgggcaagatcgtgagccaacgggttcctgaggcccctcctggccaggcagggtttccccgcgcgtttccgaggagccctgcctggccgggcggctggacaaacaggtcgtagcaccgatcgcgcccgcccccagcaggggtcccgcacaggcttgcccctgacccccacccaaacctgtccttccgctttgcccccaaacagtgcacttgccggcggtcccaacccagcaggagaagtggacatgaggttggcaggtgggtggcttccacagcgaacgggagggagttgaaaagggcacctggctggaggcccagcgtcgcgacatctgtgtctggagaggcccgggtgaaccactgggtttggttttggaaatggaggactctgcacaaacactc

SEQ ID NO: 5890 - DNA, 1204 bp, Homo sapiens
ctgcctcagcctcccaagtagctgggactataggcgcccgccatcatgcccggctaattttttgtacatttagtagagacggggtttcaccatgttagccaggatggtcttgatctcctgacgtcgtgatccacccgcctctgcctcccaaagtgctggaattacaggcgtgagccaccgtgcctggccagaattacagatctttacagcaaatgcttatattttaagaagtgtgtctgtcacctctagtcttggtggctcagatgaaggataactgcatttctcaaccagtgatgtatttacagtaggtgctgcttttcttttgtgtgtgtgtatcttaggaatcttttgggtgagttgtgaggctggcacctacattcggacattatgtgtgcaccttggtttgttattgggagttggtggtcagatgcaggagcttcggagggttcgttctggagtcatgagtgaaaaggtatgtgttacggggctagaagttttagagctggttcttaccatctgccagcctttgatggcactccacttgcttcatgtcgtgggaaagatgctttccaaagtgttgagttcagtccagggcagcttccctgttctgttaattaaactttgggacattaaaatgggctaagggagatgattgggtagaaagtattattctattcatttgcctcccagcctacaaaaatgcctgcttggggtctaatacttcaacggttaaagatgcctggaagagggcgcggtggctcacgcctgtaatcccagcactttgggaggccgaggcgggtggatcatgaggtcaggagatcgagaccatcctggctaacaaggtgaaaccccgtctctactaaaaatacaaaaaaaattagccgggcgcggtggcgggcgcctgtagtcccagctactcgggaggctgaggcaggagaatggcgtgaacccgggaagcggagcttgcagtgagccgagattgcgccactgcagtccgcagtcccacctgggcgacagagcgagactccgtctcaaaaaaaaaaaaaaaaaaaaaaaaaagatgcctggaagagccaggactgaagaggctgaagacataatgagcttggactagtaaacaagtgacattcagttttaggaagtttggggtctgatgggctgagatacaaataaactgaattattttcatacatggctgcttttc

SEQ ID NO: 5891 - DNA, 1204 bp, Homo sapiens; identical to SEQ ID NO: 5890

SEQ ID NO: 5892 - DNA, 1161 bp, Homo sapiens
ttgtgatcttcaacaagtcctgtgtgtgttggagttagtgggcaaattctgaatgctctggagaggagtttgaggccctgctgagaatacaccagggaggaaccttgttctattctttgtagtcaccatgcccgcttccagcattgacaccattctaatgttgacaccttgatgttccaccaggcaagtcagaagaagctgatgatcaagcagggccttctggacaagcatgggaagcccacagacagcacacctgccacctggaagcaggagtatgttgactacaggtgagggcaggatgtttcagagccggggtgggtagagacggcacacttgctgccttgatgcaggagtatgtcaacaacaggtgaggatgggaaggtagagcccacttgccatctggacgcaggagtacatggacaacaggtgaggaacaggtgagcatggaggttgtagagcccaggggagggggagtcacttggtttggggcaaacttgctaaatgcaggaccacaggaaccagctcttcagctcccgtgagattttggctgcccaggccagttaggggtgtgggcctgcacggcagacagttatccctttctagtctggctcgtgggactctagagggagtcagtctgcaacagtaagtggtgagttcttctgtccagcgtcagtattttgatggtggctttagacttgccagataacactacataacatcagtactgccctggaaagccattcagtgaatttgacctattgctacctctttttcagtgagtctgccaaaaaagaggtggttgctgaagtggtaaaagccccgcaggtagttgccgaagcagcaaaaactgcgaaggtgagtggcatgctgtcctcagtttggaatgtgcttagggagataatcctaagaggcactggcattcgtcttactttgtgactgtccgcagtccagccatatacgctagcatcagaggtgcagcgcatacacaggtaatgctgcctcataccctggggtgcttgtttgggctctgcaggctcctctgatttgtattctctgtcctatctgctgggaggaggaatgtgggctcaggaatcagatgggcctcgactcctacctcagctatggcagcaacacagtgatggaatgggtggtggtgtgtgt

SEQ ID NO: 5893 - DNA, 1161 bp, Homo sapiens; identical to SEQ ID NO: 5892

SEQ ID NO: 5894 - DNA, 1153 bp, Homo sapiens
taagtctccgggggctgggggaaccagggtttcccaccaaccaccctcactcagccttttccctccaggcatctctgggaaaggacctggggctggtgaggggcccggaggagcctttgcccgcgtgtcagactccatccctcctctgccgccaccgcagcagccacaggcagaggaggacgaggacgactgggaatcgtagggggctccatgacaccttcccccccagacccagacttgggccgttgctctgacatggacacagccaggacaagctgctcagacctacttccttgggagggggtgacggaaccagcactgtgtggagaccagcttcaaggagcggaaggctggcttgaggccacacagctggggcggggacttctgtctgcctgtgctccatggggggacggctccacccagcctgcgccactgtgttcttaagaggcttccagagaaaacggcacaccaatcaataaagaactgagcagaaaccaacagtgtgcttttaataaaggatctctagctgtgcaggatgcaaacgtctcggggtcagtgactgcctcctgcccctgttggtccctaggcagtgggggcagaagctcccagctgacctgtttctctgggatgagagggaggagagaagggcagtcagcaggggcagctgttgcagatgggaggaatagtctcccacaaaaaaggtttcagtgacagacacggggtctctaaaaatagtcatgctgagagcctaatggcccttggcacaattgctggtgttggggtagaagatgtcttggagtttgctcaagtggttgagagggagggaggtgccatcgacttggaggaactggcaccaagccagggagatagaaatccaggcaaggctgtggggcaggttagggagcaaggctgcaggaatgactcaggaagaaggtgggggaggtgacaagcccccaggcaggggccctgtggccatggggatcttcttaaattgagactagggggtgaatagtccagggcagctaactttagttattatagaaagggcagtagcagatgggtctgctccgtctcgcttctaagaaggtgggcaggacaaatggcagcctcctgcagaggcccagtgagaagcctggccctcggccacgcagga

SEQ ID NO: 5895 - DNA, 1153 bp, Homo sapiens
ctctgaatgcgtggctttggcccagcccgtgtgtggctccgacgggcacacgtaccccagcgagtgcatgctgcacgtgcacgcctgcacacaccagatcagcctgcacgtggcctcagctggaccctgtggtgagtgaggccctggggccgggcgggccagggtcctgtgcctccctcagcctgggcctgccgacccctgcctggctctgtctcctgcagagacctgtggagatgccgtgtgtgcttttggggctgtgtgctccgcagggcagtgtgtgtgtccccggtgtgagcaccccccgcccggccccgtgtgtggcagcgacggtgtcacctacggcagtgcctgcgagctacgggaagccgcctgcctccagcagacacagatcgaggaggcccgggcagggccgtgcgagcagggtaggccgggggacgctggcgaaaactgctgggctctggctttggacaagaagcccctgggtgactctgctccccttccccgcagccgagtgcggttccggaggctctggctctggggaggacggtgactgtgagcaggagctgtgccggcagcgcggtggcatctgggacgaggactcggaggacgggccgtgtgtctgtgacttcagctgccagagtgtcccaggcagcccggtgagctctgtacccctggctctcggcgggcggcggggacggggctgcggccgctcacactgacaccaccctccaggtgtgcggctcagatggggtcacctacagcaccgagtgtgagctgaagaaggccaggtgtgagtcacagcgagggctctacgtagcggcccagggagcctgccgaggtgagccggctgcacgtggggtctcaggcacaggcggggcggcgtctgggtttccgtgtctggatgtgggcgtgcccgtgtgctgcgttgggcccctgtggacgtgtgtattgtgttgtaagtgagcatcgtccagtgttggtgcctgtgcacatttgtgcagctgcgtgtgtgggcgtgtgtgtccatcagtcagtgggcgtgcaccaggccaggcctcagtgctgagaggcagcgtgaaccatgcggggccccaccgtgtgggcactttctctgcatacgtccatccggtcgatgtatcacatcaattaggta

SEQ ID NO: 5896 - DNA, 1154 bp, Homo sapiens
caccgcagcccggggcgtgggcctggctggctgccccagtgagtacctgagctcagccccgaccccgggcctggtgcggctgtgcggccacgtgaccttgtcctgccctggcctttcaggtgcctgccagtgcaacccccatggctcttacggcggcacctgtgacccagccacaggccagtgctcctgccgcccaggtgtggggggcctcaggtgtgaccgctgtgagcctggcttctggaactttcgaggcatcgtcaccgatggccggagtggctgtacacgtgagtgacagggcccaggactggccaccggctatgccctcctacctgttcacccccatcactgtgcttctcctcacctgcccaggccctggcctgacccacacctggctgggggctgggcagagccagggttggggaccaggctctggaggaggtggggaagcccgtccaggtgcggacatcacgttcctccccgattttccccaaagcctgcagctgtgatccccaaggcgccgtgcgggatgactgtgagcagatgacggggctgtgctcgtgtaagcccggggtggctggacccaagtgtgggcagtgtccagacggccgtgccctgggccccgcgggctgtgaagctggtgagtgagggccagcgctaccctggggcttcatggggtggggtggggtcacccgagccacagaggtttcccatgcccgtgccccagacgcttctgcgcctgcgacctgtgcggagatgcgctgtgagttcggtgcgcggtgcgtggaggagtctggctcagcccactgtgtctgcccgatgctcacctgtccagaggccaacgctaccaaggtgaggggtgtgggatgtgaaggggagtggggaggaggcctcgccttgaacatccttgttctctgccccaggtctgtgggtcagatggagtcacatacggcaacgagtgtcagctgaagaccatcgcctgccgccagggcctgcaaatctctatccagagcctgggcccgtgccagggtgaggcctgacggccactgccccagaactgaccaggaaggcctgacgctgccctaaatccagccccacccgccctgagccacctgaccctgtcccaaccggtccccccgccaacctccctctccttg

SEQ ID NO: 5897 - DNA, 1066 bp, Homo sapiens
tgcccaaggcctacggcacaggctttgtgggctgcttgcgggacgtggtggtgggccggcacccgctgcacctgctggaggacgccgtcaccaagccagagctgcggccctgccccaccccatgagctggcaccagagccccgcgcccgctgtaattattttctatttttgtaaacttgttgctttttgatatgattttcttgcctgagtgttggccggagggactgctggcccggcctcccttccgtccaggcagccgtgctgcagacagacctagtgccgagggatggacaggcgaggtggcagcgtggagggctcggcgtggatggcagcctcaggacacacacccctgcctcaaggtgctgagcccccgccttgcactgcgcctgccccacggtgtccccgccgggaagcagccccggctcctgaatcaccctcgctccgtcaggcgggactcgtgtcccagagaggaaggggctgctgaggtctgatggggcccttcctccgggtgaccccacagggcctttccaagcccccatttgagctgctccttcctgtgtgtgctctgggccctgcctcggcctcctgcgccaatactgtgacttccaaacaatgttactgctgggcacagctctgcgttgctcccgtgctgcctgcgccagccccaggctgctgaggagcagaggccagaccagggccgatctgggtgtcctgaccctcagctggccctgcccagccaccctggacgtgaccgtatccctctgccacaccccaggccctgcgaggggctatcgagaggagctcactgtgggatggggttgacctctgccgcctgcctgggtatctgggcctggccatggctgtgttcttcatgtgttgattttatttgacccctggagtggtgggtctcatctttcccatctcgcctgagagcggctgagggctgcctcactgcaaatcctccccacagcgtcagtgaaagtcgtccttgtctcagaatgaccaggggccagccagtgtctgaccaaggtcaaggggcaggtgcagaggtggcagggatggctcc

SEQ ID NO: 5898 - DNA, 1197 bp, Homo sapiens
cccttgcggaggcgtcagggttctcacagcccctttttaacgggaccacaaggggaagctcatgctgggcccagcatggaggcaggtccaaggcccagcaggtgcaggtgggcggggcggcctgtgccacatggctggaatttaccaccttcctctgaagcgttttcactggtatcatgtgtaggcttgtttttctcccactgctgagtgagtcatcttgtttttatgtagaatcctgtgattcctggcgacagccagtgggcccggcccaggttagggatccttcagaactggggtccaggcctgtgtagcccctgtgccccgttacccctgctggccccgggcaggccttccggggcccccggcttctccctgccctgtgttttcatttgtgccgcctcccttcgggaaccttccagaacgtgcccacactcccgctgcagccaataggcaccttaaatagccacttcgtgcggctggccgcggagctcggagggggaaaggcgacgctgacctgtgccccgctcgcccgcagagctacatggaccccatgaacgagtacaacgcgctgaacgaggccaagcagatgatcgccgtcgccgacgagaaccagaaccaccacctggagcccgaggaggtgctcaagtacagcgagttcttcacgggcagcaagctggtggactacgcgcgcagcgtgcacgaggagttttgagcgcccggccgcgccccgcgccgccccccacgcaccaccggggcggcctcgcgggtgactccgggctccgtggctgtcccggaccccacctcttccctgccgcccgccaccggccgaccgaccgcggctgccccagttgatgagcggcgtgtcccctctgcagcgcgcaccccggcggggctttggctgtgacgcggtcggggcgcggggctgggctgtggccccgcggcgccgcctcctccctggtccctcgaaatcgtggcatctcacttctgagaacgaaatctcgcttcagtcactctgccgaaggcgctgacggcatcgcggccggaacctctgggcccggcccctcccagggccgccgctccgtgggaaaaaacagctcctccatttccttgaaaactgaacgattattaaaaatagattaaacttcgctggaaatgagtagccaggaagttcaggggagggtgccgggtccttcccgg

SEQ ID NO: 5899 - DNA, 1207 bp, Homo sapiens
tgcctgaggtggggagctggcggtcctgccgcatgcagagctcgcgtgggcttgccttcgtgggggccaggacgggaggcagggtggggggcaggctggaccaccaccatctgccctggcagcctggctgctccagctcctgacagcacctgtgtctgagcagccgtgttgggggcgctccctctctgcccctcagcgagagcctcggacctcccaaccccttgtgtctggtggggatccctcctgggatgaggaagaccccctcgggctctcggctgacccccacctcctgcacagctgtgcccaggcccccagggtggtccatgcggggcaaccccctgcggtgcacaggccccctgtctggagtagggatctaatttatttatttattgcctggccggtgactcgggggaggaggcgaccctgtcatctgtcccacctgctgctgccccttggagcagcctgcaccttctctcctcccatccggcaacagtctgaaagtacgtggaggacgggaccggaagacgagagagggctggacatcctgcccaccgtgtcccagccagggcagggagggaccatggcccgcagggtcaaggggccccgatgtgcacagctgccacagggagggaggtcttggggagatgggcagtcaggtggcccgtccttggtgagtgcacacactgcgcgcacacatcgcggccttcctggcttctctggcccccacgtgtctgtgctgtagatactgtatcaaagtcccagcgtttagatggttaacatagagctgcttctgtgtaaatgctgcttattttaaacactaaaaagcgtttaattttatgggacagatgtgtggcctgtgccccttctctccggctgggctgccttggaatgaggcacagggagctggtccagcctcccctaggccctgctgggagctgaccctgggactctgaccggagaccctgtgtgggcctggcggcgtgctggcgtcagatcctggtgggcagttttctgtccatggtgctggctccggggtcctggtggtcggtgctggccgtggtgctggaccccgcccccaccccacctgggctctgtccctggtactggtgacagtcatgatgctgtctacccactgggcaaagggcagagtaggaagctgggtgccacccctacctcggcgggctctgccctgggcatatgcctgtgt

SEQ ID NO: 5900 - DNA, 1100 bp, Homo sapiens
ggtctgtgtgttgggaacaggggatgtacgtagggcccctatgcggggagcacccacggcgtcagaggcaggggccaggtctccattctgcttcctgccattaacacgactaacagcctgcgctctcgggtggggcatgcggggaggggaaggggcctgccctgttctcattacttcctggtctgcagggtggggtgtcagcccagtttgtgcctaggatcctgatgaaaagtgtctgtagaagtgggagactaaatgtccaacccccctgctcacgccccagcctcacgggggtgcatcctgcagtgggccggggccctgctgtcacgcaccgtccagcttgcgccctggcgcaggctctgcccagaggctcccctgggggtgcagggccctgagtcccccgccttcagatgctggggctgaagcggggctgtctgtgctttgcagagctggaagaggcgccgctgacggtgaagagtgacatgagcgccgtcgtccgggtcatgcagctgccagactcgggactggagatccgcgaccgcatgtggctcaagatcaccatcgccaatgccgtcatcggtgagtggccgtccccgcgggcggatagtgccaggggcagggctgcttgcctcgaggctgcgggctgaccgctggtgccggccaggggcggacgtggtggactggctgtacacacacgtggagggcttcaaggagcggcgggaggcccggaagtacgccagcagcttgctgaagcacggcttcctgcggcacacggtcaacaagatcaccttctccgagcagtgctactacgtcttcggggatctctgcagcagtgagtgggggcttcgggcttcagggcgggggggaggggaacgccggaggcccctccgcggccctcacctaccctcccccgccagatctcgccaccctgaacctcaacagtggctccagtgggacttcggatcaggacacgctggccccgctgccccacccggctgccccctggcctctgggtcagggctacccctaccagtacccgggacccccaccctgcttcccgcctgcctaccaggacccgggctttagctatggcagcggca

SEQ ID NO: 5901 - DNA, 1163 bp, Homo sapiens
ggcgctccgacgcctccgtgcacgcccgcgcccccgcgcgccccgcatccgctcggcctgctgcctggaccccgtgggacccggcagagggcacgcgagtcgggagccttcgcggtggcgcagagcgaccgggcgccacctcagcgccgcgcacccggcgtccccggggtccctccgcccgacccgagcgccccggcgcccacgggcccacagccagcggcgcgcgtcgcatgcgccggatcataatggagcgcgggcccgcgcgcgggggcggggccggggcggggcggggcgagcgatgatcgcctgcgtctgcgcatcctcgccccgcccccgccgtgcgcccccgtgacgtcaacgccgcgcgctcgggcgcccccccgcggccacgctcaggaccccgggccgggcggtccctttaacggcgcggcccgaggggcgcaggcgggagggcggcggggctgagcgcgccctccgtgctgcgtccctcgcgccgctcccgggccgggggcggatgggcggccgcgggccgcggggcagcagtcgggacgcgcgcgggagccgggggcggcggccggggcctgggcggtcgggcgggggcgcccgggggcctcggagcgtcggggccgagagcggtgcgggccgggcggggcgcaggcgggcgggcgggtagcgccccgcgtccgagccccgggccgggccctgagcgcgcgggctccgcgccgccgccgcgccatggcggagaccaagattatctaccacatggacgaggaggagacgccgtacctggtcaagctgcccgtggcccccgagcgcgtcacgctggccgacttcaagaacgtgctcagcaaccggcccgtgcacgcctacaaattcttctttaagtccatggaccaggacttcgggtcagtcggccgcgaggcctgcgcgagcctggcgcgggctcgggggtcgcacctgcccgcgcggggacggggcgggggtcctgagccgttcgcgcccccggggacctgcgaccgcgacgcgcctccgctagatgcggcgcgggtggcggcctcggcccgtgtgcggcgcgcgcccacctgtccgtggagcggggcgatggcaggcggggttcccggcgtccctggccccagcttcccggccccgagtcctgccttggc

SEQ ID NO: 5902 - DNA, 1230 bp, Homo sapiens
gtcgccgacgagggcacctactcctgccacctgcaccaccattactgtggcctgcacgaacgccgcgtcttccacctgacggtcgccgaaccccacgcggagccgcccccccggggctctccgggcaacggctccagccacagcggcgccccaggcccaggtgaaggaggcctccctgggacccgggaaggcgggagcccaccccaccgggggttgctctgcgcccgctgtcccttgcccgaggcccgcggatcccagcgggggccgtggcccgggtcggggcgcaggtcttgctggtacctgacgccgccccgaccccgcgttccccgcagaccccacactggcgcgcggccacaacgtcatcaatgtcatcgtccccgagagccgagcccacttcttccagcagctgggctacgtgctggccacgctgctgctcttcatcctgctactggtcactgtcctcctggccgcccgcaggcgccgcggaggtgaggctgccccggcaaagccagcggccccaggagactgaggtgggcgggagggtggtcctctgggctgggggacctgcggaaggggcggcactgcccccaatgtgagtctccttcccaggctacgaatactcggaccagaagtcgggaaagtcaaaggggtgagtgcccccctcccggccctcctggggaccagggcccccttcaccccacccagctgtaacctcctcccaccctcgccatccaggaaggatgttaacttggcggagttcgctgtggctgcaggggaccagatgctttacaggagtgaggacatccagctaggtgaggcagtgctgggacacgagggcacaggcgcggctcccagtcccgggctgggaagtgcatcctgggagcggggacctcagcctcctctcctcccacagattacaaaaacaacatcctgaaggagagggcggagctggcccacagccccctgcctgccaagtacatcgacctagacaaaggtgagcggcgggggcgacctcagcccatctcagagccctgcctgtccccattccacctcacctgggaccaacgatggcaggcaccagccaggcccggggcccctgccacctcaggctcagaaatccctggggagtcctgcgggggggtctgccctgtgtctcccactgtgatgagggtggaggacagccgccaacccgttggcgcccttggcttccagggttccggaaggagaact

SEQ ID NO: 5903 - DNA, 1129 bp, Homo sapiens
caagggggcccagctggagctggaggagatgctggtccccaggaagatgtccgtcagccccctggagagctggctcacggcccgctgcttcctgcccagactggataccgggaccgcagggactgtggctccaccgcaatcctaccagtgtccgcccagccagataggggaaggggccgagcagggggatgaaggcgtcgcggatgcgcctcaaattcagtgcaaaaacgtgctgaagatccgccggcggaagatgaaccaccacaagtaccggaagctggtgaagaagacgcggttcctgcggaggaaggtccaggagggacgcctgagacgcaagcaggtgagtggccccctgcttggccctgggagggcaaagtgctgagaacacgtttctttgccacgaattacttggcggtccctctctctgcgtcttgcagatcaagttcgagaaagacctgaggcgcatctggctgaaggcggggctaaaggaagcccccgaaggctggcagacccccaagatctacctgcggggcaaatgagtctggcgccgcccttcccgcccgttgctgctgtgatccgtagtaataaattctcagaggactcagcctttcctgcgggtctggagctccatttgccgggtgtgaggtctctcaggattgaggctgctgccagtcccaggtgttgcagaagacccgggcagcagggtggcagattggccgtccctctctctagctggctcttggccgccgtccagagggtgctgggcctgtaggagccccagcctcgctgtgagcaaatgtgtgctgtgtgcagttcaggctaggtgctgtgggatcactgtgaacagatcccacagcccctccctgagcaccacattccctggggaggccgacccggatggcagaagtacagggggacaggactggggtttagggagcacccggaatgcacggggtgattcaggtgtatttcatgagtggagggtcggggagggcctcattgggaaggcaggaaaggttctggtaccactggcagtggtggatggtgcccgccaggctccgtggacgtgatcctccagtggccctccaagctttccggctacagggccagggtgttggccttcccaggc

SEQ ID NO: 5904 - DNA, 1101 bp, Homo sapiens
tctgtgcctttctgtcctgtatttactgtatttagaaaaagcagctagaatatttctccattaactcttgagattcacaggactgtctagctctgagtcctagcaatagactccttagaggagtagtacgtttatctagattttctctagataatgcaggcggaagacctgggttcccgggtggggcattgcagttcttcctgtgtttggcttccaggaattacatgaacgacagccttcgcaccgacgtcttcgtgcggttccagccagagagcatcgcctgtgcctgcatttatcttgctgcccggacgctggaggtcagtgtgttgctactatggagagattctagtctgatttttttttctccagcctccagtaaactttactgtgttattcttcaaattactctaatctgggccaaagcattttcgtgaccaacaggctgttttttaattgtcctgagtcttgctggccgtgaagttgaggaaagtgtaatgatgatagtgtttgtttttacagatccctttgcccaatcgtccccattggtttcttttgtttggagcaactgaagaagaaattcaggaaatctgcttaaagatcttgcagctttatgctcggaaaaaggttcttcggcattttttcatgtaacgtatgcgtttgtgtttggccagaaacacctggttctgaacggacaccttctggcttttgcaggttgatctcacacacctggagggtgaagtggaaaaaagaaagcacgctatcgaagaggcaaaggcccaagcccggggcctgttgcctgggggcacacaggtgctggatggtacctcggggttctctcctgcccccaagctgggtgagtctgttagagtgcaggaatccactccccacaaaggcaaagactggtgactctcccccgcctccattctggggtatgtgctccttccagacattttttttttttttttttttgagacagggtctctgtcacccaggctggagtatggtggtgtgatcgcagctcactgcagcttccaactcctggattcaagtgatcctcccacctcagctttctgcatagctaggactacaggcacatgccac

SEQ ID NO: 5905 - DNA, 1117 bp, Homo sapiens
tgctgtccagggggggtctgtggccctaagattggccggcctctccatgcatctggccagcgtccccttggagacaccttcaccctcaagcgctgcagaagcatgaggtgagggcctgcagcgctctgtaccgtttagggtgttggaccagccgggagcctggcaggcctggcccagcggccagggtgagtgttctcagaccccgggcagctggtggttctccagggccaggtaccccttttgtgtgtgcgacctctgactaggtccctgtgggaatggggcagatggcggccatcaccactgggtcccagggcagaagcttagataccggccttgagcagcccgaccttccaccgctgcctggatcccaagcctcagccgacccaggggaccttggtggcaacggtgtgactgacagcaccacccctagcctttgcatgcccaggggtcgagagccagtatccggcccagacaatgccacccgccatggaagaaaagctgaccctgcccacctgctgcagacccgggccccgggccgaggttgctttctgtgacgaccgcctggtgacgctggacaccaggagggttatggcactgccctcccctcctggagcccctggcactgaccacctggacttgacctgactcctggtcactggccaaacacccatcctcaccccagccaccccgggccctggctggtgccgtgtgacacctgtagcccacctgtgtgtctttgctccgcccacccctgcgtggcgccggtcaggcgcaaacctggcgccagtgtctaaatgtccatcattctcagaccaacagagctgtctgtgtgttatttgggaggtgggagggaaggaaaaggtggattccccttctccccacatcccctgggacccttgggtatgggctggtgtctggccccaaaccctctcctggcctgggtggcattggcccaggcagcgtgtgcggcacgctgccttgcagttcctagcaggacaggcagggtgccccctgtttgtctctgcaccttcttgtcctgggccagctgtgttggcgggggaaggggaagacggtacctgccgtgcttagaaatagcccattcccacggcgacacact

SEQ ID NO: 5906 - DNA, 2287 bp, Homo sapiens
gctgaagtcccagaggggaggggccgctgcctgaggcctggtctgccaccctccgcaggcaagccggcggagctgcagcgcagggtgagtgctgacagccagcccttccagcacggggacaaggtcaagtgtctgctggacactgatgtcctgcgggagatgcaggaaggccacggcggctggaaccccaggatggcggaggtgagccgccccgccgtggagccctgtgtgccctgccctcccagccctccgccccctcagccccttcctccccaagcgtccagcccgacccagccacagctccatgacccgccacagtttatcggacagacgggcaccgtgcatcgtatcacggaccgcggggacgtgcgcgtgcagttcaaccacgagacgcgctggaccttccaccccggggcgctcaccaaggtgccgggggggctgggctgcgcctcatctgcttgcttctgtaaccccttccacgtacccccttggccttggggggtcaggcaggactagggtgccagctgcacccacgagtccccagccctgaaggaaggggagggactggtgggtggaggtgggtggggtcaaggagaagagggggttgggtgtgaaggaacccagaggagggtatgtctctgggagctggaatgggcaggttagggcctccctctgttccaggacaccaggaaggcaggacagcttcgtgggcgggagggaggcggctgggctaagatgctcctggttagtgctgtatgggggccgatgggggtggctggttaggacagggaggtggatgcttggcctagagtggtgggggaggtagtgagggctgcctgggaagcaggatggcagggagggggctggaggtggtggcggtggcagcttggatggccctgggaggggcaggcccggggcaaagcgtcagagctcagctctggatctggggtcctggataccaggcacctttgaggaggcgccgaagggagtcatgagacgggcttgtagagtgagttccctgcatatgagggctcaggtggggcagagtgggcccgtcctgcaccccatggtcctggggccccacccccacgctggctcacgggccctggccatgttgcctgctgctggtcagcgtacagcttcccagggccagccacctcggcttcacacctgcccagagctggcttctgtctgcctggacactcctcccatggctctggggctagggacacccagggctgccttggacacctggggctctcgtccagccagagcctctggcagtgcctggggtcggggtcggggccggggccgagtcaggcctgcctgtctcgtggagctcagcaggttgccctcctgttgcatgagcctgggcagccacacacagctggggggcccctcacgcccctctttgtcgctcagcaccactccttctgggtgggcgacgtggtccgggtcatcggcgaccttgacacagtgaagcggctgcaggctgggcatggcgagtggacggacgacatggcccctgtgagtccccctgccacccccgccgctagcgccgctgccccccacacctgcagcctgctgtgaccccctcccctccccgcaggccctgggccgcgtcgggaaggtggtgaaagtgtttggagacgggaacctgcgtgtagcagtcgctggtcagcggtggaccttcagcccctcctgcctggtggcctaccggcccgaggaggatgccaacctggacgtggccgagcgcgcccgggagaacaaaagtgcggcacagctcaggcggccagtgggaggtggggctgcccctggccaccactaacctcagccctgcccccaggctcactgagcgtggccctggacaagcttcgggcccagaagagtgacccagagcacccgggaaggctggtggtggaggtggcgctgggtaacgcagcccgggctctggacctgctgcggaggcgcccagagcaggcaagctcctgaccccgtcctcccatactggccagtctgagagtgaggggcagagggccagggactcacctgctggcactcttggcaggtggacaccaagaaccaaggcaggaccgctctgcaagtggctgcctacctgggccaggtggagttgatacggctgctgctacaagccagggcgggcgtggacctgccggacgacgagggcaacacggcactgcactacgcggccctggggtgaggcctgggaggggcccggccggcggggctgagcctgtgcgtcctggggtgaggcctgggaggggcc

SEQ ID NO: 5907 - DNA, 1164 bp, Homo sapiens
cccaattccctgtataacagcattaaaataatctgcctgcctggaaagatgagaacactgttgcacaacccaaaatgtgtctttaatttgtgaaaaattaccatggtgagtcagacagtcattttaaacagctgaacagagactatcatcagcaaatagagctcagctttgtagctgcctttaaaatccttgtcccaaatccggtgagctctgcttgctgccgccgcgctcctgggtgatcactcagacgggtcagtgggaataacaggccaacaagacagctttttacatgtgtccaaaggatggcctttcgaaggcctggaagtatttcactgttggaagaagtaaacaagaatgacattccagatggaaatagaattctctctcttgcctttgaccaacatggtactaaggggtttcttctttcccaatgtatgtacgtgccctgctgggggccttactttatagaatgagagcatccgagcttccctaatgaatctggctagttctgtgtctggctgaggatacaggagtgggacatccactctcggatccctcagagcacagaaaccttcagctttgctgtctctgaagtatttcctccagtttccctgcgggcccctatgtttgagtttgatggctgctggatcctcactcaacgaaaactcggttggaaactgttccgcctggcagtccttttttgttgttttccatctcatttcccttccatctgaaagtggcattcagctgacttgctcatttagactgttcacggagtctgaatctgccaacgtggtgttggaggctccaccttgaaaagggccacagtcagggcaactttccccatacaggaaaacttgaaaattacatcaacagtctacgtcacagccaaattatatttcctttataccaaacaaaactatggagaactaaaagtacatcacacaaaacgtttatagtgttttgcatgtgacctatttcagtatttatataactagattagtgctttctagcaaacggttctgttaattagcgagtcactgttgattctgctgtggtggtaagttgataccgtgtaactaatcccgtggatgcctcctcgttatttttgtccaaacgaagcagccgtggtagtagctgtctatgattcttgctcagcaaagt

SEQ ID NO: 5908 - DNA, 2291 bp, Homo sapiens
ttaaactctgtttaaaacagcatgtggatgccatggagactggaagaccattccaacttggacgcgttaccatgagagcatatcctatccaaccgtactaacgtggacaccctacacctcccctcagaacttcaaaagggcaagatcttttttccttcacttattgctgaaaccaagagcacaattcccattgagagaaagatctctgtgctgtaaactaaaacaaattgtgcattccttccggggccatcgtctttgttttcttttttgtcttgaatgaattttaaaaggaaatatataataaaaatgttaaccagaaggtaaacttgagtgtaattgtcagacagacacacttttccaccagtgtatttgaattttagaccagtgaccctgttttgtggcattcatgcaaaacatgctgagggctttgttcatctggtcatcgtgtccaaatttcagtcatgtttgtagcaagattttggaagcattcatatttcctttttaaaatgtattcctttgtgttcaacagttaatcaaaaccagagagtctagggcagcctctctgatgttgtcaatgatgtaaattcagtccctggtttttaattttctgtctgatgtcacagatcattgttgcacacaaacgtggcatagaaaagaacatgttcagaagccatggggccaagcacatgcggggacggtctcaaatgcgtgatcagagaatccttcacctttgctgaaaagtgagctcagatccagcaccatgttcctcctgacccatcctgtctatcttctcagttgagtttttaatctcactttgggtttccttgtgaagttggagggaagtttataatagcctaacactaccccacccccaactaggaggaacctctgttttcaagagagatgcctgtcctgtgcttggatagtcagtcaattatttgtgtatgaaacaatgtacaaatcaatgttttgaaaataatgatctcagactttctaagttaaattttaaaaattttgattgtttgccatattgggtgggtttactcttagaatcgcatgctgtagaaatgctcaaaagtgcatatgggactcagtccttaggtgttctttttcttttaagaaataacctcttacagttgtaaccattgcggctctgtccacttctcgttgctgctctgtggcacatatcggaagcagtacagcgcgcggctctacacgcttgggtagcgggataagtcactgttttctttatttctttaaaaaaaaaaaagttctgttgcaaacgactgctgttggattctgagggtggggagggagagagagggagggagagggagtgaagagcctgccctcctatatggattcttcagggccctccacatctgaggtggctcattcccatcacacacagattgtcctggtgttcatttcaaggccagtgttcagcagcagcgtttggaaagcaggttctgtgggaccccccgccccgccccccgcactccttcatagcagcagtagtggcttctccatcctgttttctgcaacattctatacaaaactgtgctgtgaccttgcggtaggcctggatctggcaaagagaatacaaatgaaaccccttctttctctttccgtccaacaactctgtagagctctctgcacccttacccctttccaccttttgtatttaattttaaagtcagtgtactgcaaggaagctggatgcaagatagatactatattaaactgtactgttatttaagatgtaataaagcagtttgacatgagggactttggtgtggtgattatttacgggtccacttccagtttgcaacgcgcccgcttccctaagctgtccctgttgctgtgaggtctgacgggcctgctcatgccaggcggtgccatggccgccaccacgtcacagaatccatgagtggcgcattggctcctcggaggggttcctgggaagctccacctcacaggccagcagagcagggaggtccacctgccatcgcccagacccctccccaggcataggccttgcccacagcaccgtgggagtctccacaggcggctgccttgcctttctcctctgccatttccctcccttagaatgtctgaggatgttactccagagactagctttccttgggactgaactgagtgttcctcttggtctgaatataaagaactgcatctagtaagaaaaaaatgagcactggccatggtagtgtggaaaaccatggctgtgtgtgtcccaaatagccgctcctaggctccagaaccatccactt

SEQ ID NO: 5909 - DNA, 1098 bp, Homo sapiens
ggctcagcaggtgtgtgtacagctggtgctccaagtgatggtcgtgcagaagcaggtgtcatgcaggcccacacatagcctgacataggaaccagctattaaattgtggtgtgggacatctgtgtggtgtcataagaagagttgcgagatctcaaagaactcagagacctaggaggagatggtcctggatggacagggagaggaggaaggaagcaggaagggaacagcaagtgcttcaaggctggccatgttcgtgtgcgtgcattggagggcagggcacacaggttcctgatgaccagccagactgagacttggtaagaggtacggaaggggttcagtgcagaatgccacagtggaagccactggagaactgtgggaagggctgggaagaggtaggcacagtgggcgagccaacagccttgacaaggatgggtgatgaggagaatcgtttaatcacagatgttgatttacagaaatgtttttattttcaagatcacaaacaacatcgacccagtgggaagaatccaaatgcgcacgaggaggacactgcgggggcacctggccaagatctacgccatgcactggggcacagactccaggtaggcgtgggcatgagcaggatgctgcttgttacattcaggggctgctctgttgtcctaggggaaaagtacctgaacccatttgctgtgctgtgcagtgaagaaattaggaagttgaatcagaactctgggcacgcaaggtgcagcgttcacaggtgcatattccctgtccagttttccacttacctgggctgaaagaacactgccatttcttcactgtctgaatcacattaatacaagttctgatttttctttctcccttctcctgtctctttcagtttctagacctctgtcttcccagttctactgcatcctacttatgtgaacttggggaagttacctctctgtgcctgtttctcagggctggttggccctcgccctcttgtgatgtcagtgccctggctcaggaaatcacagaacctgccccgaggatcctgagggattaagtgtattgagccttagaacagcattgtgctgtgtgtgctttgctgcggcagac

SEQ ID NO: 5910 - DNA, 1226 bp, Homo sapiens
tatgcaaagccaataaataatcataattatattttatttacctggccctacttagccattgtataagttctgatgaatgctgaagaaaagttctctggtttgtaatgagaccatagttctcagactttccttttttttttttttgagacggagtattgctgtgaagcccgggctggagtgcactggcgccatctcggctcactgcaagctctgcctcccaggttcacgccattctcctgcctcagcctcccaagtagctgggactacaggcgcctgccaccatgcctggctaatttttttgtatttttagtagagaaggggtttgaccgtgttagccaggatggtctcgatctcctgacctcgtgatctgcccgcctcggcctcccaaagtgctgggattacaggcttgagccaccacgcccaccttaaactttcaatttacttttctcacctgcttcattaaattatccaacagttgtttattgattgtgcttgtctttctgtttcagatctcacattcttgaaggtggcattgaagagcactaagatcggaagatgagtgagcttgaccagttacggcaggaggccgagcaacttaagaaccagattcgagtatgtagttgtgtgtgcttggttttattaatcatttgagtttcaggttagatgttacttgttttaggaaaaatggtttacaggatgacttgttctatgttttatatgaaattgaatcttagttggcccaggatgtactaattatagatctagatacttagcctagtacattgtttttgggattttgctttctgtatacaatttgttatttgaatatacaccagatgtctccgtagaatttataagtgtcttttgcattctttatcataaccttgaaaatttgtgataccctgggccactgatcagactgtgatatctacctccctcccctgaatattgggactattgacagcagaaaacttgcttaaaagtaagagtattaacaacaataaaaaaagtatttcaggtatatctgatgtattttttcctaattttgaaagatcttccctagcggtgatgattggaatctacagcttctgatagactgctagatggagcagatatatctaaatccaagatagaggccgggtgtggggggctcatgcctggaatcccagcagtttgggaggccaaggcgggtggatcacctgaggtcgggagttcgagaccagcca

SEQ ID NO: 5911 - DNA, 2955 bp, Homo sapiens
tttcagatcgaagacctgcaggtgaagctgcagcacgcggaggcggaccgggagcagctgcgggccgacctgctgcgggagcgcgaggcccgggagcacctggagaaggtggtgaaggagctgcaggaacagctgtggccgcgggcccgccccgaggctgcgggcagcgagggcgctgcggagctggagccgtagattccgtgcctgccgccgcagcgccgccgacaacgcgggtgcaggggggcgcggctgggcggtgcagctccgcccggctccgcccctgcagcccacacagcacaacgtcttaccgtgcctattaccaagcgagtgtttgtaaccatgtagttttggaacccactgcaaaattttctactggccaagttcaagtgagtaagccgcgtcccccaactacagctggagacggggccagctcggcggcctgctggtcctctgcttgctggaacattctaacatttacacttttgttataagctatttaaaaccagtaaggagacttgaaattcagaaaatcaacacatttttaaatgactaacttctaaaagccccaacacatgacgccatctgaagacccgcaacggagtgggggtggcggccgccccaccctccccacccggggaagccatcacagctcatctgcccgcggctgcgtgaggacagcaggggtttttcttcagagtctattttttcagcgacaaggacccaggtcttcctgctgctgccagggagagcagggacagtgccgcgtgcgagatgagctcgaacactgcccgccttactgccgcctaccccgcccgccacgccgccgtcgatgccagcgctgtccccacgggtaccaggaagtgcagagccgcacaggagctgccccggagctgaggggacggtcttcggctcctctgcaccccgtgattctgcccacgctcctccaccacgaggcactgacctgcgtcgggtggtgaccgtggctggcggtcacgccctcagcccctccgggcacacgtgccgcctgaccgggcgacccttttcagttcggcaaacgtcgctcccttcattttgggactgaggctgcagcattggaacaaaagagcattatttcaatttttctttctttttttttgttcgttcatttaaacgtatatttagaactgcactttgtccacaaccttcccttctctttctattccccagtgaactgaggtttttaccgatttatagagcagtcaaatccgaagtgctcgagtgcttagaaaccccctctggtgcttggttgaacaagggaatcacaagaaaacgaaaatgcaaaaactgaacttcgggggtcgttctgtgccttccagcatcttgtacagcaaatcctgactcgtgtctttttacccccaagatatctgtcttcagtagcgactgaatctgccactctcagaataagttccttgcatttattccaaataatctcgtttactctcacctgtttatgcaaattgtataaggtttcttatgcccaagcttgaaaaatgatttcccagtagacaagaggcggctacctatcctacagttacggtatttatttacataagaagatcttacaggagttctttgcttgaatccgttctaacacccgcggcagctgcacgcgctcacagaaggtggaggttacttgcccaggtacagacgacctcggggcagtgacgagcaaagaccagagactgctgagccctcgcatctgggtggcggaattgcctgcggggttttgcccttggtttactgaggggggtcttggttgctgctgaagccccccaccccttctaaagtgcaatgcaaaagggacatcatgtatatgcagcgtttgtttggaattttctttgcttttgttttctttgcggttgttctgtgtgcatggattccacacctctgccgtaggtagatccgtcagcgggcattattaccgtgtcttgtaaagggtcggttttgttatgcaacatgcagaatgctgtttttagccttgttttaccagagttgttttttttttcagttatttcttcaagggaaactaaatgatttagttggagcaaagctttaagtgtgttggcgtgcttctgtgtggctgtcctgtgtcgccaggtcgaagatcacagtgaggtagaggccctgccccatccccagggccgccaggcttgctccgtttgctttgagtttttagaccccagagggagatgagcttttccaagctgtgtctgggccagagcctctccttgcccttgctccatcccgacggtcaccgttgggtccacgcctccaccgccccatcttgccccaaacggaaagcgctgtatctgcagtggcagcccttccccacttcggctctgggagggtccagccagtgtcacctgggcccaccctttcctgcagctgccaggcccgtgcggtcagtgggacccggacgtgggcaggcgagctcgggaccctcccaggcagttcccacagctcttgcctcggctcaccagggtcacttccactgtcaggggcctgagggggcagctgtggctgcagggctgctctggactgaggggtcccaggccccgaggggtgcacgcctggctccccttggcacaggtgcgagtccgtttcttttcagcagaagggggaagaggtgtccgctgtgtgggctgctgactcctctgtgtgtgaggcccttcatctaagtgattgtgtattcagtttaattctcattatatttctatactgaaagaagatttttaacgaagggaaaaacaacagcaataacattcatatctctggagcagctaactcatacacgtaatgtctgcttttcgtacagaactagccaatgtaaaaacagttcacctgtaaatactttttcctttttcaccgttgtattatacatgtatatgctgggtcctttttcagaaactcttttct

SEQ ID NO: 5912 - DNA, 1872 bp, Homo sapiens
ccccggcgagtgcagtgtcccggtggctcctcttagggtgcccagtgccccgcgccagcctgcccgaggaggagggtgttagggggaagttagccgagactgcggactgtgcccttgacggtgtggccttcgtgctgcgggcctcactctgtgcccggggtgttggctgcagagagggccctgggccacctcacatcccccttgcccttcctccacgggaggctcacgaagcactgggattgatggggtttcaaacctaggcctcgtgggctgtggaaggtcttgctgtgttgatgtgggcgcaggaagccactggggctccgattccacttgtctgatgtatagaaaagatgggggacctttggccgctcagatttggggacagtgtgactgactggagagcggttgtgcagtaactgagtctgtgtttctctccccagcacatgattaagtaccggtacatcccgttcacacatgggaagagaaggtacagaggcaaggaggatgccggcaaggccttcgccagctagaagcgggactgaggctgcctcacgtgttgcaagaacagttttgagccattgttaacaatgccttttttcttcacataaagtagttgattacgagggagtcaaattttctttttaaaaaggagcttcaatgatttgtaactgaaatatcaggttctagaagaaactggcgcttaaaccaaatcgcatggatttctttttcagtgacgttcaagtgtttctcacggatggaattctagtcagctgcaggcgggaagccaggcgggtggagcccatgggagcaagggcgagtggccggtccccgctgtgccaggtgggcaggcaggagcaaggcctgcgagggaggaacgggccgctccccgccagccgccttccccagcagccgcaggtggtgccagccactccacagagcccgagggatgatctagcctgattcctgcgtgtccgaaagaacttaacgttttaaaggtgattgtcaagtaactgtgtggggttctaatgccagtttcctaattccatctcactggagatgtttaaagttggcctctatcctaatgactcaaaacttggttcttaactaccatgattgcttttgagggcccggaattataaatatatattatattttaattgtttgagattattttgacacatttctttgatacgtagagtgttttgtttttaatttaaatctgtcctcatgcaaccctccatgaggggcagcgaagctggcagggagcagactggctttgtaggttcagcactcggccccccactgcgggagaggcggaacccacttgcatgtcagcgtttttgattcgagaaaagaaatactctcaacgttttaccaagtgattttacctccacctttactaaagtctttacctaaaacatggcagtcgctggacacaggaaagcccaccttttgtttggccttttcgaaaggtgacccatattgcacagcagaacatcacagctgtggtcccagatgagacactgacatgcgagtgaaggcctctcctcctgggccccgggctgcgcaggctcctcactctgggcggtgtttcctgtctcagaattgacacggtgaatgcttagtgtctggattttcttgtaccagtgtttacatatctgacatcgagctcctctaagaggccacgttcaagcttgtgtgtccctgacccaagatagccagtgctgctcccaggtggtacttctggtaccgtgttgagacacttgggattctcagactgtggacaggagtgtttgtcatttttcatactgttttcttaataagcgctcaggcctaaggtgtgacaggaagtcgcacgcgcttggccagagc

SEQ ID NO: 5913 - DNA, 1819 bp, Homo sapiens
atgctgccctgctgctgctggaaggatggggatctttcacctttagggatctcagcacaattagaatcgtaaagtgaattctatctatttaattggatattggactctgctcatataagctacagacaaaagccaaaagactctcgctgtccctgtgctgctggtatttcattctctgtaacttcagttctggtgttttccttgagtatctacttggcttctcgtggtttttcccaccccagctgccccagcacgcgggacccatagcacaccccttagcgcttgcctaggttgctgaaaacagggaggcacctggtatctcgagtgcctgcagttgcaagtatgtttacacctggtgtccaattttgtattttaaaatgtaatccatttttacttcagctcatccaaaagcagccagcagaccggttgactgagaccggtctgtggctgtgggccccttggtgacccgctgctcttttggaaatgggtgacctgaagtgacactttttccacaattaacccaagttgtgttaatacttcaggtctgtttcccagacccagaaagctttacagaaaatcattgtaagacaatttattaatttgagaaagtcaccttgacagttctttgcacacaagttttacacctctctggattcgaagtttgtattgtattcatagttaaagggaatcgggtactttgcttgttgaataatgcactttaaaacaaggaaccgtatcaggccagcatggtggctcatgcctgtaatcccagcattttgggaggctcaggcagacaaatcgctctagctcagaagttgcagagcagcctgggcaacatggtgaaacccgtctctaccaaacagacaaaaagcagccaggcgtggtggcacatctgtggtcccagctacttgagaggctgagccaggaggatcgcttgagcccaggaggcggaggttgcagtgagctgagatggcaccacttattgcactccagcccgggcgacagagcgagactccatctaccagatccttatgacgcagctgatgcctgccttggttcctaccactctggtgtagacagaggactttgtccaagtctcacactaaacatgcccgggcttcgatgtgcctggaggatttccccacagggacccacgcacctccctgtatctgcgcagcttgctcgtgtggctggaagcgctgtcgataagcttcacgcactggcttgccagttcttcagctctaggacttgtagctttaagcaaacggtgtggcatgggttgagtgtggccacctgcaggatgtgcagggctgcctcagaagctggctggggactctagcctctgtgttcataaagacattaagaagtggatggatgttgttccttttttgaagttgtcattaaagtaggtgcaacaaccaagaaagtgtctcttccctctttgaaagcctgccccatctctgccggctctgcacctgtgggcctgttctgcctgtaccatgcggactgcctgtcacagcagtgccgagtatggttctctgcagaaagagatcacgatatgcaacaacctaggtttgcaaccctgatccccccacctgtggtgccaaccaagtctggctgcctgccgagcaccagctggagagattgatggaatggttctgggtggttctaggcacttcctgcaaatagccagggtggagacccacgcacactggttccgaaaccagagtagacatgagacttcctgaggaactgactcagctggtcggggacctgcagctcccatcccgaggggactggacctgggggtggcgctgct

SEQ ID NO: 5914 - DNA, 1050 bp, Homo sapiens
ctccagcccctccccggctctacgcaggagaggccactctcctctatggcacgcgcggcggcactctagcagccaggtggcttctctatgggcttttccggcacaggtcggaagtggcgcgcgctgccccggaagcaccctggtgggtgggtgcctgccagcagctgaggcgccatggcggcggcagcggtgtcagagtcttggccggagctggagctggctgagcgcgagcggcggcgggagctgctgctgacggggcccgggctggaggagcgagtgcgggcggcgggtgggcagctgccgccgcggcttttcaccctgccgctgctgcactacttggaagtgagcggctgcgggagcttgcgcgcgccggggcctggcctggcgcagggcctgccgcagctgcacagcctcgtgctgcggcgcaacgcgctggggcccggcctgagccccgagctcgggccgctgcctgcccttcgggtgctcgacctgtcgggcaacgcgctggaggcgctgccgccgggccaaggcctgggccccgccgagccgccgggccttccgcagctgcagagcctcaacctcagcggcaaccggctgcgcgagctgccagccgacctggcgcgctgcgccccgcgcctgcagagcctcaacctcaccggcaattgcctagactcctttcccgccgagctctttcgccccggcgcgctgcccctgctcagtgaactggcggctgctgacaactgcctccgagaactcagccccgacatcgcccacctggcctcgctcaaggtcagcgggggctgcccgggcggggcgggatggggccttggagtagccctggagaaggaacccctctcggggccgagcagttcctagtgacgccccctggggcactgggcccagggaattcctacaaggctgaaaggagccagctgcggggggcatcacccctgggaagcagatgccgccttccaactcccccttctcctggccacaccaacatactaggtggcctctgaactcccccgcattctgttaactggactttta

SEQ ID NO: 5915 - DNA, 1255 bp, Homo sapiens
cacacgggctggggctcagctccttggagagggcctgcctgggactgagggggccagggctgggtcaggattcaccagcttgtgttgcagacactggagcgattgcctggccctccctaagccctatatgcctcactcataatgaggctgtctctgaaccccggagggcgggacctacaagtccttcctcttggcgcattcccacactccagtctggatccaggtctgcaaggccagcccgaccctgacactgcacgtgggcgtagtggggagcaccctggagtggagatgattgtcagcgggctcacatgttatggttcatccacatgcgtgttgtgtgctctgcggtgcctcctggcaaagggtcctggctcgggtcagaagctcactcccgtgccctcgtccccaaacaagcagtggcaagcactggggttggccctcgttgggagcagtgcccaccttccttggcccacagcagataggtcccgagcagcaggactggaggcctgtggcggtcagggcaggggtctgtgtctccaccccaagggctgatggtccctcccctgtgcgccttcctctcaggcaggcttgctctgtcccttcctctctgcttccctcccaggcctcgccagggctcccttctcctctgcctggttagactcgggcacccaggaaagcctggccagggctcctttgggcctgggccccctgcactgcctggtccagaaggggtggtgctgtccgtggccagcaccccggggcccgggaggggtgggctactagagtcagagcgggtttggggctgaccagtttgggagaggagaaaagatctgagaatgtccttcttggtttgtcagtcatctctgccaaaagtggtgatggtggtgtccgtatgtttggcgtctttgggctgggtttggtttttgctgctggtagaatcagggtcctcgggcatgaacgcgagcccaaagtgccagtctgcgattggaaatttccagccactttaagccagtgctgagtagggcttctgcagagccatgtttgagccaaggtcttggaaggcattgccccatgggctcaggtgactcggggtggagtgagcacgtctgcagggccctctcatacacgcctgaggcagaagcagcgtcccccgtgaaagccaccttccgaagctcctgcgttttttgcaaacttggcttcccccaggggcaggctggactttccctgccccctatgattgaagtcctcctgcttt

SEQ ID NO: 5916 - DNA, 1180 bp, Homo sapiens
tgacatctccaaggaagaccagatcaagaagctgcatgacctgctggggccgcacatgctcaggcggctcaaggctgacgtgttcaagaacatgccggccaagaccgagctcattgtccgggtggagctgagccagatgcagaagtgagtgatgggctgaccccggagcagcctgtgctcgccctttcccctgggctggtctcctgggtcgattcccaggtgggcggagggctcttcagcctcactgaggtctcggctaatgctttgcatacactttcttcgtggggcctcttctcaggttttagtgaccagagtttgggtcgcttgagtgctggcagtgtcccccagtcacttgcagggggactccaggccggtggcttcacctcttgggggtcccttgggtctctctgtaaatgggtgcttggccaccagcttccagccccactgcagagcagagagagccctcatggaggcgggtctgacccagcctgcctttcctcgtgccctgctgcaggaagtactacaagttcatcctcacacggaactttgaggcactgaactccaaggggggcgggaaccaagtatcgctgctcaacatcatgatggacctgaaaaagtgctgcaaccacccctacctcttccctgtggctgccgtggtaggtttccccggccatcatggcagcttctccatgaccgccatggtaggtgcctgtggccgccatggtaggtccctgtggccgctgtgataggttctcctggccattgtggcgatttctgtggctgtcatggtaggtttccctggccatcatggaaggttgcctgtggccactctggtaggtgctggggaacttaccgtggaacccgctgctgtggtagggctggtgcggctgtgagccctgcctgggaacggggggcctggagccagggccgtgggacccacggtctaccccgcactgtggggcctggcctggctcgggtgtgggtctcatgttcagtgggcagacaggccatcaccccattgctcagcacttgtctgttccctgcggcccctttggtgcagagtcagagaggagaggggagcccaccaatgccccacctcctgctgtgtctgcaggaggcccctgtcttgcccaatggctcctacgatggaagctccctggtcaagtcttcagggaagctc

SEQ ID NO: 5917 - DNA, 1083 bp, Homo sapiens
agactctggtgccttgtggtgcccttctgaaattcaaacagtaatgcaaaagtgtctgcattagaatttacggtgtctaaaattcatgtttttaaaagagcttgcctacagatggtttccacacttgaaattgtgccctgcgagttgcatagctggaagttcaatgctcagtcctaccttggctcccattaaacatttggtgctctgtggattgagttgaacgtgttgaggctttgcaatttcacttgtgttaaaggctctggcatttttccatttctatgcaaatttctttgaagcagaattgcttgcatatttcttctctgccgtcacagaaagcagagtttctttcaaacttcactgaggcatcagttgctctttggcaatgtcccttaaccatgattattaactaagtttgtggcttgagtttacaaattctacttgttgcattgatgttcccatgtagtaagtcatttttagtttggttgtgaaaaaaccctgggctgaagttggcatttcagttaaaagaaaaaaagaaactagtcccagatttgaaaacttgtaataaaattgaaactcactggttttctatgtctttttgaactcttgtaatcgagttttgatcatattttctattaaagtggctaacacctggctactcttactgtacgaggctttgttttttttaaggactggcatgtgaagaaaagctttgtcctcacgaattagttgctgtaccaacagttacgttggtctttattaggcttagaagaaaagatgtcctttatttccacttttcttcccttagttgtgctgttttgccgcagtgagattcaggggttggctgtcactgaactctgtgtagaatttctccagatccagagtctggggatcaactttgccagcaaatgccgttttctgatggggaataggtagtgtcaacttgaattccatcacaaccatgacaccagctgcgcccaaagcacactgtagaccagtttcctttgttttgactcacacctcacttgcctgatcgaaaatagttgaggcacaggggctgactggggtcgtggagagtttcaagcc

SEQ ID NO: 5918 - DNA, 1392 bp, Homo sapiens
tggattcaagggatcctcatgcctcagcctcccgagtagctgggattacaggcgtgcaccaccacgcccagctaatttttttatttttagtagagatggggtttcaccatgttgttcaggctggtctcgaactcctgacctcaagtgatctgcctgccttggcctcccaaagcgctgggattacaggcctgagccaccatgctgaggctattctaattgttactgccgatgtcgatggtacgtggctgataactcagagccttggctgggtgtatttgccttacctttgccatttttgaggcttgggaaaacaccttgaattgtaatgattttgagtgctgggttttataaatgttaaaatgttttagaatgcaagcaccaactgtctagtggagttcttgtgtcctttctctgcaggtatttgaaatatctcaccaaaaaatatttgaagaagaataatctacgtgactggttgcgcgtagttgctaacagcaaagagagttacgaattacgttacttccagattaaccaggacgaagaagaggaggaagacgaggattaaatttcatttatctggaaaattttgtatgagttcttgaataaaacttgggaaccaaaatggtggtttatccttgtatctctgcagtgtggattgaacagaaaattggaaatcatagtcaaagggcttcccttggttcgccactcatttatttgtaacttgacttctttttttttctgcttaaaaatttcaattctcgtggtaataccagagtagaaggagagggtgactttaccgaactgacagccattggggaggcagatgcgggtgtggaggtgtgggctgaaggtagtgactgtttgattttaaaaagtgtgactgtcagttgtatctgttgcttttctcaatgattcagggatacaaatgggcttctctcattcattaaaagaaaacgcgacatctttctaagattctctgtgggaaaatgactgtcaataaaatgcgggtttctgggccattcgtcttactttcattttttgattacaaatttctcttgacgcacacaattatgtctgctaatcctcttcttcctagagagagaaactgtgctccttcagtgttgctgccataaaggggtttggggaatcgattgtaaaagtcccaggttctaaattaactaaatgtgtacagaaatgaacgtgtaagtaatgtttctacaggtctttgcaacaaactgtcactttcgtctccagcagagggagctgtaggaatagtgcttccagatgtggtctcccgtgtggggcccagcaatgggggcccctgatgccaagagctctggaggttcttgaaagaggggacacgaaggaggagtgactgggaagcctcccatgcca

SEQ ID NO: 5919 - DNA, 2088 bp, Homo sapiens
gctggcgggtgcctgtaatcccagctactcaggaggctgagacaggagaatcctttgaacccaggaggcggaggttgcagtgagttgagatcgggcctttgcacttcagtctgggcaacagggcgagactccatctcaaaaaacaacaacaacaacaaaaaaaaccggacggacttgcccatcggccctcacgacacgcgtgcagtgggactctagccaaggcggtggccgagccatcattacaatttttctggagtaaaggatccacggtgggacatcaactggcacttactctgtttaggaacttgagttgaatcatttctaaacttgtcctttagaccacgcctagggcagcaaattccacttcctagaactgcaaaccgggagaggatgtagttagattctggcatcctgccccggctctttgagggaaaagttctttcccctgctctaagtagggcgggcccagcctccattcccattgggagccatgaagttgtcttgttgataggtctagggcagctgttggcagctgctggccttgtggatggtaagctgactgtgttggcatttaatgccatcctccatctgccagaggcccaggaagcccaccttcacaccaggcccaccagctggaaggagcccaggaggcaggtcttagggtttcatggtgaaatgctgtctgacaccagggaaaacttgacgtactctgctttggagaggaattccaggggtagggatggtgggagaacattcccaccctgtttataatcccagagcagaagtcagcaattacttagggataaaagatgaactccattttttttattttcttaagacagtcttgctctgtggcccaggctggaggctggagtgcagtggcaccatttcggctcaccgcaacctctgcctcccgggttcaagcgattctcctgcctcagcctcctgagtagctgggattacaggcttgggccaccatgcccagctaatttttttgtatttttagtagagacggggtttcaccatgatggccaggctggtctcgaactcctgacctcaagtgatccacgcgcctcggcctcccaaagtgctgggattacaggcgtgagccaccacgcccagccaagatgaactccttaaggacaggatttggtaagtgattgacttctttttagttccatgatcttgagattatttttagctttataaatttagcagtggcagggcccgtggagaatcaggttaatgaggtaaaggctttctgggtatttgctgccaaggccacatcaccaattttctcgatttaaaaaactgtcaagagatttatttttccattgcaggttttaaagtggagattctgaagtggaaaataggtactgtcagaacaaagctacctggaaacagcatagagtgaagcctttcgtgagggcttgcaggccgctgctgagtggcagtttacagaagaggtcgcggggtgagcctcttagcaggacagaaaacaaggcagcagcgcacctgccaccccttcacgagctgctccttgagcctaaaaagtaggctttattcatcccttctgttcatttaccaacctgggggattgatacgaccggggaaaatgttcctaaaccaggaagctgcgttagccgatcaggctttgtaagatctcgccaacagctagctgcttaggagtacccccacgatacgcacagcacaccactgtcccttcactgcactttcttcctgccttaggtagttgggcttgcccaccctagtttgcttttgtagtggtttggcaaggttagaaggcctcggcctctctgtcatgctgggaagtgcctactctctgggccactgctgcagaggccgtggcacttgtcatgggtttggaagacccagccatctgcagcagaggcagcctatcccattgcaaggagaggaactgaacggagtaattattctactcttctttttacataaatgtttatttaaatattctaaattggattttctttcacagatactgattattctttccagttcttaaataaaactgcacttgatttcactcaaccacagtgtgattgtctg

SEQ ID NO: 5920 - DNA, 2214 bp, Homo sapiens
ctcgctgggctccgcgtcctaggaccgccggcgcctccccacggacgccaggcaggccaggccgctctccggggccgcagcaccaaagacgcccgcctccgccccgcgcgcagacatgcgccacccctcccaggggtgagggggcgttggcctcagcgtttgtcttccggctcctcccagctggccttgtcccaggggcgacggctgccccggacgactgcgctgggcaccgcatgtcccgggccgagtgaggtcgggcctggggagctgagtgacatcccaagcttgggcttgggtagtgagtgacatgtgcacacgtccagctgcgccatcaccagccctgcgcaacaggacgtcgggagcagggaacctgagacagggccactgcgggatcggacaaagccccgctttggagaggctgagctggagccattggcctccccaggggctttccacccacactgcaccataaccgccacacccttcggggggggggagggtacagagggtctctaagcacaggggtgttcagagcccgaacaagctttgatcaggtttccctgcttccgacctgtcctgcctcagtttccccatctgtgatgagcaggtgaccacgttaactctcagggctgtttgaagtctcttggttgtaggccctcgccactgagtggcccaggtgtgagaggtagtctagagccctctgcggcctttgtggaggtccgttttcagcatgtggcctggtgtggctccctaggcctgaggcctcccactctcagtgccccctgcccccttgggaacccacactccaccccagctaagcacaacactgtggaccaccaccaatggcacctgagccaccttgaccaccattagtgtccccaccctcattactctgccgtcgttgcctgtccccaccacatcatctccctccatggctcccaccatgacgctggcaggtgcaagcggagagcacgagggcagcagggcctggccttccgtgtccctgcgtcatccccagcctcactccccacccgtgcaggcctggccaggaagggatcctggcaggggcttccaggttctcagctcaaggcctggtcccgggcaggcgtccaacccctgggagcaatgtatttctttgccttccatcctgggcagaccccttacaggcctgggcattgccatgggccctgggtcttcccaggctaaggagaaccaggaacagctataaccttgagctagtgaaatagggtagatgagaaggctgtctcctccagacccctacccctacacagtggccccacaatatgaagacctggggtaattccaaggtgagcatagagcctgcctgtgcccagttccttctggccctcaggtggccaagcccatctcttcatccttcagatagggtcccactcccagaagaagctgctggggtgggggtgggaggctgcctaagcctgtctgtgcttcagaggcccctccagtccctggctgtggggtaactgggggtatgagctgtggccacaggtgagcaaggcagggaactgcaatccagccctggccgcgggaggggccatctctggccaatgctgctgtgccttcaaggactgacaagttacgtaggggcagaggtcgccagctagccagtgtctcctccatctggggggcgtctgtccacttgtcaccttaggttttcactcatttgtcaccttggggttttgctctgtgtgtttcatatccaacggcaatacttgcagggggacagagtcctctaaatactccaatcctgcggtttttacaaacataaagggggagaccccaagtggaggaccctgggcctggagctccctcccaaactttgtccagcatccagcctgttccctgggctcactggggagggagttgtcttcatagcacacccagagccagggatccctttgtagttttttgacaacggagcatttctcttctgtacaggacccaataaaaacttccttatgatttgcacctggcattccaaggctggtttcgtagaaaacccttctacaaccccacagcagggctggccagctgcccttaatgtcttcctctggaacctgagttcttctggtagtgtgacatttttggggggttggacttgctctctgtcttcagacaaatgctcaggtcccaccagcgagtgaggagtgagatggtcctggagtagcaacagga

SEQ ID NO: 5921 - DNA, 1203 bp, Homo sapiens
ccttgccttcaatccagggcctgattccacactgcccccgggacccacagaggagcttagcgcgcagtgggcaggcgctcacctgctgacagggcctggggtcttgaagctgcgactcatgtttagttctcagaacagccgtggctacctggcttctctgggactcctgacgggggtggtggtggtcccgggaatttgctcctagggtcacagtctgtgtgttggtcactgggaaccccaagggctgatcaccacctccctgccctgtggctttgcttaaaggtcttcaccatcagcccttccctgccagggcagtccagggacatgtggcttcagggggagaaagtgcccctctgccctccttctctctcatggaaacagcatctcagggccccttccgtggcctagcaggtggcaccccaccctgacgaacacaccacctaggaagagcccaaacattgggaaggttctctttcctccgggagccattgagccctttggggaccttctcccctccttggattgtcactgttgcacaaatggcatcctctccagaggcctcatcctgcttctcctctgccctaggatcatgcggccagatgatgccaacgtggccggcaatgtccacggggggaccatcctgaagatgatcgaggaggcaggcgccatcatcagcacccggcattgcaacagccagaacggggtaagggtctgggccccatacctctgggccctggaggccgcaccagtgtgagttcaggacaggagttccccggggagccaggcctgcagccttccctccccttgtgcactgggccttgggaactgtgggagaagtggcccaagtatttctgcaccggaccctcagagctatgcttggttttggcctcagccaggaggtgtaggaacccaccagagatgaagcgtcaagcaagctgacaggccctccctccaccactccccgccatgccgagtcccccgccaacctggccctgatcagaagcatgccccgcctccgtggggtggagtttattgtgatggccaacagctgagacataagaggccagacagcagatgtaggagaggtcccacctctgccctgaccaaccctggtggccatggcaccatagcaagtgccgtggctctctgtgacttggccacttcctggctttgaagctcacaggcctggtaccactgtgccca

SEQ ID NO: 5922 - DNA, 1114 bp, Homo sapiens
ttgcagtccagcctgggcaacaagagtgaaactctgtctaaaaaaaaaaaaaaagaaagaaaattagaggctatatgtgaagggcctcttagaacagagtcattgctgtattgctataagacacacatggctattcattgccctttcattgggatagaagccctgtgagggtggggatgtttgtctgttttgtttacagatatgtcccaaatcactggaacaagcccagcagttagcagatttgtgtgttcgctgaatgaatggccatgttaggacataattggcattagccatttatgtgaaagtgagcatgtctttgtgttaagttgaaagcttagatttccaaaaaatggaattagagtgttcctgtaggtaggatggtctcagatttcctaaggttctttgtcagtgataacggctgaaacaaaaccctcaccaccttttaagtagccaggattgatcactcaccttactcatctgattactcatctttatctttttaggaccacctttcactcacctgaggactccacagaagatggtatattatgggaaaccttcttgtaaaaacaactatgagaattatattgacatagtgaaatatgtgttcagcgcttacaagagagagtcccctctcatcgtcaacactatgggatgggtttcaggtaagcctgcatgtgcacatctgcaagggaaggacaggcagtgtgagtactgttggtttcagacattcacgttaaagcccagtgttttgttttttgtttttaattgaggcagggtctcactctgtcgcccaggctggagtgcaatggcgtgatctcggctcactgcatcctctgcctcccaggctcaaacaatcctcccacctcagcttccagagtagctgggaccacaggcgtgtgccactctgcccagctaatttttgtagttttagtaaagatggggttttgccatgttggccatgctgatcttgaacttctggcctcaagtgatccgcccaccttggcctgtcaaggcatgctgggattacaaacatgagccactgtgcccagccgaagtccaacgtattgatggtttctttgtcttagaacaaatgcatccatttgtcgtagga

SEQ ID NO: 5923 - DNA, 1168 bp, Homo sapiens
atcctcttctgtggtgagctggttccaactgagccttacctgcctcagcaagggcctgctcttcctttccttgggttgctttcccagtcctggacttcacagacctgtcttctccctcctttcaactctgtttgcatatgttctgtccgtgtgtttttgctttatgttttcagaggttgccttgacttgattctacatcactcacctggtctagagccagggcctcctgctgaatgtttcctgtgcagtcatgtcttaccaggcattttctttttctctggagtctcctgcggaggcagtgaaggctcgagagaaagcagaaactgaaaatagacgtggataacttcaggaatacagttggcaacacttgttgatgggttggattttggggcaggagacaaagggaggaaacaatttatcttctctggctcacaactgtgtgaggcttgattaatttagtactgaagaaaaaaatatgcattttttcaccttaaagtttaaattgttgatttcagagtccaactccccagattaaacctgaatatttagccttgaggtctgttggcatcagaagagagaaaaaaaggaaaggccttcagttaactgagagtaccctttcagccctggaagagttagtcaatgtttcctgtggtgagtaatacacattgatcaccctgaatgtctgtccaccagacccccagaggaagattagtcataattcgagtccaaggaagacggctaattctagcgatcaatgtttgtttcccattcagaagaagtagatggctgccctgtcattctagtttgtggatcccaggatgttggaaagtcaacatttaatagatacctgattaaccatttgttaaataggtaagagtgcttttcttatggctttgacacattgctaggtttttgtcatgaagtgggatttttgatttggagggaatgcttcttggcttctagctagagattacatacaggtctaaagctgcccagctgaagcatctggtcctcactgccgtctgctttgcagtatgtgacaatgctctagcgtaggctgactttgccttacctgcaggcagacttccaagaggagacacttggtctcagagtctgtatttataagttctggggtggggggcggggggggggtgcgtgtgtgcgtgcg

SEQ ID NO: 5924 - DNA, 1076 bp, Homo sapiens
tggtctgcgaggccttgcccctgtggaactctgggttcctgttttctcagtcttttttgcggctttgctgtggttggcagctgccgtactccaggcttgtgtcggccactcagatgagggctgtggtgcgagccagtgcaggagagctgcgcttgggattgtgccctctcctgtgtctgtcctccggacctacccaggtctccaccatcaggaccctgtctttgggtttagaagaccaagtatggggaaaaccaggcaccagcctctgcagcaatgggtccctctagcctgtggacaccagctgggggatccagggtcaggccccctcctctccccagtttccctctgctgtgggttctgggctgtcatgtctccaccacttaaggatgtctttacactgacttcaggatagatgctgggatgcctgggcatggccacatgttacatgtacagaactttgtctacagcacaaattaagttatataaacacagtgactggtatttaatgctgatctactataaggtattctatatttatatgacttcagagacgcgtatgtaataaaggacgccctccctccagtgtccacatccagttcaccccagagggtcgggcaggttgacatatttatttttgtctattctgtaggcttccatgtccagaatcctgcttaaggttttagggtaccttcagtactttttgcaataaaagtatttcctatccatttggagtcattgcctttgtcctcctgctactgtcttctgggactcttgggctgaggacagatgtcaggggaacaggcagcatggagcccagggttcacactgagggtcttaaacagccttccaggccctttctcatctcagattgtagcaagtgatgaagcgttggaaaagacatgccccagaggctgggtgtggtggctcacacctgcaatcccagtgctttgggaggctgaagagggaggatcacttgagcccaggggttcaagaccaccctgagcaatacgggaagaccttgtctccatttaaagagagaggcctgagaagtaaatgctgtggaacagatgatgccc

SEQ ID NO: 5925 - DNA, 1240 bp, Homo sapiens
aaagggaagaatgctcaagcaagtcatgtttgttttcagtgggatgggcccgcgttctcactgctgggggcttccccttcatgtggcacctttgtgccaggccaccaggcagactcttcccaccttctcccactgaagcaccaaggggcttgaaccgtaatttggctaatcagaggcattttttttgtcctagtatctttcacacttgtccaaccgtcttatttttttaaaagttctgttgcttgtattaacacgaaactagagagaaatagtttctgaagccagtttattgtgaagatccccaagggggaggttcggtagagaaaaatagtaagctggtttagaaactgacgagggcaaacagccaggacgcattggagaggaatttgccaaagatctaccctgagataacgcctgtccagtgtcttcaccacgtgaataaccagcgctccaaagtgtttttctgctttgaaaaaaaaaaattccacaagcttttaaaggtgcatttaagaatccatgtgactttagaatggaactgccggccctggcaactgtcacgtgtgctagaaggttcgatgcctctggaatgcatgtgatactcatctccattttgtttccttgattgcatttttgttcttttagcagatctgtccctgtgggtggtgtctaagaagtcggacaccttggtttttgtgttagattgagctgggcagctgcaatcagcttctttatatgcaaattaggcacgacccatctgtggttcctggttggtggctaatgaagtgaggggagggagggatgtcaccccaaaagtaggccctcccattggctttggccaggccagacacttcacatcgtttacatggttctgtgtaattttaaagtttatgtgtataaagcgaagctgtttctgtgaaactgtatattttgtaaataaatatattgctactttgaggttcatgattcaaggttcaggcgattgcgttctgtgctgaaggacaattgtgtttcttttctccttgctacctccccaaagcatgattacatcaagtctctgggaaggcagcgtctcagtgtgcacttagcaggatggaaaatgcccacggtgttaaggtaccttgctggtgaattccttagaaacaaaccacaggacgagtagatgtgaatggtttttgcagtttcttcatcagattgaggattagctcaagccccagtgagtggttagcctacttttgatttt

SEQ ID NO: 5926 - DNA, 1505 bp, Homo sapiens
cctcgaagcggctgctcagtgtgtgggctgccagccaccttccaccttcctcagctgcccacctgggagcagagacgccaactagcccttgacccatgattcactcagagcccatgatttgtgccctaaaaggggggctggggccctttcacaggtagaattagagtgagcgcgttggaaactgcggcttgagtggcgggggatgaaagcagacctctacgttccagcagcagttgattttcagcagcgggtgctctgcctcgcctgggcccagccagctgctggtccgggtgactgctgagccccatcagtagaaaggtgcatgggaatggccaccttctgatcacctgcgtctgtcttttcctttacagcccacaggatcgatacagatggataaactgccaagaaccagatttttaaaaggccgcaaaaaatcttttcctgggagtctacaaatttggaaatgaaaaaacccagacatcagatgtttttattttatattattattatagaaggtggtaccattatcaattatgtgaagggacatgcagacaccccagcttttgagggtgctgggggtaggactgaggcagccccactgggaaccagactgcagcctggcccatggctgttttcccaaggatcagttcctggagggaagggctctggccctgactccgctgtgtcccgagcacacgtgctgaccgcagcccgccgccctgtagttcttggctgggtctggaggtgtctgtggagcaccctgccctcaccacaggagcgtgagccacttctgcagtccacgctgaacatgggaaacaacctgaaaagcaggcaggcctcccggtcagggagcctctgctgtgctggcttcccatgaccacctcctcttgctgaaatattactgcttgaatctggagcagattgcgggtttataaaactgctttttatctgagaacaaacgggtttggaaattagtcgtcttttttccccactcccagagctgctcaagtcattccaccggccccctcggcttgggacagggtagtgtaactcccgatcccagggcctagccctgacacaggtggcttcccgtatcccggtgggaaaacgccctgccaccagcgggcttgagctggcctgtgtccctccaccgcctgcaccacccacctccagagtgcagtgctgggcaagggcagctcaagaggacaggaccaggcgcttggcaagacatcagacacacccaacccaaaggcgtggaccccaggcccggcccgtggtacccagcaggtggcactgcagctccccgctcctgcaggtccagcgtcctcacaggaacaccagggcctgtgctccggagccttccttcagacccttcctccacgtgcccacttgggatgcagaatgcagcggagctaggaccccctccacggcctggacctcggctgcagtaaagttacgtgaggcctgtctctcggggcctggaagtggcagccatcagttgctct

SEQ ID NO: 5927 - DNA, 1503 bp, Homo sapiens
ggagtgaaaaaataaatgatatgtaagcaaacaaatgagtgaaataaatgttatataaaggaaatgatctcttctagaaatcatcaggtagactgattattaggtagtcagacataccatctagtctgaaagtaattattttttctctaactcatttagaagagttacattttgatgaaatacattaattatgtagatatgtatatgtaaatcaagttaattaaaatgatgattttatgttcagacctagaaaggccagcttctgtattacctgagtagctaactgcaggcttaaatcccttatatttataagatttgtgatttgcttttgaaaggataaatctcttttatagtctaggggatgaagtagtatttacgaacaaaatagtcatatattactataattcttcttacctaagaaacttaacattttttcaactgcttaataaaagatttttgggctttgtgaggttaattttataatttttatgtgcttcatcaaaacatggggaaagaaccttttaaaataactttcggttatgggcagctgcggggattttccctgttcactcacatgtcagggagcacaagcccgatcctgttttaaatcctcttgaccagattcctgctgccatcaatctgataaatgggtaaatgagtattattaactaagaggaatagtggggcctctgatgctcttggtctcacattgactaaactgagctgctatttctgactttgtcagtgtactttaaaggagattttatctattattttctctaaatttattgttttcttctttgtagatgatcatgggaacagcaatagtagtcatgtaaaaatctttttaccgaaaaagctgcttgaatgtctgccgaaatgttcaagtttaccaaaagagaggcaccgctggaacactaatgaggtagataagtttctttttttaagggtataattattttaagggcaaattttttaggttgcttcacatagtcctactttatgttagctttaaatttaaaatactgatctaggaaattgtaaatgacattatttaatctggatttgacagaaaccaaccaacatgttttttgatctgtctctgatctgcttggcttgcattgaaagatacacaatgtgcacgttgacttaactaaagtagcatgagtttctgtctgtgttttcttgcattttagtgtcttgcatttagtggttaaccctgcctgcatgccagttaaacgttagttgttatgtcttcatgaattaataaatatacagtcccactgttccacagaatgtgtagtgtcttgacaatgtgaatttttgtagagttggaaagggcaggtttcataggagtgaaacagcttttcgtcctttctaatgaagaaagtttgcttaatgctaagaatttttattaagattgaaggctgtacagtagattatgtatttagcatccaattagaaagtagatttatgaagtagaatgaaaaaagttaatcatct

SEQ ID NO: 5928 - DNA, 1214 bp, Homo sapiens
gtaatgcttagatgttcttttactgccaaccagagatattatttctttttctttttcttttctttttttttttttgagacggagcttcactctgttgcccaggctggagtgcaatggtgcaatcttggctcactgcaacctctgcctcccaggttcaagcaattctgctgcctcagcctcccgagtagctgggactacaggcatgtgccaccatgcctagctaacttttgtatttttagtagagacggggtttcaccatgttggtcaggctggtctcgaactcctgaattcaggggatccacccacctcagcctcccaaagtgctgggattacaggcgtgtgccactgcctgaaatattctttagtatatttctccctgacacttttctgggcccaagtttatggcagaaactaagccaaggagaaaaagaaagagctgtcaggcatttcattgtcttaattgcggagcacagatattagtgtcagtgagtctctgcgtggtagagctggtggtcagagtggacctaaagccagaaatcacagcatgagccaatgaaactgctgaatatactcagcctcttggtttctccaacttctgaggctgtctctagcacaggtgtcttcatgaggtccctggttgccctctgaaactatgatttgatttcctgcatgttctccttcttgctgccgtccatgaatccgagacctgctttcatggttatcctttctcctgatgtttctctgatcatcataactcttggctgccatgccccactctggcctccctggagcactgtccattcacatgcccaacctgttgaacagaggatccttggtattattgtgagtcattttctgaccccacagccctgctttagagtatttctttttgcctgtcctttgcacgtgctcagtaagtgtttggactgtcagaggtaggtggataggcaaaaatctctgcactcatggtgtttatattctaatggagcagagagacaatacgcaaattgtatattgtacaaaaatgcgacatgttgtcagataagtactaagaaggaaaatatagcagagtaaaaagacagagagtgatatggcacaatttcagagacatttgaaagtggaaagtgttattgatttggaatgaggtctagattcaaatcctgattcccttaccctctaggacaactaacttaacccctatgagcctcagtttc

SEQ ID NO: 5929 - DNA, 1115 bp, Homo sapiens
ctagcatgtagctaatattaagatcttcttgtgcaaagggctcccctatcacagttgaacatacagtgtcataaaactgggccaaggcagcttccggggctttgcatgtgtggaactgccagtgttttcatctcccccgggggatgtctctcttgttcctcccctgacattcccaggagatccctaattaaagctacagatacggtttaaaaatatactcaccagatgttagtttaaaatgacctataactggcagcagagatggaagaggctgacggtgtctgaggccttccggtcgccttttcctaggctgtcattcggtatgcaaatgaagcccagcagaatctgagagccagctctgccaagccataaaaccaactgttttgaaagcaatgcatcagtaattcttatcacctggcatctggagtgcgggaaagctcccttcctaactagaacatgtcatagcatgacttaggaggaagctctcattttgcactccgcggacaatttaaactgatgaatctgcttgctgaagctcatacagatccctttaggacaaaccattttttaaaccaaatccaggctctgagacacccctgctatgactttactggacctatatactacggagaagagggcttgtttggcagcacagcttttgtgtgtgtgtgtgtggggggggggggggggggtgggggtggggggtgtcagaccccgaggctacccttctggggttttgtttagattcttctgtgcaagttcccaccaagttttcagtgagttagactttcagggtaatcccggtttgccttgcaaagctgaggaaatgaggaatgtcatgggtatcaatatctttcctgagaactgaaatttaccagtagcacattcctatcgggcatttatcaaaacaaacatataggtcaaatgaccgtttactcagcagccacctgtcagtgccttgggacgtcagcagtcccggggatgcccgtcaaagcagctgagtgatctcggccctgaacattgccaacttcccgcctgatgccctggagctgaggctccagcttgaggcttcccagtgctttggataaaaagatgggtctgcacctgagagccat

SEQ ID NO: 5930 - DNA, 1209 bp, Homo sapiens
gcagatcgaagaaggcagcattcccaactgccctcccgaatggacggccactttggggtgggcgccaggcagttaagcctgctggtggcctctacttcctcctgccgtggcgccgctcaagcataccccagcccatctgcagatcaggtccccttaggtgaattcctgcccctgctcccttgccaagtgtctcccactcccagtaagcccttccttcaaactgcctcttccctgcagatctttgagaccaactctctaaggcttttctgatgcctaagcccctggagaccacccttacctcctcctgccccatccccaagctcccaaagtcctatgtcatctgtgcagaggccctttgcacatgcagcatgggagccactcatcctaccagactctaggacccccgaaggcagcgactgtaatgctggtgccaggggaacaacctgggccctgagccaggcagaggcaaccctggtccccaagaagcctgcagtcagttctggagaacaagacataaacctgggaagatgatcgaacaacgctgacaaagtggactagaaacaaggctgaccagcgcagagcccaggggccctgggaagagccggagctgtgagaaccgctgttggctgtgggtatgctaggtgccaggagcatccgtattctcttttaagcctcacccagccttgtgagctaaacataacatccctattccacagacccagaaacaggcccagagagggaaagtgacctccccaaggtcacacagccggaaagtactgaagtcaggttttgaattcaggtctaactataaattggtgtcccagggagttcaatccaggaggcctttctgtgggtgtttaacataatttagaggatctgagggaatgggaggagcatgttccggtagcggccagggaattgaggcacagagaccattctatgcagcagaagacaagtgagaggtggctgcgtggcatgagaagtcagggctgtctgggagaggaagcatcctggtggggtcaccacggggccaggatgctgaggggccagggccagtgctctgcctccgtccgggcctcagcccacctctggtgctggggtggtccgtcctgagcaagccttgggaagggaatctggctgctccccacacagcagctgcctttctgttgtctgagctccactcagttgaacaaaatttgccgtccccct

SEQ ID NO: 5931 - DNA, 2528 bp, Homo sapiens
tatatgagaaccgaaacatgacttctttcattgatagatggatgttagtggatgtttccttttagcaggaaggtacagttacttggatccttttgactctagtctccttcctctagccctctatagaatggagagaagccagtagtaggaaatcagcccagtctaatttctgatcacatttagactgcagcattggatgttggcttgggattcacactgagagactaacctgctgtttcccctgcctttttgcatctctcctccttcttagtgtgggttgtctcttcatgaagaaccagcggaactcaaaactgctgttcaagaaacctcttcaagacttttgacttagaacctgctatattatcaagcttacctactgttatctctaaaattttttttgtgttaatgtaaagttgaatttctaggaaacgtgcctttgttttttaatatgcactccaaattagaaggccggccccgtccacattttgcacagtgcctttacagatttacgtatgggctgatgaagaggccttcttaagttccagagtgctataatctagatgtaatgttgtcactaattaattgccattactcccagttagttacccttgtcatttggcattattttcagaaccacattttaaacctttgggtaatcagatttccaacttatgccttccagaaaaaaacactactgcctaacacaaatctgtgataacaacaggctgtgccttattttgataattttctgattccctagaagagaaccctctactttttgtaagcactactgactctcgctgtatttaagatgctggtgaagagcttttgctcttgcattagatttgaagatgtttacattgttgttattgttatgtatcacttgctaaaaatattgttttaatcagagataacctctttaaaaaaatttttaaagaactatggctatgaccaaagcttctattttgccaaaaagttaaataccgataaaatggccttaagtgtattcctgacagttaaattcagaaacgtgccaaatggaactcaaggtgccccttcagaattaaaatcattaccttgtgtgtgaaccttctacatcttcataggcctttcttccttttgaaaggctgtagacagtgtggctccccttctgattcagtattttgcatgggggttagagaaggtttgaggtagactctgaccgtctcataaaagagttctacccagcagttggcagattatcagctgtggactccagcatgtttctgataattatgcaagcaacaattctgtagcctcaagtaagaccacctgtgaacttgatcattatctggcccaaatatgaagataaactataactttggagtttgtttcctatttgtattcacattctgcttcctaaatcagttttctaaattatgcctgcaattaggcattggtcaggggtgaatggctcttttcacagagagtagccaaccagagacctttgctttgatatcatcaactgcagagaatgctgttgatgggaatgctggaagcagaaactttgtcatcggaaaaacttttcttgtatgcatgagactcaacatcaggatccacagcttaaagatgggaattcaggtatgaaagaaaacaggcaaggaggcactgagggagaaagacacagactttatcgctctgtggctcattgttactggaatattctaaaactcttgttcacatgctattatgacttataaagcagcaacagctgaggcgcaccaggacacagcttccatttctttaacgtctgttcccttaacatcgctgaaatgatttactgttgaagagatgccttgcggtgtggccagctgtgaggagaaagcagctggcagtgttaggacattagtccaccttcagcgcagggtctctggccgggtctgactcagaaaccttggtactcgccccttggccacagtgcccagacccatgtaacccactggctcctgcattaacccagaaatacctcgcttctatctgtgcacttagctgggaacttacccactgtaatcacctaaataaagtgtttataaacatgattgtggcacctgtgctccttgtagaggaatagctgcacctggtccgagtcctaaaaatgccattccttgctgctccccatacctgtcccttagaagccccgaaactgtctcccccttttctcaccagcccctctctaggtactctacccttttggtacccagcatttccgcataccccagtgaacagaagaaaaccgctccccttgtgaaaagtgctttttagtataggcgatgaggaggaaactggcttttacacaattaccaaaattcaggatgtggctttggagttccctaaatagatggtctttctaaagtgatgtgcagagccgaccccgtctgtggtagactagatggctgctggcatggaccctgggatagatgagtggataggtgagggacatccccagacacatggctctgttcctgtagatccttttttcctcatgaatg

SEQ ID NO: 5932 - DNA, 1156 bp, Homo sapiens
aagtgttcagacatttaacactgttgacccccacacacaattttttagtacagttataactaagaaaacaaaaatcccctccaaaaaattacaagttaattgcgaaagaccacatttaaatttttgcccatgaaattcagtttagtcgtttctctgaaacagtgcttcaaaaaagactgtttccccgcattgtgtgaaatgcaggagacccacgtacttgtatttttaaaaaacccatttgcaacatactattaaagttggatttaagagaacatggtagaagaaaatctaagcaatactacaccttttagcaccctcattatgttttcatctcagagcaattaaaactgctatacaaatcaacgttaagataactaaactgctgcttttttcgtattcagttgtctatgaaaaccgtttccctaggaagtacttactctgcttgaaaatgctcctaaactttaaattttggggtatctcagggttgcaatgaaagttttttgaaatctttttttttttttttttttaaggcttgtaaacatataacataaaaatggcttccaaaagagctctggtcatcctggctaaaggagcagaggaaatggagacggtcatccctgtagatgtcatgaggcgagctggggtaagtcccacatcgatttttagccattcctgttttaaatgtttttggatttttaaatcattttgaataaaatattcaaagtgctctatgaaatatttcaaatatacacaaaatttcagagatgacataagaataaatacctgttgatccactgctcacatttaacgcttgttaatgtcttgccatatttccttcagacccatttctcttttgttttgagctctgtcgtccaggctggagtgcgatggcaggatcttggctcatttcggtctctgcctcctgggcccaaaccatcttcccacctcagcctcccaaatagctgagactacagatgcgtgccaccacacctggctaatttttgtatgttttgtagagacagggttttgccatgttgcccaggctgctctccaactcctgagctcaagttgtccacccgcctcaggcctcccaaagtgttaggactacaggcgtgagccactgcactgtccttagacccatttcttttttcttctt

SEQ ID NO: 5933 - DNA, 1264 bp, Homo sapiens
ttccccggcacttcagaattgacacttgagctttgttgtaaatagtgatgtgagtaactgtcattcaccgacatctcccccaacacttaaagtcttagcagctgcatttaactcacgcatatttgtttcattctaacagtggtttctgtcaccctttgctctgcacagttttaaaaatacctttgtagggggcttctaagagcttggagtgcctagtaaatgtttttgaatggttagctacagtgttgggtttatatgctgtaatagtgaatttaattggtaagtaatcgtctttctcgtcacatagcccattaggatgtcaccttttctgtttctactttgcaggtcattacacctactctgagaatcgtgtggaaaaagacggcctgattcttacaagccgggggcctgggaccagcttcgagtttgcgcttgcaattgttgaagccctgaatggcaaggaggtggcggctcaagtgaaggctccacttgttcttaaagactagagcagcgaactgcgacgatcacttagagaaacaggccgttaggaatccattctcactgtgttcgctctaaacaaaacagtggtaggttaatgtgttcagaagtcgctgtccttactacttttgcggaagtatggaagtcacaactacacagagatttctcagcctacaaattgtgtctatacatttctaagccttgtttgcagaataaacagggcatttagcaaactactgattgtttcttgttttgtctctcatttcttttgtgaaattaaattccgtatcaccttcatttgcagctcttaactgtccatatggcactgaaataaaagaacagtgaccacattttacacagcaaggaggaaaggcatacaaacagaatttaagaggcttgtgattttctctgcttattagctgtgtgtttttaatgtgctattaaaaaataccaatgagggctgggtgtggtggctcatgcctgtaatcccagcactttaggaaaccgagccaggaggattgcttgaggccaggagttcaagaccagcctgggcaacatagcaagtctccatctctacaaaaaaatacaaaaactagccaggcatggtggcatgcacctgtagtcccagctacttaggagcctgaggtgagaggatcacttgagccccagggggtcaaggctacaatgagctgtgatcacaccaccgcaccccagcctgggtgtcacagcgagaccctgtctccaaaaaaaaaaaaaagaaaaaaag

SEQ ID NO: 5934 - DNA, 1313 bp, Homo sapiens
acatttccagtttctcttaaaaaccgtgtttggtttcagttgggataggcttgttttgtctgttgaaaatgtttctagttttttttctttcatttttctctcattccatttctgccttaactttagtttgttcacagggaggcaaagctgacatgaaccttttgtcgtgggacttcaggccacattggcttgaaggcattcgtttccttctggggtggggacaggccctcatggcaggcttgttcccgtggctctgagcgaggcctcttcctgctgggctcccagactcctgcatccaggcccccaccttctcggcttctggtttttctttctttttggtagaacacaacatctaccattcagttaaaccttctttatctcctcctttggcatccatttttccaaagaagagtcgagtcctctgaggtctgtgcttgaaagccgtccgaaggcattcttgttagctttgcttttctccccatatcccaaggcgaagcgctgagattcttccatctaaaaaaccctcgacccgaaaccctcaccagataaactacagtttgtttaggaggccctgaccttcatggtgtctttgaagcccaaccactcggtttccttcggattttcctccctttgttcggggtttggtttggctcctctgtgtgtgtccgtatcttgttcggtgtcctcgaggttgagcttcactccactgcggcagaggcagcgtgcacactcggatttgctacgtttctatatatcttgaagctaaatgtatatatgagtagtttgccatgagataacacagtgtaaacagtagacacccagaaatcgtgacttctgtgttctctccatttgagtattttgtaatttttttgaaatatttgtggacataaataaaaccaagctacactacaacccttgggtgtctcccgtgcactgtctcattcctggagagtgggcggggatcctggctgttaccccaggtggggaagggacagagggagagtcggctgttccctgctgctcgggaccctgtttgcatcccagagtggcttccagaaacatcctctgtctgggaagaggctttccctggtgagggtgctgtctttctttggaggctccccaagcagcgggatgggccctaagcaggcactggcattgggactaagagcatcttcccccaccccttgccattcaccccacacctctaatccgtgggcgttaccagcatgtatgggcatgtggcaccctgcctgctcaggagacacatcggaaccaccccatcctagcggcctcctgcctggcccccatctgcc

SEQ ID NO: 5935 - DNA, 1631 bp, Homo sapiens
tctttatatatttaaaaacccacaactaaaaatgtatccacatagtagtgttcgtttgtcgagaggatttcctgagactggtttggatctccctgcatgacagtcccccagaaacttagtgagtcctggactggactgaacatccagaaagcttccctgcaatcttggggtttggctttagttttcttttccttgatttctcagtaggtgctagaatccagttcacacccttcactgtgcgtgcagacacactgacacactccgccacgagtgctccagagcccacgaggcttgcagatcgggggcataggaatttggaatccaagagctataatttttaaaaaaaaaaatcttttattttaatacattgtaggaaatcttcataattggagaaagttctgcagcatggctttttacgtctgtaaataaataattttagaacagcctttttttcttccataaactactattgtgatctattttttccagccatgtcactaattgtgaattcctaccaactattgacagaatacagagttgattttttaataaaaagttatatataattatccctttaattaaagggagcaaaggggcgttccacatggacagaggcttggaccgaggcctggtcacagcagcgagcatccagggtttgcagggacgatgttacagactctgttttctgcctggcgtttcacttgtgtctgctcctagcctgtgctctgccagcagcacagacatctgctccatcagacctcttccattttgcacagggagtgcaggaggtgaatgttcactttctgttctccagtgtcactgttctgtttccacgggatggaaagcgcatgggcctgtgtccattgtagatttccttctagatttctgtgtacacacacttgattgttctggatgaatgtcttttttaatactccgaaaatttcatcatctaagaaaatgattccatacaaataactcagcacacaagtgacccaggacatatgcctgccaaagggatgtgttagaaggctgccttctcatgcgcattgtcacttggatcttgtggtgaggacggccccatctttcttgccacagattgaggccacttttgagcaagggagatcctggagttaagacaggtgttgggggcagcctgtattttaccctaggggcaggtctgcatggtgaccccacattgcactggtaaaccatttgagtcccactcttcatcctggaagtgggaactggagtcccacccacagtgcattcagaaagcatgctgtgtgggggctgcttctcaggaggccaggcccttctgagcggaaccgtcctggagagagcctgccctcgtttccaggctgcagccgtaacgcactttctcccaggctgagggcgggtgttctggggtgtctgccctctgtcggccctgcttcctgccaggacgtggcctcttccgatccttttctctcagacactggaggtctcttctgccattgtgctggtcccatcccaagaattgtaggacagagaccacactgggtcggcggacacaaagtccatccaggacccaggccgcagagggagcaggaagagatgctgatagtttgatctagaaaccagcagctactggc

SEQ ID NO: 5936 - DNA, 1216 bp, Homo sapiens
tcaagtgatacctactagtttggggagccaagtgtctgtccgtctgtcctgctggcagggcagcttagccatggacagcagaccctgagcctgagctctcaacggcacagcctggcgggaggatcctgccatcccgggctgcctccactgggctttctcttggaccccgcttctgctctatttaaggcctgtgccttgggacagctgatctcagctgcttactgtaactgtatcttggccaggacagctgttcctgggcactaaatttgggagcatttgtcagtgagaagggctgctttcttggaaagagagctgaatttcccattttgtatgcaccaagaactctgacccatggtttcttgccccaaagcagaaaaaaagtaactgatgtcagaactactggttggggcctgaacacctgttgatctttgtgttacagtccctgtgtagcagctgttgaagggaagttttctctgtacctacctgttttccaaacctgttgtcaccatctcttcccaggcctggagctgctgaagactgctattgggaaagctggctacactgataaggtggtcatcggcatggacgtagcggcctccgagttcttcaggtctgggaagtatgacctggacttcaagtctcccgatgaccccagcaggtacatctcgcctgaccagctggctgacctgtacaagtccttcatcaaggactacccaggtgagtgttccccgagtgccatctccctttcctgccactgacctgcagcagggcagctggagcatctggctggctggtgatggctgcaaggaggggatggggagggagtgtctgaacttccagctcccgtaggggattcaccactgggtttgcccccagttgtgcatacacagggcttcacagaggttcttgtgtagctaaggagctcgggtgccagcagcgacattgcataataagttgttcacagtcaggagcagaggcagtctgtgctccattagacaggtgagggaaccaagccttcagaatcagaacagccacttggtactgagatgtatcatgcttcctgtgagctgggaatattcattttaggctgtgtgtgtgcacaggatagagactgtgaccacctttctacaggagaggaagctgatggctggctgaataatctgcccgagagcacacagcaaatggtggggcaagaattcagaccaggaaatctgac

SEQ ID NO: 5937 - DNA, 1139 bp, Homo sapiens
tagcggatgatctaagggccagggcggtctgagttggctagtgcaccggggattttcttaaggcctttgacccggggactggtgtgggaggaaggcaaaggcctggttgtttatgagcaaggaggagtcaggtccgaggatggagcccttcggggtcactgccctgggccctgcccctctcctgcacatcaggccccttggacaaggcccgtgtgtttgcaggaccctcttggggcagcagagcaagggctggctttgagagagagcctcacttttttgtttttttttttttttttttttttaagtagagacggggtttctccatgttggtcaggccagtcttgaactcctcacctcaggtgatctgccctcctcggcctcccaaagtgctgggattacaggcgtgagcgaccgcgctcggccagggcttcactttcaagctcagtgctgctctgaggggtggacacagccctgatgtcagtagctgaagacctgcctggccacactcagcagcagttagccttctcctcccgcgccccgtgaacaaggctgtaccctgggaggttgggctctgtctgaattccatcacaggtcctctcctgggccttgccctgctttgttgcctccttaggaggatgtcttctggtttcctaggaagggctttatatcttaacatccaccctgcattcaaaacccaagttatcaagaccacagggcaccacaaccctcctcttggccttgcggtttctattcttcagtgactcccagaggtttggcttgattggcagcttagaagcacatgattgaacttgagcagtggttgaaactcagagtcagatgcctgacccgccccaatcccaggcacagagtctgacctcacacccaggctgtgctgtgtactcagttgttcagtatcgacttgagcttgacgggcatcaggggccagggagtgaaagggaagagaagccaaatctggctgctaagggctctcagtcctggagggcaggaaaatagtggccttgccgctagacctgatgccacctgcccctccagctgtaccccctcaacaccttgggtaatacctcaagccccacgtcctcttccaagccagataggaccccaagtgctgggtgatcctt

SEQ ID NO: 5938 - DNA, 1224 bp, Homo sapiens
caggcctgcggccctccctggtggcctttgccgctttcctatgctcctggcagcaaagtggttcatctctagcaagtggtctctaactttcccaggcagagtccctgtctacagggcaggctccctacccactgacttcctggaacagaagccaagctgtcaggagggagggacaagctgtgggcttataacattttcttaagaaacacgtggtggtttcttgccaggcaggaagtgtttgtttccacatcgtagccacctgaaccatgtctgatccttccttgttcctcgtctgtctctctttgcaccccaggcacccaggcatgtggaatatgctcatagtggcgatgtgcttggcccttctgggctgcctgcaagcccaggagctccagggacatgtctccataatcctgctgggagcaactggggacctggctaagaagtacttatggcagggactgttccagctgtacctggatgaagcggggaggggtcacagttttagcttccatggagctgctctgacagcccccaagcagggtcaagagctcatggccaaggccctggaatccctctcctgccccaaggacatggcacccagtcactgtgcagagcacaaggatcagttcctgcagctgagccagtaccgccaactgaagacggccgaggactatcaggccctgaacaaggacatcgaggcacagctccagcacgcaggcctccgggaggctggcaggatcttctacttctcagtgccacccttcgcctatgaagacattgcccgcaacatcaacagtagctgccggccaggcccgggcgcctggctgcgggttgtccttgagaaaccctttggccatgaccacttctcagcccagcagctggccacagaactcgggacctttttccaggaggaggagatgtaccgggtggaccattacttaggcaagcaggtgagcatcagcatggagcctgccagggctagggtgagctgggcgctggtagaccccagcaacaaagccgctcgctcattgtggagctaggccccaaggcattgtgaactcagagctcccatggtctccttgaaggtgggcaggaggcgagcgggtaaaggaaagacagcagcagggcaggactgttgggtccttgtccatgtgtctggcctcttttgtcctttgcaaagcccccgttctcgttgtttcccagtctgggctctggcttctcacg

SEQ ID NO: 5939 - DNA, 1150 bp, Homo sapiens
ggtggcacttgttagtctcatccaagggcaggatgcaggaacaaaagtcaagtaacttacccaagatcacatgctagtaagtggcagtcatactctggggtgctgcagcccccgccatggtgccatagcccccacagtgccgagcctcctactggcagtggccaggcagggcggggcgaggggctggccagtatctacagaggcaatctggcctttgctgggaatagagctttcttcatgtggatttctgtagaggctcacggatttgacgccttctcttacagtagttctcattgacagaggtggcttcaagacttcctccctcccttctcgtggtgaggttggctttggtgtgcaccatttttataggccctgtggactgggggaagaggatgcaggatgaatgtgcgggctggggttttggtgcacctcggggagatctgatgttctggcctctctttagatcctccccacttctccacctccctccaccaggccgcaccagcttctatgaggagtacggtgtcattcgcgacgtcctccagaaccatctgacggaggtcctcaccctcgtggccatggagctgccccacaatgtcagcagtgcggaggctgtgctgcggcacaagcttcaggtcttccaggcgctgcggggcctgcagaggggcagtgccgtcgtgggccagtaccagtcttacagtgagcaggtgcgcagagagctgcagaagccagacagcttccacagcctgacgccgaccttcgcaggtgggccctggggctgggcatggggcactgggctgcccacttcgccgggagcagctttccaaatgcagacgcccttgggtggagtggaggggacttgaggtgggatttcccccagggtgctcggaggcaaggatggcattcccctgtctccctggcctcctaccagcctaaagtggcaggccagctggtggtgccctcagggcgaaggacatcccaatggccatggcctcgtgtcagccccagttcagtcccagatgcttcccaagggtttgtcgtgcgaggctcagacagacctggttcctgcctcatagggtctccccagtgaggccgcaagccttttgcctggccacagctggagacacttccagcggccaagtgccatgcc

SEQ ID NO: 5940 - DNA, 1133 bp, Homo sapiens
accgccgcatgagccttagcctgcctctcatcaaccgcgccaagaaggtggcagtcctggtcatgggcaggatgaagcgtgagatcaccacgctggtgagccgggtgggccatgagcccaagaagtggcccatctcgggtgtcctgccgcactccggccagctggtgtggtacatggactacgacgccttcctgggatgagggcgcctgtgccccttgcccgcttcgctcctgtgctttccttcgcccgtgtcttccctcccttctcggccccgccacctgcccagcgtgccctggctctccagaaccttctatcccacagtcaggccccagagagggcaggacaagccttgtcccgatgcctttgaccggcagctctgtgtattggtggatagatgcagaaacaaggaagaaatggagtctgctcctgagaagcttcaaattcaggccaggagagaagtcttaagaaaagacctccagcagttacacattcatatcaaccagcacaacacgggatggcgcccaaactccggcgttcacaagaggagacgtgacgtggtgggctgaggttaatcagggaaggtttcctgggggaggtgatccttgaactggctcccggggaacattcagagcatgattggtagacagaagggtgcagaggcgcccaggggagtacattgccccgtgcaaagcaggggcattggggactgtcttgagaccctgagggggtcaagcccctccttccccagctgcccctccttctagaacctctgcacatctagcctctggccctcctcttcactgcctccacctgctcccgcttgccatccctgtctcctccatcctggctgtgcagtaggaattccaggctcctccctgtgtctttgctgttcttcagactccatttatagagaatgagggctgataacaggaatacagtggcaaagactagactgtggaaagggttccagaaatcttttttcttttttaattaaaaaaaatatttgcagagatgagctcttgctatgttgcccaggctggtctcaaactcctgggctcaagcgatcctcccatctcagcctcccagagtgctgggattacaggtgtgagctactgcgcccagccccagaaatc

SEQ ID NO: 5941 - DNA, 1112 bp, Homo sapiens
cattgtaactcagtcatgggagctgcctctttggaagtgcagatttattcctgtaataatcctgcctgcttttacctctcgtccactgaccagcaagtgtgagtcccggtgtcagtcggcacagtccagtgtccatctgcatttgctcatgcagagggggtgagttgggcactccctgttgttggttttccttttgcagcacactgggcagtctccctataaaacaaaaaccccaccttctgtgccttctgctttagagcagagctccccctcccatttcctcagtcttccctgcaaaatctgtccaccggggaaggcagcaggaaccctgggcagcgggtgttctgggaaggctagtgacagcagatgtcatccaggaacagccacacacggttctccaggccgccgtcagcagctcaaggtggggtatgagtgagaagctgaggatctcgcagcttgttgctgagcaaggtgcaaccgggctcatgctgtcatcagcacaagacgggatggcaagggctttcagacgcatttccaagagtccagcaagccagggggaagatgatccctttgccgaagtgtaccctctagccaacttttgggagcgcttctgtttgcaaagcgctggggatgtgcctgtctctgtgtgacccacgaacgggaagggagagcactggagtaatgacacttctgctgctgctttgattctcaaggctgatctttaaaaccctcgccttgctgacaggtgctttaaaggcagtctgcatcttttcttcccttggtgtgggagaggtaaacactttgatttgctgaaagctgtatggagtatatttgaacagctagtagttagctttgaaagtggaagtgtgaacagacactacttgtgtcgctttgggtccttcactttacccccacagaagtctagaggcgtctgttataaagcgttacggggcgcctgcatgcaggaggaaggacctgtattagctggaaatcatcaggaacccagcttgcctccatctctctgagatgtgctgggtacagcctgcccctcctagttctgtccaccgggaagagccggctggcggcagatccccaggggcagagcccctgct

SEQ ID NO: 5942 - DNA, 1182 bp, Homo sapiens
gtagtcaaggcagggggtggcggaagggccctttatgaaaacacaggtatgatatgatggctgttcctgtgtgttcccgagtcacccaaaaacagttcaaattatgtttgacattctcattttggcacagggtgaaaaagtgtggtctattctagaaacaaaaaaaaaaattaaaacttccaatgtgttgaagcttaaaggattagcatttatccagaacgaagaatgtaaaaggactttgtagatgtcttccccaaatctcactttcctcaattatttttgaacacctctgtcaccactaaatcatttctggagggacacacaggagcttcctgaacgtgcctgtggcaggttttggttttagcacaggcgaggacaagctttttagtacatggcagcatctttcccattttattttccgaaaatttttcaggtgttctggagggacgtataaagttgcactgtgatgatttctttataatgttctctttgttctaacagggctgtatactttgcatgttactccaaagccaaagagcaatttaatggcattttcgtgcctaacagcaatattgtgcatattttctcagctggctctgcaggtatgttaccctagtgagtgaagagagggtctctctctcacttttctaaagcatgcattgtgccagtttttccaggaattagaaattagctccttgcttcctttgcacctaaaattgtttttctaaagctttatgttacaaccaataggagagtgagagcggtttgtagcttgattttattttccttgaccactaaagctctttatttgccctcaaaatgtacatgttctatgcatgctactggtattttgttcttctaaaggaatattcataggtttttcatgtcttctgtttgcccatcaaatgatatagatagatagatatagatagatagatagatatagtttttttttttttttttttttttgagacagagtctcactctgtcacccaggctggactggagtgcagtggtgcaatctcggctcactgcagcctcctcctcccaagttaaagtggttcttgtgcctcagcctcctgagtagctgagattacaagtatttgccaccatgcctggctaatttttgcatttttagtagagacgaggtttcaccacattgcccgggctgatctcaaactc

SEQ ID NO: 5943 - DNA, 1151 bp, Homo sapiens
agacagagtcttgcttgctccgtggcccaggctggagtgtagtggcacgatcccgactcattgcgaccttcacctcccaggttcaagcgatcctcattcctcagccactctagtagtaggcgtgcaccaccttgcctggctaatttttgtttttcagtagagacggggtttcaccatgttggccaggctggtctccaactcctggcctcaagtgatccacccgcctcggcctcccaaagttctgggattacaggtgtgagccaccgcacccggcctaaccttgacagttttaaagttgtgtgctgtggattcgttccccatttaatatgtggcgtaaagtaggtctttctctctctgcagaagtcataaggacgaggctccgggaagagggcaccaagtacaagtcttttgtccagacggcgcgcctggtgttccgggaagaaggctaccttgccttttatagaggactgtttgcccagcttatccggcagatcccaaatactgccattgtgttgtctacttatgagttaattgtgtacctgttagaagaccgtactcagtaacaggccggaaaattgtgctctagaagaataaaactgaaaaactctagagaattttttttccccattgatgtttagaaagtttgagactgaaacaggaaaggccataaaatatctggttcatatcacctgttggacatttccttttggattcatgctttctggaaggtttaaattcattaacgttaatagttaattataactttttttttaacttaagaggattcagggttaagcaccaactaaattaaatcatgctatttaatttaagtatacatttggcttgtgtcctcttttatgctcactatactatgaaggacttaagtaattcagataaacctgccctagaactgcagagaaaaatgataaagtgagaatacaacttgttttataatctgactttaagatcttgcactgctagacagggaagaagtgtcgcattttggctgggcactgtggctcacgcccgtaatcccagcactttgggaggccgaggcagatggatcacgtgaagtcaggagttccagaccagcctggccaacatggcgaaaccctgtctctactaaaaatacaaaaattagccggacgtgt

SEQ ID NO: 5944 - DNA, 2687 bp, Homo sapiens
ctacagccccaggtcctggcccagtccctccactgcctcgaagagtcagtctgccctgccttttcctttcgggcaccaccagccatccccgagtgccctgtagccactcaccactgctgccacctctctggccaatggccctttcactggcctggtgactggaatgtgggcagcgcccacacaggctctggcccatggcttcctactggcagctccaggcacccccctctcaccacgccgtttgctggctctgacactgttgggtgagggtcctggtcctgctgtcttcccttctggcctctgcacaggggtggtgacagtggctacaggctgggcccctggcgtgccctgaccgtgcagcagagtgaggctggggcagcagagagccccagcctcacccctgaggagcacctgtggtctgtccccttggtcctgcttatggctggaccggccctgcaggaggtggtggagccgtgaaggaggccgagctgcagctctggctgctgcttggcctcctgctccaagaccctcccgagtccccggaaatggagagtgcagttcttgggcccagcctggccttcgccatgagtttggggagcgagaccccacctgagacaggcagtaggagcctgtgctgaccttggggaatctgagcttttccaagggtaaggggcccagggtatgcaggccttcagtgacatcaggtcgttgtcatcctttccctccctgacctgtcacgagcctctgcaggtgcctgctcaccatggcccagcgccactctgtcctccgactcaggtgagggggcagcccacagacctgctcctcagtagcagggcctggccaggcccctgctgttctcagcctcagtttgccatctatgaaatgaggtggacccctctccatagcccttgggtgccagctcagtgggtgtggggatcacatgaggtggctcatgaggacacactctggaagtcgaggggctgccacgtgcagaggaagttcccggcctgggggctttatccaggggtcccagtcgagagtggcccgaggccgtccctcaccgggcatgttccctctggctgcccactccctcagggcccacatgtcctgccactcgccactctgagcacgagttcaccttccagatgtggccagggtgtgccagctcctctctcctgtgcgttggaaccccgggggaggcaagagcagatcacaggtgcatgagggttacacccgtcacctgggtctgccgggatgggttgggggggcaggtgccaggcctcactgctgtgaatctgccacgcctgggggtcctagaggctgccccaccccagtgattgggtagcagctcacatcccacccagcttcacaagtgaggaacccaggtgcatcgggagaccctcgggggcttctgtggcctctgtgcccgatgacctgcgtggcttcagacaaggccccagcgttactgggctcagcttgttgttctgtgtggagcgtgaggtgagaaaacccctctgaaaagatgtggtcggggccacgcttcccactggttctgcagtgaggagttggggcgggtgagccaaagcggccccccatggtgtctacctgaggggcagggaaccgcctgcctgtgcactcacgccaccccccagcccacaaagagcccatctgagagaaggacgtggtggagccaggacgggaaagcgtcctgtcggctggccatgctgttgcttgcgtctcgaatcttcggttctcgaggaagtgttgacagtgtgatgctaatgtctgcttttcttggcgttgggtagaagcaggacatctgtgtgtatgtgcgtatttaaattagattatttataataaccagagccagccctcgcgctggccaggatcctcctgccgagctgatgtcgctcctgccctctgccggggtccggaagcgacatctcaggaggtagctctcagcagagtgaggattcctgcctttcgtagagttttgtgtgactttttaaattattcatgtgtcccttaaaagtttcactacgtggagaaaattccagcaccaagtgttgtggcaacagctgagagagtgcaggcaccactgtgttgtggcttgttgaccgggaatgtgtcacccctgccagggaactcttctcctcgcgggggacttgggatggccatcagaccttctagggtctggctggggtcatcctaggtatgggtgaccgtccctgagacataagcgaggtagattcagccatcctcaccctcagacttgaggtccccacccaggccaagccggccccccgtaccccttgcctgggagcaaaccgccaggacgcagcctccacgccgcacctgccacattcagccctgcccaggaaggaacacatgacccttctgtctgtgactgttgctgagtctctgtctcatgtcgtagaattgtggataattgtctagtgaccctctcatcactgtaaccatcgcgcctggcctagatgtcgtgttttggatgctgtgttttcaataaatgcctctggggccctgcttttacccgctggcgtcaggtgccgcgtctttcttcttttttctttctttcagaagggctctgtgccagggctggggtgggcagctgtgtttggggtacagacacgtccacaggagtcaggtttgggagccagtgacaatga

SEQ ID NO: 5945 - DNA, 2342 bp, Homo sapiens
gctgctttgtatgtgggtgactccgtgggtgctgactggagctttgttttcccttcacttctaatataacttccggtgccgtcctggctgctctgtcgctggggagggagacgctggggcaagttctccttcctctgtggctgtcgagaggagaatgccaggtgacggggctgtgggcagggccggactcatgtggccgtcacttctccttgccagacctatgaggaccagcacagcagtgaggaggaggaggaagaggaagaggaagaggaaagcgaggacggcgaagaagaggatgacatcaccagcgccgagtcggagagcagcgaggaggaggagggggagcagggcgacccccagaacgcaacccggcagcagcagctggagtgggatgactccaccctcagctactgacccgtgcccccggccacctcggtttctgctttcgaagactctgctgccatccgttctcccagtcccaagggtccacgatgtacaaagtcatttcggccagtaggtgtgcagacccctccccgccacgatcgtcgctgtgcttggtgtgtaggaccctaggctccccgcccaccctctgcctggtcgcgctcttcagtcccacgaggagctgacacgtcctctctggccgccatccggctcgcacaggggcctcccagcgcctcaggccccgcgtttgtgtctggagtctccccccggggagaggacactggcccctcgcactccagaaaagccatgccagctgggctcgttgacaaagggtaaaacatgctcactcccacccggtaatcatttttttctttttttaaaaaaagtttttattttttccaaactagtgcatgtataaataatggcaggatggggggtactgtgtagatgattaactgactttttaatattttgtaaataaatcggattccttgtgtcctttgtgctagtgtaacccgggactggaatgtaaagtgaagttcggagctctgagcacgggctcttcccgccgggtcctccctccccagaccccagagggagaggcccaccccgcccagccccgccccagcccctgctcaggtctgagtatggctgggagtcgggggccacaggcctctagctgtgctgctcaagagactggatcagggtagctacaagtggccgggccttgcctttgggattctacctgttcctaatttggtgtggggtgcggggtccctggccccttttccacactcctcctccgacagcagctccctgggcagtggcctggtctcaccgtgtgcagccttgtggtttatgcttaaatgtacattttcctgctggtaaaaggagaaactgagaggtgtcctgcagaccggctgaccactccttttggagacggcaggaggcctgagcgatccgtactcagaacgtccaggagagacgcatggcccgaagtcaaagtgctggaattttccaaaacagcctgttctctcctctctcctccccagagcaccccctgccatcaggggggttgaaatccctctcccccaggagccctgctgctttgcttggtggtagggcaggagagcaaacaaacagtcatggtctaaaacccacatagcactttgctcttagttacatgtaaaattttagatttctaaaacaggtgggcaatcattttgaatactgttctgtgaccctgactgctagttctgaggacactggtggctgtgctatgtgtggccatcctccatgtcccgtccctgtagctgctctgtttagacagcggacagacgctcacgcccaggggatgtcctcacgctgtcgccgcgcggtttcccttcgcagatgtgtatactcatgataggtcagaaagtgtatccgctacaataaagttctggttctaactaactccagccggagcggggtttgtcttctctcctgttttggttttaaacctacactcccttgtttctttttgagccgagaacataaaagaacataaaaaggctttttctttcttttcatctgcctttacttctcatttcaaggtttcacagagtgctggtctcaacccacatcagtgatacttaactaacttgccttccccagacagaaacatgaaatgacttaaaaaaatagaaaatattcttctcgccaggcacacaagactgtacacccaaaaccagaaacgctgtggctttgcaaagtgtgctcccacacccgcgcacacaggcgcacttaaataaataacgcgcacgcacggctttccccatttcgaaacaggcagacggtctagtgagtttcagcacttgctgggaacaggcgtgtggccagggaggtgccccgcgggtggc

SEQ ID NO: 5946 - DNA, 1113 bp, Homo sapiens
gtcaggagttccaggccagcctggccaacatggtgaaactccggctctcctgaaaatgcaaaaattagccagttttaatggggcgcgcctgtaatcccagctactcgggaggctgaggcaggagaacagcttgaacccgggaggtggaggttgcaatgaaccgagatcgcgccactgtactccagcctggggacaaagcaagactctgtctcgaaagaaaaaaaaaaagtaaactggagccagcagattgcctaagtgtaagacaagcacgtgcctgggggcttgaggtgcgcgggacctctggctcctcacatgagtttcaccgagcactgtggcttcaggtgcggccgcgggcactgccgagctgctgccatccccgagtggatccctcaactggaccatgggcctgcccaccgacaatggccacgacagcgaccaggtgtttgagttcaacggcacccaggcagtgaggatcccggatggcgtcgtgtcggtcagccccaaagagccgttcaccatctcggtgtggatgagacatgggccattcggcaggaagaaggagacaattctttgcagttctgataaaacaggtagggtaatagctctgcaagcgatgccaggccccagtgtccagtagggtgggtgccagcggcaggctccctctcctttcccagggtcccctgccagcctggtgctcgtaggccatgtgccatgctgtgtgcctggggcacttggttccctagagccacggcctgggcatttgggtattagctgttgttgctcagtggggtccacggtgatcacaggctccgcctctcaggaaagcccaagtgtatttgtttctaagccctgccttggcttagccgaagagttcatttatgcagatgaaattgtgtcttcaaaatccattcaagaaacagctttaatttctcctttggatctttagttggcaatttacccatagaaactgcctttgcagatatgaatcggcaccactactccctctatgtccacgggtgccggctgatcttcctcttccgtcaggatccttctgaggagaagaaatacagacctgcagagttccactggaagttgaatcaggtgagtgaattg

SEQ ID NO: 5947 - DNA, 1112 bp, Homo sapiens
ataaaaaacacagagaaattaaactacgggaaagaacatcaatataagctgaccgtcactgcctatgactgtgggaagaaaagagccacagaagatgttttggtgaagatcagcattaagcccacctgcacccctgggtggcaaggtgagcttcattctctcccctgcgctcacatctgctcttaaaactgatgtatgcggcagcaacctagagtgtgtgttttccttctctcttcccctgctgacttgtggaccaacacaggatggaacaacaggattgagtatgagccgggcaccggcgcgttggccgtctttccaaatatccacctggagacatgtgacgagccagtcgcctcagtacaggccacagtggagctagaaaccagccacatagggaaaggctgcgaccgagacacctactcagagaagtccctccaccggctctgtggtaaggagaccaggcgttcttgcatccggctggctttggtgaaggtgggagggacctttacaactggaaatacttgtgtgtgttgtgttcataattataaactgtgacagagaatctgcatttctgaagtgaactttgctgccttgctggctagttttcatactggatgggcttcgggggtggggcagggggtggacatcaactcctaaacgtctattcaacatgttgtgtatatgtgcattttaagaaccactggtggccagatgtggtggcttatacctgtaattccagcactttaggaggccgaggtgggaagatcacttgagcccaggagtttgagaccagcctgggcaacacagcgataccccatctctacaaaaaattgaaaaattaactggggatggtggcatggacctgtagttccagttacttgggaggctgagcgggaggatcacctgagcccgggaggttgaggctgcagtgagccgtgatggcaccattgcactccaccctgggcaatagagtgagaccctgttttaaaaaaagaaccactgatttgaaggaagtatttctccagcatactctgagaatcatccaaaaagggcttctataggagtacatggagtgagttttacatgaaatgagatgtttacttacgaattga

SEQ ID NO: 5948 - DNA, 1102 bp, Homo sapiens
tgcagtgcccagcaggacactgacagtcacagctgtgtgactttttgtgggttacttaatttttttgagcctccttttctcttctattcaatgaggataatagggcctacctcataggattattatgcattcccctctgttaatgcacgtaaagtttttacttggaaaactaactcaccatttaacaaccattctaagcaccataggatatattttgtttcacaaatttggtattcattcagaataagtatttgaaaagtgagtaaattctatgcaattatagttattaaatgacttataaactgtgtttctcttccacttcttgctacatttaatcttctaggtgttcagatatctttggagattataggcagcaataaagctaaggcagctaacctttcaacattcttgtgtcaggctaatattttggtgaaaggaattcttgtgtttctcaaagaactagagctgaagcagaaataagttccaatgagcaagtgtccaatcggaccattgaatgaaatctagtgttttaaacaattctgatgtttcaatgttttgttctgttttcttttgatcttgtgagcagtaagacatattttatgtgggtggtaaaggaagaaatcaagtaacagaatgaggaattgttcccaggaagagttagagttgggacaaatgggttgttaactttgatttttagatcttctctgaagacattaaacatggaatggtcatctttagaaaaataaaagactatgcaactccaccactgaaatggtatcttattacagtgaatgatggataatctgaaattactatagaaaaaaataaacccagaccattttgcctagagcctttcaaccacctttctgtccacgtttttcttttttattctatttattgctaagaccagtgaatgttcttctttgccttccaaaatgttttccagcattagtatgtaaattaaaactgtcggcagggcgccgtggctcacacctgtaatcccagcactttgggaggcggaggcgggcagatcataagatcgagaccatcctggctaacatggtgaaaccttgtctctactgaaaatacaaaaaattagctg

SEQ ID NO: 5949 - DNA, 1226 bp, Homo sapiens
ccctttgtagctggattgtttgtgcagagggaaggaaattgggatggcaatgggaacgtgtaggggttaatacactgataatggaggctaattatattttctgttttaatatctatatgatagattttttcccactttaccaggaattgcaactgcacttgaaataatctttttgtttattatgtgtcttttttcttaggctctggagacaaaattcttgctctggcaagttttgaggttgaaaaaacaaaaaaatgacatggtgcagaagcttgtaacattgatcacattcttaatgtaaatggtgtctttcttctggggttttcagttattgcaaagaaatgaagagattctggaaatgcatcaataacctaagaaaaagcgacataaaaatatacttatggcttgtgtttatgctcttcatcattgtgcgttgtgtgcggttacctgcttgagtgatcctgaacttgttgcgacagagggactcactggactctgttcgttatgatttgtctgtttaagagagaaaacaaagtggacttgatttttattaaggctgtttgtttttaagtgttgatagtgaacgaaaagatgtgaagtaatgatatttttctgcttacaacttatccccactcattggagtgaacagtgacgcaagctcaatagacttcataagtgttcatagaattttacaattctgagtgatcttagaaatcatttctgtttttacaaacaaggaaactgaggtccagaaagagcaagcgactttgcttaaagtcgcatcagagagctgagggtaagactcaggtgtcctgactcccagtttagtatcttttgaattttatttctgtaccatttaaaaaaaataattaacactatttgtgcaagtcagtgtttttgaaaattcagtgtcccaataaaaagtggactgcacactaagggaccatcccccagcctgtaagctgtctgtattaatggggcccgttgtatctcggaattttgaggttggaacaatgggagccctgttgagcgtttcctaaagtgacttagccgcctgcgttgtttgaccagggaagcaacaggaaatggcagctagaggccctccctgtgcgtgacctcttgtcacactcagaggggggtaactgtcagctgttatctactcttcaggttttggagaaacacaaaataagttatgaggaaaagcaaatttctctcctgagtattta

SEQ ID NO: 5950 - DNA, 1106 bp, Homo sapiens
ggtggggcgagggggaaagagtaggggtggaggggtaggaggatttactcttccagcgagagctacgcgcatcccatcctccccctcccccctacccgggctccggcgtggaggcggggcgtggccggcctgctttgggaggggaggggcttcccttacagtgctgggctctgccaggacggctgtggggtcgccttacctcggggtatccactctgcagtcgaccagttcccgccaggagcaaagggtaggaaggagagcaggatctgctgtaggaacgcagctaccgcgccactatcacgaagaaacagcaggctcggggcacgagacgaactggagaccgcgctgcctagctgggtaacctgggaagcagagggtaataagtggcgccttaagacaaccctgtagcagcagcagtggcggccaaaggaggctgctcagggaacaagcggctgtagtagtctgtggggcgactggagtgaccgaagccaaggcagtttagtgcctctcgtgttcttattttttaacctctgactatgcaattctgaaacctcccccattcgggggaccagacagcctgatagacaccttccactctccttcctcccgccgtggtctcgagaacagaaggatctctccttaacgcctttcaccattaagaggaaagcgatggaggagctgagcgctgatgaggtgaggaggttgggggacaccttgagggattagttggcaactcgttagcgctttggacagggatggtattgcgccagtgctgtctggcctttgggcttggagaaggaacggagatgatattttccaagaataacgtgactccccgatagggtctctggttttgttctcctttattctgttgccttctttcttcattctgaactccatttgcttctttccgagtgttcttttagggtatgaacaagaggagagagcatcttgaggtgtttattcttttcttcagggtatgcgaacaagaagggcgagatttacatgaagttaaagtgtgtgtgtgtctgtgtcttcaggaatttaaagaacaattttggatggaatgagaatgtatggtgggtgaatatttttaaagaaagcat

SEQ ID NO: 5951 - DNA, 1224 bp, Homo sapiens
atttgagacggagtttcgctcttgttgcccaggctggagtgcaatggtgcgatctcggcttaccgcaacctctgtgtcctgagttcaagtgattctgctgcatcagcctgccgagtagctgggattacaggcatgtgccaccacgcctgactaattttatatttttagtagagatggggtttctccatgttggtcaggctgatctcgaactcctgacctcaggtgatccacctgccttggcctcccaaagtgctgggattacaggcgtgagccactgcactcggccaatgatatacttttaaaaagtaagcccaagaaaatgacaacttaggaaaaatatttccaacatgtataagagacaaattgtttagatcctaatttatgaagaactcttaaaaattaataagaaaaaagatggaccattatcattttcctttcctgattaactgatattttaaaacattttctcacccagcagctacagtgacattgtgcggatttataaaaggtaaaaggcttgtttgtcttttgtactttaagcatgtcccaggtggatgtggattcaggaattgaaaacatggaggttgatgaaaatgatcgaagagaaaagcggagcctcagtgataaggttggtaagcgatgaagcccttggtacaggtaatagaaataaacacatttcatgtcttgtatctgtagagtctgttagattggggccacccgaaatcaggaagtcctaggcaggtgattatttttattcttttgaggaaaaatgaataacctagattacccttattcatgaaagtgtaactcagtcctttgatctgataatatccatctgtttttggttcagggccatgattttatcagtaaatttaggttgtaataggaactaatttagagcaaattagaattctttctgttggtcttttgcttttttttttttttttttttttttttttgagacagagtctcgctctgtcgcccaggctggagtgcagtggtgcgatctcggctcactgcaagctccgcctcccaggttcacaccattctcctgcctcagcttcccaagtagctgggactacaggcgcccgccaccacgcccagctaattttttgtatttttagtagagatgggttttcaccgtgttagccaggatggtcttgatctattgaccttatgatccacctgccttggcttcccaaagtgtgggattacaggcgtgag

SEQ ID NO: 5952 - DNA, 1197 bp, Homo sapiens
catgtctcctcctaactggagagtttcttaacctttggttctattgccaaatgttagatgagggcttttgagatccatggtagaagtcacaaagatgagggctattttgtcagtcccttataacttttcccccaaagagtttgattacagcagtagcatagtctggctttaacctacagccctctgagtgatgccattctttttggttaaagtacctgtgatgtcccttccaatgcttaacacttggtaccagttcttagtgcttctggttttctaagttgccacctgcagtaagaagcagcccttcttaggtccctgaaatgttaccaaaagttactattgttggctttggagcaggtgaaacaagcagtcagggtggatcttggccgcatgggtgtttgtgctttgttatgtgtacagggatcctaacaggctttctgctgcagaaatgcaaactctgccaaaaataatcaagagataagaatcagaatttcttcttgtcttctctgaagtttgggagcctctggtggagcaagtaattgggattcctacagtgaccatttcaccattgaaacctgcaaagagacagatatgctgaactacctcatcgagtgtttcgaccgagttggaatagaggaaaaaaaagcaccaaaggtaatatgaaatggattaacttaaaaaaaaaaaagcctagttatttgtttgattatccccacccctggagcattcattgatttattcaatcagtaaagcaattattgagcatttgccatgtgccaggcacaatactaggaacttaggatgtgtcgatgaacaaaacagagatccctgccctcgtggaactcacattctaatagagacagagccaaggtttgaacctagatggcctggcttcagagtcctctcttgaccacactgtagctcggtaccgccagtgactcatatggccctgataattctactgctttgttataataaccaacattatagagcctctgtagattgccaaggactgtgccaggtcgacattagcttgtatcctcagttgctctgttagtgcagtggaacccggtataacataggcattcttttttcaacgtatgactaagcaaatgactctcagagagattaagtacttgtccagaatcacgtaaataataagttgcaaggctgggcttaaactcagtaagctaccct

SEQ ID NO: 5953 - DNA, 1180 bp, Homo sapiens
gagattgtgccactgcactccagcctgggcaacacagcgaggctccatctcaagaaaaaaaaaaaaaaataggctgggcgcagtggctcatgcctgtaatcccaccattttgggaggtcgaggcgggcggatcacgaggtcaggagatcgagaccatcctggctaacatggtgaaaccccatctctactaaaaatacaaaaaaaattagccgggcatggtggcaggtgcctgtagtcccagctactcgggaggctgaggcaggagaatggcgtgaacctgggaggcggagcttgcagtgagccgagatcgcgccactgcactccagcctgggcgacagagcgagactctgtctcaaaaaaaaaaaaaagtcactgtaaactgaatgagttcaagggcactcccaaacctacttatcctgccttcccctcctcacttactgacaccagccttcacccaagatgagtttctcagcagtttctcagcggtctctttcttgctcttcttgcctctgttcagatactctccccaggcgctttatgagccctgtactcaggatattgtgatgttccttgttgtgatgttgtgcaaccagaactacatccgaaacccatatttggtggccaaactggtagaagtcatgtttatgaccaaccctgctgttcagccacgaacccagaagttttttgaaatgattgagaaccatcctctctccaccaagttgttggtaccttccctgatgaagttttatacaggtaggttgctggaacacagtgtagcacatggcaggccaacttaggtaaggtcatctaaagctagtggacgacgttgctctaagcctgttacctaatatcctgctacctgtgtgtatagcctactaacctgtggcctgcagaggatgtacttttggttcttcttgccctgagtagttaggaataggacaaccattccacctactggtctctgatgattcagcaggaactactgaaagtcagatgattggcaccgagacccagggtatcaagagcacaagttggtagtgttatctgaatggaattatctggttcattttacctttgaacttacagcatttgttttttaacactatcctataacccactttccaaagtgtgggtgaaacagggagcttgttaaaaatgcatattcttggtccgggtgcgg

SEQ ID NO: 5954 - DNA, 1207 bp, Homo sapiens
catattggagatgaagcagaagggaaatttatcaaatgcagaaactacctactttatgacactctgtagcaaagacccaaaacactcttggccctttttccctgcagacatccagtccctccctctcatgtcccagtccttctggagtcttcggctcaatgagggaaagaatggccttttcttcccatttatacagagcgacaagcatcctctctcaggaagagccctcccatctggggcattaatcctcctttttttcttttctcagtgccagaactgaaagagcagattcaggcgtggatgagagagaaacagaacagcgatcactaaaccgttccgccgcccaccctctgctagacacagccaaggccaacgaggcaagcagaagcagcggccgcagcgaagctgccgttcatgtgttggaggccaaatgtggcaaaccaaccccaggcccacccagagcgagcaaacgctgagacctgaaaggacatggatgagaagaggagcccgcttcctgtacatatatttaagtgacaaacacggtcaaaagcttaagggacaggttttatggttgcttgtgtaataaagcatgtccttcgtatgtcacagtttggggcaacggaagtcttttagtgatggctaatgggtctgggcagcatcccttcatgaatttttttttaatccaatatccgttgatttgattgtgattagagaaccttggacattttgctgctaaagaatcttttttcccctctcccccttcctgaccctacttgcactgctgtggatttttttaagagaagcaaaaacaaaagtaaactcctttccctggccctccaaacatatattctgtgagataactgtgcctgctaccaagtgttaatcctgggatcgtatttttatatcatattcacatatttgtttttttaattggtgttagatgacatgattaataaaaaaggcaagatattttcagaatttgaatttcagttttttttttcttttgaaatgtccctttaagatttttttattctaaacaaaataaagaaaatcctgctgctctggtccttgtgataagcctctcttcggcatctgaggagcagctgcagcaaaatctaggggtgtaagtgtatcaggacttatgtgacttatattttggggagatgagggttgggttttttttttaatgctacgtgacagtttgaaa

SEQ ID NO: 5955 - DNA, 1393 bp, Homo sapiens
taattgagtctcttactaaataagtaactagtgccatgcttttgtgagctcttggtatggcccatattactttgttttttgtttttgttattgttgttttgtgatagtcttgctctgtcgcccaggctgcagtgcagtggcacaatctcagctcactgcaacctctgcctcctgggttcaagcaattctcctgtctcagcctcctgggtagctgggactacaggtgcatgccaccatgcctggctaacttttgtatttttagtagagacagggtttcaccacgttggtcaggctggtctcgaattcctaacctcaggtgatccacctgccttggcctcccaaagtgctgagattacaggcgtgagccaccgcgcctggcctgtttgtttttttaacatgatttttctctaagcttaaataccacaaggccaaagagaaatggtcataatttaaaccattattatattgttgaggtatccctagctattattatagcaaagtgggaaaaaagtgtttattctattgaagttatgtaatgatccgacattaatgggaatatagaggagtcctaattaattggtataatttcacaaagcggaatggtattccttggagagttaaagacattctctttagtaagtgtaaaccaaagggcattttctttattcctgcttctaattccttctagcccagtgaattatttctcttttcactggtaatgtgatgaatgggaattgtttattacattgaagtgacttgaagtgaccttttgtgctttaggtgcaggttgacactgaaaaaaaaacaaaacactgaatttttcacacctatgtctgcattaaaggctgttttactaccggaagttacatagacttcctgcagtcagctgctgtgccccagtgccttactggtcctttgtagatttgccttaatgatttgtacaaatgactgggaggcggggatgctgcctgtgtcctggtgaaccttaatgaaggggccgtcttaggcacagtgcaaaacaagcatttgtcctgtactgttagagccaaaattgtgatgagcaatactgataattgtccagtttatgtcatctttcccagattttaaaatctgttctagatattcttagcttgaaccacttttgattgtgaaatgtattaggtgttgtcccattattactgtaaaatgaagttttgaatcttcttgttaataaactgtggatttcccctctcaatttcttaaacaacaacaaaaaaatgcttgaagattgtctttgagtgtaagatctgccttttcagaaagggagtgttagtttgtaatgttaaaaaataaagacctcattcaataaaagttgaagtcatcttttaagagtgtgatttctctctatgtggga

SEQ ID NO: 5956 - DNA, 1182 bp, Homo sapiens
tgtgcctgtgatctgagccgccgaggtgggtggatcatttgagctcaggagttcaagaccagcctgggcaatgtggttaaaccccatctctacaaaaaatttttaaaaatcagctaggctggtgatgcatgcctgtagtcccaggtactcaggaggctgagatggtaggatcacctgagcctaggaggtggaggctacagtgctctgtgattgcatcactgcacccagcctgggtgacagagtgtaaccttgtccccaccgtgcctcccctcaagaagattttcgtatgtgcaaaaacactgccaggctaggaaaacaaagtccttaaatagcttaatttgaagttagggttattccctatgactgctaacaggtggccatatttttcagtagaaagttagtcacaagatatttgttgagcacattcgacctctttcccattgggtatgattgtatcgtctcatctctgaagcttgcttgctgaaaaccatttgtcaatggtttattctttctattcaggtgcagtttcagtttgttctgctgactgacacactgtactcccctttgcctcctgaattacttcccactgagatggaaaaaactcatgaggacaggcctttccctcgcacagtggtagcagtagaagtccaggatttgaagaatggagcaacacactattggtctttggagaaactcaagtatgaaaacattcataaaggctggttgttttatttaggaaataacaatgacctgctcaagtgagctccctccagctctcctctctctgaggacactgttgcttacttccctgtactttctaaatgctgttgttggccaatggtattaccatccatctgttttcttttaagtgaataaatgcactcctcacacactctgacatttgtagatatttaagtttaccctccatagaccctcttataaattttaaatattccagtttcatcatatttctgttacagatttggaacttatttattttttctatcctggacctcaggataatcaataataaacatggaagttataatctggcttcttttacatgtagtataatgaggtatttcccccgtctcagtgtatttgagatgtcacatacagttgacctacaatattcccccttatgacttttcacccggtagaggataggtggccattcttgac

SEQ ID NO: 5957 - DNA, 1102 bp, Homo sapiens
tcaagaataaaactgattctttttttttgagacggagtctcgctctgttgcccaggctggagtgcagtggtgcaatctcggctcactgcaacctccgcctcccgggttcaagcaattctcctgcctcagcctcctgagtagctgggattacaggtgcccgccaccacgcccggctaatttttgtatttttagtagagacggggtttcaccatgttggtcaggctggtctcgaactcctgacctcgtgatctgcccacctcagcccctcaaagtgctgggatgacaggcgtgagccaccgcacccggcctgaaaccgattctttattgactagtctcatttgagctgaggaagttgataaatctacatgaatagagtgcgaagcagcccatgccgtgttactactttggtatcattctctcatgccaaagacttgagtttataatccagcaagagctttttccctccctccccctgtgtagtctcactcaattcttgctaatttttttttctgctttagcggatgaagaagctcctgattatggctctggaattcgacagtcaggaacagctaaaatatcttttgataatgaatactttaatcaggtgagaaaccgtcaggaagaaggaaaaccctgtggaaagagaaagaatgttcagcattggagatcagttctcctgtaaaactgaaaaatacagggtgctggttgccacagagtagttcaatagaatatgggacatgtctaacaattatgaaggtaaaggtgtatagactcaatattcatattttattcattgcctttcctcagacagccctcagtccatataattttccagtcactattatttgttggacagataaacagaagtaaggcaactggggaaaaatacgtttttatactactttaccatgtatctgcccctgcctttttttcagagtgacttttcgtctgttgcaatgactcgttctggtctgtccttggaggagttgaggattgtggaaggacagggtcagagttctgaggtcatcactcctccagaagaaatcagtcgaattaatgacttgggtatgtagacatagtttactgtgcttggggacatttt

SEQ ID NO: 5958 - DNA, 1159 bp, Homo sapiens
acctctctgtttcaccattgctcaggcattcaggaaagtatctgctcactcccacttggtgagtcctcggccttgaggttgctgactctcaggcgttaggcagctggatgacttcccgcttcacgcagcaaaggccaggggcttgcgcgcctctgcagagttgttgctagggagacttgtgtcatcatccacaaccttgtttctcacttcctggttgggctcatctctgaagaacaggtctcccagcttcgctccttatcactgcattgtgaagaggaggaaaagtgaatcacggagagagaaaggaaaggatagaatcacaggctgcgtctgcacctgaaaagtgacccgcggaaactctatggcggattttttttttaactttcttcttcctgttaaaacataggtcactaactgtgatgttatttgttttctaagtggtatgtgagattttctaatgtagttagaagtttcattgtctgatggacacaatatgcccttccggttctattcaaaccagcaggatctgtcggtgcttagagatggctgcctggactggaatcaaatctaatttcagggaaatgaagatggaatttgaaggtcacttttaaaattaagtcattgatgctgctgttacagagtgtgacagaggatccatgtctgtgacacaggacggtgggaagcctgagagagagtgaaattatgtgatacactgaaatgacttttgtttttcttctaactcatacaaaactggtttggaaagtctttgctttggaagcgtcagacattagaacaggccaaactggactgtctgttcatagcgtgcctgaataagaaggcctcttagggagccagagggagcagagtggtcgtgtcctgcgtgctcttcaccctctggggcgcccctgctgcggctggcaggtgcagacagcctttgctggtccccagcacgtccagggtgggtgctcccttgcccgacagaaccatccccactgtgaggctgtgagagatttgtggcaggaactgtttatgaggctctagttgttgctgttgtggcgggaaagttaagaaacatagcccttaaggaaaccacctttatgtattttcttaaagcacgcctttaaataagcaaaaactttaaaaggcaggaaagagaatt

SEQ ID NO: 5959 - DNA, 1490 bp, Homo sapiens
gggtgcttgtggcagtggccgggcacctgagccccagctcgttgttaaacgtgctgacggcaaggggcaatggagtgagtttcccaactaagaaaccactattatatattttttcccttcagtcacatagacttcagacaactctcctattttttatggatttttcagctcatttcagatgaaggaactaagtcattgtgaactgtctcttgagatctaaaaacaagatgacttttcctggcacatattccaaagcaaagactttgttgcctgctgcttattgtctaatttacagggatatttaattttgtcaggtctatgtatatttatccagctatacttacttgcacagtggattggagagaaaggattctccagtgtgcacactcatcggtactctttctgcatttccctcgtgctgtgtcccgctcgggttccaatggacagtatcagggcttgtttgacttaggtctttcagttttcctttcggttcccttttaaaaatgtgattgttaacctgcctcttgaaagattcaaccgggtgtggtggctcacgcctgtaatcccagcacattgggaggccaaggcaggtggatcacctgaggtcagaagtttgagaccagcctggccaacatggtgaaaccccgtctctactaaaaatacaaaaagtagccaggcgtggtggcgtgtgcctgtagtcccagctacttgggaggctgaggcaggagaatagcttgaacctgggaggtggaggctgcagtgagttgagactgcaccattgcactccagcctgggtgacaaagcaggactccgtctcaaaaaaaaagaaaagattcatgatgctgctgctcccagaaggtttgctggatgtgtttacataggactctaacttgtgtgcactacagttgttcaccagggccagtgattcaccccagtgtgtggccagaccatgactgtgtagcaggaatgttttaatttgtgcttccttagtaaattgaaatatcagctgagagattatttgctgctgttattcaaaaggccatttatgaagttagtatttgagccccataagatctttaaaaagcctccaatcatttaaaggaagaaatcagagttgctataaaattcagtaaaaagctcatagccaaacggctgtgctcagatggaaagtctgagctgaggttggtctcttgccaaaccgtggctgttgtgtgttgttcttcatgtcttcgagttcattttttttcattctgcctattctggcatcagctcacttgaggagtccctcagccttcttgtatttaaggcatcgtcttagactttgtggctctaaagtacctgtctgttgagatttcaagtctcttgtcaccatcctcacacatgacaacaaaacccataatgcataagtggcctttttgaaccaagactttgcaaactgatctctcccccgtgaaggagttgagcacattagcaacaatgtacattaattt

SEQ ID NO: 5960 - DNA, 1051 bp, Homo sapiens
gctcctgtcaccctccacgattccacagaccaggacattccatgtgcctcatggcactgccacctggccctttgccctattttctgttcagttttttaaaagtgttgtaagagactcctgaggaagacacacagtttatttgtaaagtagctctgtgagagccaccatgccctctgcccttgcctcttgggactgaccaggagctgctcatgtgcgtgagagtgggaaccatctccttgcggcagtggcttccgcgtgccccgtgtgctggtgcggttcccatcacgcagacaggaagggtgtttgcgcactctgatcaactggaacctctgtatcatgcggctgaattccctttttcctttactcaataaaagctacatcagactgatgctctttctccagattcttagtctcacctcggccacatggagccattatccccattggcagaaagatttttctttaaaaaaaaagactagaataacacaagaaaccacatttaggattatgcttcactcagaggaggcaggcagggaggacacaccaggggctttaatacactgggcatgttttctttctccaattgggcaatgggtacatggacgttcactgtaacgtgctttttctttcgtcttttttttttttttttttttttttgctcctggcaagctgtgcgtgacattctttatggctttttgtatgtcaaatacttcatactaaactttctagagaattaaactttaatgatgggctcagcttggtctgatttatttcctttcccacacctgtctctacttgctctaagccaggcccagggattttgaacaagctaagccggctccttaaactaggcttttcactttatcttacttactcagagaagataaaacctgccagtgatattgttgtgtggcctggggccagtgtgactgttccctgcagcggtttgacttcatgatgatttccctggagtgttaaagtcctaagagttgcctaagaggagcgagcagcgcctgtgcctcgacagctggtgtctacagtgtgacctctg

SEQ ID NO: 5961 - DNA, 1154 bp, Homo sapiens
gcctcagggtcttctccagcccttgccagccccctcttggcctctctgtccatttcctgttgccactcccttccccaagcctcagtcagagccatccaagtggagttcctcatggcacttcctagggccacttgtccctatcctaggaccttgctccccagcctcggccagcctctgcagccccggaaggcctggccagcccacttcccagcccccaggagctccagcaggtgcagggtgggatcgcttaggtccctcacggaacgccccgaagcgccggtcacagcacctaatccccgaatgtgacagcccgacacacacagccggaaggaagccctcatgaggcgacttgagagccagcgacctccctcgcggccgcatagcccaaactctgtccctgatagggcaccgagggtcctgggggggcatacggcaagcccacccaccacacagcctgggacctgccacaaaggctggcgagggtggacacacacacacgcacacacacgcgtgcacacacagcgcagccacatggaactgtctgtctgtccgtccatttagtgagctccttctgtgggccagaccctgtggtggggcttggggacagcgcagtggccacagcagcaggggctcggctcacactcactgtgtacaaaacaaaatgtgcctctccatggccctcacgggaggaatgggcgtgtcagagtctccacataggcgggaaggctgagggcagggccccccggctccatggtcagaaggggcttcactctaatgatcaccccctgccaactttccacatgccaggaaacccgatgagaggcctacccaggcgggaatggcaatacctgggtccacccaggggccgcatccctgaggtggacttgactcatacgcacagataaccgtcccctgatagacacagtgcctggccgtcccagccagatccttcccttgtagccagtggccagtacggatggctcacttggcccagacgagacagggtgactctagcccagccaggcccactgccagagaagggtcttctcagcccactcccaggccttccagtcctgtgaccctggcttcagggccttagacacttgcccaagccgatgcccactctacccaggttcgtccacatctccaagtct

SEQ ID NO: 5962 - DNA, 1215 bp, Homo sapiens
gcccccaacccatgccccatgcacctgcttatcgatcactgcctgtctggatgtgtctcgtgtcagagccctctggtgtgaacttgccgagtactgagaggccaagacgtgagacaattacaagcaggggagagaagtggtaccctgtgacaagaggcagctgtggagaaaggggcaggctccatgcccggggtgagcgccatctgggcaggaggcctggcttccagctgtgggggcttgggaagggcagagcctgggaggaatgattttgaagccactactatggagattaaggggatgagaatgtaaatctcaagtaaaaaggtaattgaatgtaatagcaaacactgctcgctctatgttaattttagctcttcccctggatacaagacgctgtattagtgttttattaccattttgtttgcactaataaaatagtaaaatttatttcaaggaagttgaaggatggttttacaatgcaaatttgaagaaattggacttttcatttatgcctctgctattttaaaccctgacgggtgtaaattagctacagggaccgagcagaccccactgatggggacttgggaggcgggagccctgacagaggttccagacgagctcagggcagaaagcagacagtatcacacggagaggctgcagcgggagggtacttgggggcctgattgggtgggacggggtgctggttgagagtgtgtcaggcatgaatgagtctaggtgtaggagggcatgtcacacacagagctggcagagagacacacgtggccacagacctcagggcttcatctttcctctcggccctttggcctccttcttgtcctgacatcgggcctctattaacctggtgaacccctaagggtaactgagcaaccctaccctctgtgcctagagagggcaggtagaccaactgctctgctcccgttcacacccgtccccttgaaaggggctgaagattgaagagatcatcggagcatggaggagagactttgagccaaaaaggaaccagggaaaaagacctaggccagaaaccagcccagctgaggtcccaccttctccctctcccttccaacccaggcatcctggagaaacttggccgggactttctcaatccccccgcatgccttcacattgagccgaatggtcccagacattgtagtgtccatgaatccaaaagctagagaactgaatttttaaaag

SEQ ID NO: 5963 - DNA, 1654 bp, Homo sapiens
gagtatattcagcagtatttttgacatttttctttagaaaaaggaagagctaaaggaattttataagttttgttacatgaaaggttgaaatattgagtggttgaaagtgaactgctgtttgcctgattggtaaaccaacacactacaattgatatcaaaaggtttctcctgtaatattttatccctggacttgtcaagtgaattctttgcatgttcaaaacggaaaccattgattagaactacattctttaccccttgttttaatttgaaccccaccatatggatttttttccttaagaaaatctccttttaggagatcatggtgtcacagtgtttggttcttttgttttgttttttaacacttgtctcccctcatacacaaaagtacaatatgaagccttcatttaatctctgcagttcatctcatttcaaatgtttatggaagaagcacttcattgaaagtagtgctgtaaatattctgccataggaatactgtctacatgctttctcattcaagaattcgtcatcacgcatcacaggccgcgtctttgacggtgggtgtcccatttttatccgctactctttatttcatggagtcgtatcaacgctatgaacgcaaggctgtgatatggaaccagaaggctgtctgaacttttgaaaccttgtgtgggattgatggtggtgccgaggcatgaaaggctagtatgagcgagaaaaggagagagcgcgtgcagagacttggtggtgcataatggatattttttaacttggcgagatgtgtctctcaatcctgtggctttggtgagagagtgtgcagagagcaatgatagcaaataatgtacgaatgttttttgcattcaaaggacatccacatctgttggaagacttttaagtgagtttttgttcttagataacccacattagatgaatgtgttaagtgaaatgatacttgtactccccctacccctttgtcaactgctgtgaatgctgtatggtgtgtgttctcttctgttactgatatgtaagtgtggcaatgtgaactgaagctgatgggctgagaacatggactgagcttgtggtgtgctttgcaggaggacttgaagcagagttcaccagtgagctcaggtgtctcaaagaagggtggaagttctaatgtctgttagctacccataagaatgctgtttgctgcagttctgtgtcctgtgcttggatgctttttataagagttgtcattgttggaaattcttaaataaaactgatttaaataatatgtgtctttgttttgcagccctgaatgcaaagaattcatagcagttaattccccttttttgacccttttgagatggaactttcataaagtttcttggcagtagtttattttgcttcaaataaacttatttgaaaagttgtctcaagtcaaatggattcatcacctgtcatgcattgacacctgatacccagacttaattggtatttgttcttgcattggccaaagtgaaaatttttttttttcttttgaaatctagttttgaataagtctgggtgaccgcacctaaaatggtaagcagtaccctccggctttttcttagtgcctctgtgcatttgggtgatgttctatttacatggcctgtgtaaatctccattgggaagtcat

SEQ ID NO: 5964 - DNA, 1219 bp, Homo sapiens
tttttaacatggaaattttagtcaatacctgggctgaagtatcagtgtttccaacctacctacccaaaaaaaggattcaaggttattcctcaatcagtactgccataatatataaagcacttacagagatcaataagaacaagtttaaaaacaaagagcatggacaggcagtttacagaaatgccaacagccagtatgaaaagagactggctttttaaggtaatgaaatgtaatttgagcagtgacattacactgggtgggcaaagatgactgtcactctcgtggtttatgtccccttgagtcaatgggtaaggctggaattaaactggcaagtggagaaatgacagcagcctcacctggagtctgtttttttgggtggagcaacaactgccatgtccacagtaatgatgaatgcttctcgagccacgtcgctgccaaggtcttcacaggcatttctaaaaatgaagaatccttgactgcagacacgcaagttaaaaatcactaattatgttctcgatccagggaatatagttaataacttttgtgtagactccatactgacctgcttccccacaattcatggaaccccaggacactattcctcccacaaaccacctctctgtttcactatctagaaacaccagtgcccctccgctgtcacctctgcagctgtccttgcccccactttctaagccagcacaaagcatgttagcagttacacttccccttggatagggtggcttttcatatgcagcagtacatttttgatggtcaacaatcggtatgtcgacatacattagatttctagcaagaaaacccctttgggttaatccccatccagatgcagttccaatgtcatctgtcctcataaaggattcagcttcttttcttggcagacaaataggcgtgatgttgctattgattacaactttgttattcaatttaatcagtgctatgtcattgtcaaagccagcatcatgagtataaccttcatgtataaaaacagcttcagaccaggcttgtgtataatgaggtgatagtcttttcagggtgcccattcgaatgtccagggcggatgcatcatgtttttgctcatagacggcatgagcagctgttaggacccagttgtcatataaaagtgcacctgctgctgtggttccacctaatatcaggacttgccaaggaaaatcaccaggttttgccttttgccctccatata

SEQ ID NO: 5965 - DNA, 1274 bp, Homo sapiens
tagagcggcctcccaccccccgaactagagctgtacttttcccttctcatttgttacctgccctctgaaacatggctcaggacagtaggcaggagccaggcgactgcccagattcacaagctggtgaccaaggagagtggggatctggcattgggacactgaggaccctgtgtcctcttcagcctcccctctgctctgaagtggtcagcactggagtgggggcaggttctagtcttgaacgaaggcctaggttagaggttcctctgctgtggtgccaatgagactcccccaagaatgggattcaggtgtggatcccccacagacctgggttcagatcctggctctggccacctggtagctgtgtgggtgacagtggccctggaggtcacagccagactgttcagtgtgtctccctctgtcttccccaggccccgccgaaagtctcttcaaggagtcctattaccagctcatgaagacagccctcaaggaagatggtgtcctctgctgccagggtgagccacaggcctggagcactggggcggggcggggtggggcagggcaggccctgccggatgctgatgcttaggggcccccaggcgagtgccagtggctgcacctggacctcatcaaggagatgcggcagttctgccagtccctgttccccgtggtggcctatgcctactgcaccatccccacctaccccagcggccagatcggcttcatgctgtgcagcaagaacccggtgagatgggggtgtctgggggtgggggttggggggaaggtgggcataaatagagatccctgcccctgccgggcgcggtggctcacacctgtaatcccagcactttgggaggctgaggcgggcagatcacaaggtcaggagatcgagaccatcttggctaacacggtgaaaccccgtctctactaaaaatacaaaaaaattagccaggcatggcagcgcgcgcctgtagtcccagctgctggggaggctgaggcaggagaatggcgtgaacccgggaggcggagcttgcagtgagccgagattgcgccactacattccagcctgggtaacagaggaagattccgactcaaaaaaaaaaaaaaaccctccccaggccaggtgcggtgtctcatgcctgtaattccagcattttgggagaccaaggtgggcggatcacttgaggtcaggagtacaagaccagcctgaccaacatggagaaaccccatcactactcaaaatacaaaaaaaaaaaaaattagccgggcgtggtggc

SEQ ID NO: 5966 - DNA, 1156 bp, Homo sapiens
cagagaacccaggtccccgactgtcactccgcccgcagtaagacctatggcaacgtgctggtgttggacggtgtcatccagtgcacggagagagacgagttctcctaccaggagatgatcgccaacctgcctctctgcagccaccccaacccgcgaaaggtaccccagtgtcccctggaacagtgccggacgaggggcggccccaggtgtgctccgggctcttcccagatgctgcctgcatggttgtcagagaaagtgctagcgaggccaggggcgtcccgcggaggggtgggggccgacactgacgcggcctcggaatcctagggcagccctggaaggaacttccaggaaaggggacaccggcacgaaagcgtttccgagggtagaaaaagatgaggcccgtgggtccgaggggtcagggggtctgcttcaggggcctgggggctcccagtcctgccagggcccctgccttgactgccccctcctcccaggtgctgatcatcgggggcggagatggaggtgtcctgcgggaggtggtgaagcacccctccgtggagtccgtggtccagtgtgagatcgacgaggtgagtgccggcgtagagccaggtttgagtcctggttctcccagcggccagctgtgccctgaaatggctgcacacccccgagcaaggcaggtagggcctgtttctccatctggaaaacacctggtcggggagggttcagtaggaaaaccagatggcagagggcctggcaggtggtgagggcacctgcgtggcgagctcttactaaaactgagctgattttttttttttttttttttttgagacagagtttcgctcttgttgcccaggctggagtgtgatggtgcgatctcggctcactgcaacctccacctcctgggctcaagtagttcttctgcctcagcctccggagtagctgggattacagacatgcgctaccatgcccggctaattttgtatttttagtagagacagggtttctccatgttggtcaggctggtctcggacctggcgaccacaggtgatccgccagcctcgtcctcccaaagtactgggattacaggcgtgagccaccacgcccagccgactaagctgatttttaatctgagccccaggcagggccccaagacagctca

SEQ ID NO: 5967 - DNA, 1175 bp, Homo sapiens
gggtcatttctcaaacttgtagttcactttgtactttactgggggatgatttctatattcctccctttttcttactattctcttgatccagttatacagacctatagaagagacaccatgccatttcatatcctccctggatgaactcgtggaactcaacgaaaagctcttgaattgtcaggaatttgcagttgacttggaggtatcttataaatgaccctgggtaaaatttttacatttttctgtgagttcacctgttggagaagtataaaattaatactaattgtaattttttttggtaaaaaattaatcatataacttagctttgtagctgacttttcaaaatcagtaaaggaaagtctaatataatctttgtttttcctcttctcccctccttctgtggggtttagcaccactcttacaggagcttcctgggactgacctgcctgatgcaaatttctactcggacggaagacttcatcattgacaccctcgagcttcgaagtgacatgtacattctcaatgagagcctcacagacccagccatcgttaaggtcagccagccttttgtaactcatgcatgtgagctcatacaagatttttagtgcttttcagtgtactatttcattatttcaacctagaccagtcaagttgggaggaatcatgtcatttcctaactagggtacagtgctaaatggcttttgtttctaaatccctgttagaacagctaagacttagcttgttaccgcccagaaaaacgttaaatcattttaatgactactgcagtgagccccagccatcaagattgtttggacttgatgactgtactgaagctactagagctgctttcatgtgtctcattggttgataacagtttcagacttcaagcgtatggaatcaggagtgtagaaagctgtgactgaagacaaaagaaacatttaaaactgcatatatcctttcaaaaaaccagctcctggattcattaattttttgaagggttttttgtgtctctatttccttcagttctgctctgattttagttatttcttgccttctgctagcttttgaatgtgtttgctcttgcttttctagttcttttaattgtgatgttagggtgtcagttttggatctttcctgctttctattatgggcatttagtgctataaatttccctc

SEQ ID NO: 5968 - DNA, 1223 bp, Homo sapiens
agactgcagtgacccccataattgtgccattgcactccagcctgggcaacagagcaagacctcatctcacctaagacctactgaatcagatcctctagctgtggagcccagcagtctctggtttcatgagctgtccaggtgattctgacgcccactaaaatatgcaaatcactattgtgggccattgtaagtactttggcttttactctgagcaagactggaagtttttggtggactttgaacacaggaaaaataagatctgacttaatatttttaaatgataactcaatgccatgtgggaaaataggctgcgggggcaagggcagaagcaaagatctgttaagaggccaccatcataaaccagatgatggggacttgaactaggattataacgggagatgggaagaaggattcttttgaatatcacagagctagccacaaacccagaagaaatggtcataatgtagttgtataatattttttcctctactttttctccactctccaaaatgatagtttctcatctcttccccctcctgttttagtaccaaattttcattccaatggtgaataaagttctggtgcgacaccgaatcaatcatcagcgctatgatgtgctcatctgcagaattgtcaaggtgaactatacttcttttctgttctgaagtccctgttgtctttactacttgatattcttgtaatcttggctatgggagtttgtgtagctttttggctgtaaattagggattggcaaacttttttccagttttgtagactatgtggtctcttttgcagctcctcagctctgccactacagcctgagagcagccatacacaatgtgtaaatgatgagcctggctgcattccactaaaactttatttatggacacctaaatttgattctctcaattttcatgtgttgcaaaatatcaatcttcttttgattttttttccccccaaccatttaaaagtataaaaacccttcttagctcttgggctatataaaaacaggcagagggctgggtgcggtggctcccgccttgggaggccaaggcaggtggattgcttgagcccaggagtttgagaccagcctgggcaacatggtaaaaccccatctgtacaaaaaatacaaaaaattagctggtcatgatggcgggtacctgtggtcccagttaccgaggaggctgaagtgggaggatcacctgaggctgcagtgagctgtg

SEQ ID NO: 5969 - DNA, 1196 bp, Homo sapiens
ggatcatttcctgaacagtgagcacaaggagatccgcatggaggctgcccgcacctgctcccgcctgctcacaccctccatccacctcatcagtggccatgctcatgtggttagccagaccgcagtgcaagtggtggcagatgtgcttagcaaactgctcgtagttgggataacagatcctggtaaggcttgccagacagaaggaatctaggggagttaaggagcttaggacaattgggagtagccagtttcattacatggcctctctagagttcttcggctcaaaaagctgatattcagctatttctctgccaaggcgtgttaggcatggctactgtagcctttggtgtaagataatctacctttaattcttttgtcttttactcttgtgagtagagaaaagaatgacagaggttagatgagaaaaagcatctggaatcttcccactacgctgatggcagtggaggtagaagctgggaagggctggagtgatgggatcatgaggaaatgttcaaaggctccattgctcttgcagaccctgacattcgctactgtgtcttggcgtccctggacgagcgctttgatgcacacctggcccaggcggagaacttgcaggccttgtttgtggctctgaatgaccaggtgtttgagatccgggagctggccatctgcactgtgggccgactcagtagcatgaaccctgcctttgtcatgcctttcctgcgcaagatgctcatccaggtaaccgaggtgatggccagacccacaggcagggaagacaggactctcgctgtgagaactgcttgaggaagcggagttgaggacaaggatgggggagaaagattgaggtacctggtaaaagccgcatttgtctgcaaaggtccaaatgtttccctggctttataatggcagttccagtgctcatcacctcatgagccctttgtcaatatgactctaaggtggttcagagtcctctcatgcagctctttctttttcctggcaagtcaccagtgatcccatttcttggccctctttgcttgctgggttgatctgctgcagatggtgtcagacttcccagcgcctccctatccttcagctctcctgcttttcttgctggtgccaggtcaagcacggaggccgttgttcttcacaaaaataaccagtgtgagaccgtttccactatttgttctaatagt

SEQ ID NO: 5970 - DNA, 1108 bp, Homo sapiens
ccacgacatgtctccctttcttagaatatattaaagtcagagtctctgaggaaggaatgtgatttggcagtcagggtactaagcatgggtgggaactcctgccttataaaaattgtttttgtgttcttaaagataatatgttgtttttctgttttttgttttttccattttatggggaatttaaaaaccattcttgtatcagaaggtgaattaggcgcatggtctttgttttattaataatttccactagagggtgttctcaggtcactttgcagtgaagtggacttagttcctccttgttctgtacaaaatgtctccagactttgtaaaggagctgcccagtttggcctcctgtcccgaaaagaccctaataactaggcagagtgttgtcctgctttcttcgtctcgtaggatgtgctatgattggtgccaggcctcactaacacaggggctacctgtctcttattctcagcacctgtgtcctgagatacgctgcctgagacagagagagtccctcattaacagcctgtgtggctgtcagctttttgcctaaattgtgattcagatgcttttgttctctctcctttcacttattgccacagttgaggaaaagtgtcagattaccctgcagcaagacaagccaaggactgggagggaaaaaaaaaccactctggaggcaactgagaaaatcactgcttttggataggaatcagtagggtggctgttttccctttgttgaatctactagagtgacaggaaggactcccagccctttcagtaactatcaggagccctgaaacggtagaggcactgccatccttgtgggatactcaaagcccacagggcttttccctccctattgcatcttctgatgctccccacacctaccctccacctctccacctctgtggtgttcccatttgtgtgtttcccatctgtggagccagactgagcaatagcttagcagcgagtcagggacagctgccactttccacagagccacaggatgggcagagcagggacccagggaatgaatagccagtggacaaacagtcttgagctctgttcagccagagtgatgggccctgccagttaaggggctgtgtct

SEQ ID NO: 5971 - DNA, 1194 bp, Homo sapiens
acccccgcgacccgtggtaggagcccggacccaaacaaaggcgggcggcgaataaaaggcggcggcggagcggagtgctcgggttgcgagctgaggactgggattcgcgcgcagcttcccgcggtctgcttgccctggagcggagggggagccccagcctcctgcggctccgagaagcttccccctgcgacttccgcgaggagacgagtctgcgcagcgtggtggccgccgccccccgaccctctgcgcactctctcccgcgccggcggctcagcctagccccgttcggccggccgaggtgagtgcacggccgcggggcgccatccgggcttggtctcggggctgggggatgcattgctaggaggagggggaagtcctccgcgccgtccgcaccccgacctgcttggcgccgcgcgcgaagttctctcgctctccagccagcccgggatgcgggcctcggagccccccgggaaagacggtcaggggtggacagaacccaagcttgccctctacgaccgggccccagctccgcaccatctccccgcgggactgcagcattcttggtcggccaaggggagttggatgttggatgtccaggaacggcaaggcttccgacctctggcccctgcttgtcccctctgagggatatctgggtccataaaagttgagcgtcagtctgaagccgcccttggatcgggctctcgcccatgctagagcggagggaggggacagagtaaggctaatgaccccctccacccactccctacctagcgtactcgtgctctcggagggacatttccccgattaacctggctgcaggtccggccggggagggcgcgtgggggcttggggcgggccgggccagcgatggatccgcgcgcgcgagggtccccaggctctgccgagaacgcgaacgagggtggaggtggagtgggcagccgggcagtggcggcgctgagggtcgggaaagattcccagcgcaaggggcgccaagtcccgggagccaaccccaccgccgggagaacttttcccaactccctggggaggccggcagcagggctgggaaggcgcctccttgggggcttctcttctcggcctctgctccacggccggcgccagcttcccgctgtcccccactcactgcgagactgcgcgcaggtctccgtcagcccactccccgggtcagcaccgcgg

SEQ ID NO: 5972 - DNA, 1529 bp, Homo sapiens
cagctaatttttgtatttttagtagagatggggttcaccatgttggccaggctgctcttggactcctagcctcaagtgatctgcccaccttggcttcccaaagtgctgggattacaggcataagccactgcacctggcttgcattctaaaaggaccatgttggtggcttggatgggggcagtggtgggggtggtgacaagtggtcaactcttggacactctctgaaggcaaagcagcaggacctgtgatgggctggatagaggatgcagagacaagcccgggactgtgaggtgtgggcctgactggaaggctggagctgccgctagccaggagggaggacgtgggagggcaggtccaggatgagggcaggtccaggataagcccaggacttcagccatggacgggctgcactgtgctaacgaggctttccaactggacattctcaccactgtgcaacttttaaaaggcccatgtctgtagggacttggaagtagggcaccctgcaggtttatatagtgtctgacattcttgaggctgtcaaccacaggaagcaaattcctcttgcctctggtctcctgctggagagggcttgtatcagtctgttctcatgctgctgataaagacatacaagacggggtaatttataaaggaaagaggtttaatggactcaaagttccacatggctgggaaggcctcaccattatggtggaaggtgaatgaggggcaaaatcacgtcttacatggaggcaggcaagagatagagcccttgcagaggaactcccatttataaagccatcagatctcatgagacttattcaccatcaccagaacagtatggggaaccatccccatgattcgagtatctctacctggccccggtcttgacacatggggattattacaattcaaggtgagctttgggtggggacacagccaaaccatatcaggactgaagtcacacttgtccagtttgcaaatctatttcttgttttcacaaagctgagccttccacatgaggaagccagagaaattgccccacaggaggtcactgccttctcctgttggccagaactggaccagagctgcagtacctacagggccccacctcaggccggttctcagagtctccggaatggcctggaaatgccaactctcacactgtgtctctaaacgggctctggagtcagtgagccttggtttaaatcccctatgcactctgtaactggctgtgttaagagacactatctcttaacctcactgtgcctcagcttcctcatctgaaaatggggacaataatagtgcctgactcgggtattagtgaggactgaaaatggtgcaacatcagtgtttaataaatgttagatctcattatctgtacgactgtgtaatcatttagagagggaaggagtccaggtggcctgtgactggtaccagccggtcgagggcaggagtgacctggggcctcccaccctggctgacctcattgctgccagacctgtccccaggtgaggggcaccagaatgtttctc

SEQ ID NO: 5973 - DNA, 1489 bp, Homo sapiens
gacttcctggggccccgctgggatttcttcgctgctctagctggcaggacacatcccggcctcttccacccattcccccatgtggctgaagacattccaacaatggggtgggcccataatagttagccctcagtcagttcccggagcacagccctgggagggggctatttctctccccactgaaaacatttcaaagctgagttacttgtctgaggcctcatccctcggaagccgtctgactccagagtctgagcccccggctagtaccctatagagagggggctctccaaaggggctgctggggcatgtgtgcctgtggcagaaaagaggagaccctggaattcagcaccctgggtgccattcccagcgtttagtttctagaggcctcagtttctccatcagcttatgggatccttgtctttactgacaagaatggaatagaaatgtaaaagtactctgaaaagcaattgccctgtaacttatctagaaagaaaagaccctgagactccagaatctgctgttgccatagccccatatgtgtgaattctgcaactagccaaggctagttcctttcaattccatttaaaaaacaaaaaccagcaggtgtggtggctcatggcgtaatgggcctgcccaatgctttgggaggccaaggcaggtagatcgcttgagcccaggagtttgagacaagccctggcaacatagtgagatcccatttctacaaaaaaaaaaaaaaaaaaattagccgggtgtggtggcacacgcctgtagtctcagctactcaggtggctgaggtgggaggatcgtttgagccctggaggttgaggctgcagtgagctgtgatcgcaccactgcactctggcctgggcgacagagtgagacactgtctgagaacaaaaaacgactgaaaaaaaaaatcaccttagctttttctcttagaatcttctctaaaacgtattctttgtggcattctgaaataggattcatgatgatgcctgttgatcttagggacactacctcacctgccagtatctttggggctgtgtccttcaaggacatgtccccagactgctgtgcagtgtcattttttgtgtttggtttggtggtggcttcttcccccttgctaggctatcaacctcttatcaccacttgttggtgtcagaactaactgcttctggtctggagagggactgaccgatgcctttgggtagagagaattatgaaagaaattttggtatttttctactttatattttctgaggtttctgtaataagcatatttcacttttccaataagaaaaaaaaaaacttggcctggcgcggtggctcacacctgtaatcccagcactttgggaagtcgaggtgggaggatcacttgagttcaggagttcgagaccagcttgggcaatatggtgaaaccccgtctctactaaaaatacaaaaattagccaggcgtggtggcgtgcacttgtagtcccagctactcagg

SEQ ID NO: 5974 - DNA, 1097 bp, Homo sapiens
ttctctttgccctagatcgtggggatcatcacacggcacaacctcacctatgaatttctgcaggcccggctgaggcagcactaccagaccatctgacagcccagcccaccctctcctggtgctgcctggggaggcaaatcatgctcactccggcgggcacagctggctggggctgttccggggcatggaagattcccagtcacccactcactcagaaagccgggagtcatcggacaccttgctggtcagaggtcctgggggtggttttgaaccatcagagcttggacttttctgacttccccagcaaggatcttcccacttcctgctccctgtgttcccaccctccagtgttggcacaggcccacccctggctccaccagagccagaagcagaggtagaatcaggcgggccccgggctgcactccgagcagtgttcctggccatctttgctactttcctagagaacccggctgttgccttaaatgtgtgagagggacttggccaaggcaaaagctggggagatgccagtgacaacatacagttcatgactaggtttaggaattgggcactgagaaaattctcaatatttcagagagtccttcccttatttgggactcttaacacggtatcctcgctagttggttttaagggaaacactctgctcctgggtgtgagcagaggctctggtcttgccctgtggtttgactctccttagaaccaccgcccaccagaaacataaaggattaaaatcacactaataacccctggatggtcaatctgataataggatcagatttacgtctaccctaattcttaacattgcagctttctctccatctgcagattattcccagtctcccagtaacacgtttctacccagatcctttttcatttccttaagttttgatctccgtcttcctgatgaagcaggcagagctcagaggatcttggcatcacccaccaaagttagctgaaagcagggcactcctggataaagcagcttcactcaactctggggaatgctaccattttttttccaaagtagaaaggaagcacttctgagccagtgaccactgaaaggtatgtgctatgataaa

SEQ ID NO: 5975 - DNA, 1097 bp, Homo sapiens; identical to SEQ ID NO: 5974

SEQ ID NO: 5976 - DNA, 1129 bp, Homo sapiens
gttcccatcagtttagcccagagatagacagtagaatgcaaatacctccctcccctaaactgactggacggctgccaaggaggccccaaacccaggccccatgcaaaggcacgtggtttccttttctcctctctctgcatctgcgctttccagataagcccaaagacagcaacttctccactcatgacaaatcaactgtgaccctcgctccttccatttctgtccattagaaaccagccttttcagcatctcacccattagcagccccatcacccagtgatcagtcgcctcagtaaagcagatctgtggatggggagcctacgggtggtaagaagtggtgttttgtgtttcatctccagcttggtgttccatggcccctaggcgaggtgatcagggagtggggccaatgggcccccggccctggctttgggaccttgtgctgagggatgatttgctcctgaccttgattaacttaacagttcccagctggaagggacactttcaggacccagtccactgtatggcatttgtgatgcagaattatgcactgacatgaccctgggtgacaggaaagcctttcgagaggcccaaggtggcctcgccagccctgcagtattgatgtgcagtattgcaccacagctctgcggaccttggccattgccgcagtcgcagcttccttttttctgtttgcactgtttgtttgtatgatgttagctaattccactgtgtatataaattgtattttttttaatttgtaaaatgctatttttatttgaacctttggaacttgggagttctcattgtaaccctaacatgtgagaataaaatgtcttctgtctcctctgtctcctttagccttttgtctccatgctgctttctttctttctttctttttttgagacagagtctcgctgtcacccaggctggagtgcagtggtgccatctcagctcactgcaagctccgcctcccaggttcacgccattctcctgcctcagcctcccgagtggctgggactacaggcgcccaccaccatgcctggctaattttttgtatttttggtagagatggggtttcaccatgttagccaggatggtctcaatctcctgacctggtgatcctacccgcctc

SEQ ID NO: 5977 - DNA, 1359 bp, Homo sapiens
gaatcacttgaacccgggaggcggaggctgtagtaacctgagatcgttccactgcactcaagcctgggcaacacagtgagactctgtctcaataaacaaataaatacatacatacataaagctacaagactggagagagaaaggacagagaggagaagtggcctgagactggcctcagcactggtgactgatctggcgcaggatgtctgaccatagggttggtgccaagtcctggctaagtctgtgttcctctgggctctggcaccaggccccgctgctttttaacaggattctagatttcaggcccacaggctcaagttggtcgtgtaaacaagacaggctgactttcttctatactttagggagatgggcaccactgtctttatcattaaggcacaacacctcactcttctgctgcccttggtctttatttcgtatgctctgcctcccagctgtccttcccccttaacatgccgctttcatggtgttgcaggagtggaaatgaagaagatcactgacacccacacgccgtctggcctcaccgtgaacctgacgctctattacatgctctcctgctcgccagccccactgctcagcccctccctgagccacagggagcgagaccagatggagtcgacgctcaactatgaagatcactgcttcagcgggcacgccaccatgcacgccgagaacctgtggccggggcggctgtcctccgtccagcagatcctgcagctctctgacctgtggaggctgaccctccagaagcgtggctgcaaggggctggtgaaggtgggtgccccaggcatcctgcaggggatggtgctcagctttggggggctgcagttcacagagaaccacctccagttccaggccgaccccgacgtgctgcacaacagctatgcattgcatggcatccgctacaagaacgaccatatcaacctggccgtgctggcggatgccgagggcaagccctacctacacgtgtccgtggagtcccgtggccagcctgtcaagatctatgcctgcaaggcaggctgcctggacgagccagtggagctgacctcggcgcccacgggccacaccttctcggtcatggtgacacagcccatcacgccactgctctacatctccaccgacctcacacacctgcaggacctgcggcacacgctgcacctcaaggccatcctggcccatgatgagcacatggcccagcaggaccccgggctgcccttcctcttctggttcagcgtggcctccctaatcaccctcttccacctcttcctcttcaagctcatctacaacgagtactgtgggcctggagccaagcccctcttcaggagtaaggtaggaagccgc

SEQ ID NO: 5978 - DNA, 1182 bp, Homo sapiens
gtggcggcgcgcgcctgcagtcgcaggcactgggcaggttgaggcaggagaatcaggcagggaggttgcagtgagcagagatggcggcagtacagtccagcttcggctcggcatcagagggagaccgtggaaagagagggagagggagaccgtggggagagggagagggagcgggagagggagagggccatctcctttttcaaaatcaagaaactgagatttgaaaaatagtgacgtgtcctctgctactcggctgatgagcagcagagtcaggatctcttgtgcccaaaccagggtgcacagctctgtgctgttgcttctcaggccgtggtgatgctgagtgtgtttggttgttatgattattcagtctcagcagggtgtaggagattctgccaaaccaggcctggctcagggcagagctgctggcagggatatagacaggcccagctgctccctactgtgggtgggctaagccaccagtggcatcttgctccacacaccccaactgggtcccttctctctcctccccagggaactgtctgggacctttgctcatctgtgtcagcaagttgacgtcacccgggagaacctggagcaggaaattgccgccatgaacaagaaaattgaggttcttgactcacttcagagcaaagcaaagctgctcaggtgaggctggcccgtgtggccaaaggttagggctccagggtgcagcccaggcacactggggctcagctgctgggcttgcgtcttgggtgtggacacaaatttttctggtggggatttagctcattcgtgttagatgtgtaccatgggctgggcacggtggctgacgcctataatcccagcactttgggaggctgaggcaggtagatcacctgaggtcaggagtttgagactagcctgaccaacatggtgaaaccccgtctctactaaaaatacaaagattagctggtcgtggtggtgtgtgcttgtaatcccagccactcgacaggctgaggcaggagaatggcttgaacccagaaggcggaggttgcagtgagccgagattatgccattgcactccagcctgggcgacaagagcaaaactctgtctcaaaaagaaaaaaaaaatggatgtgtaccacgtacctcatggatgccagatggtgctggaggctcaacaagacacagcgtcgctgcctt

SEQ ID NO: 5979 - DNA, 1236 bp, Homo sapiens
tggtaccaaggagttaagttgaggctttttccagctttctctggttcatttgattgcttgataaggcctcaggatctcagcattgcacaatgcctcatggaagcctttgagggtatcacacagacacccccaccttcctccagcctgtgcgcacctgccctccttgcagcccagcacacctgcaggtgtaagggacgattggagtttcttcccagagagtctgtcccagaaggactgtggcttgtgtgtgtccatctcgcctgttggctcagtgcttcatcccatttgcagagcctcagacacgtcttggtggtgaggctcagttacccctgggcttaggctgaggcgggccctgtgctgggggtggtagaaaggatgctgctgaggcagctggaggagtgggagtagctcagaggggagggctgttggatgtatggggagctggcagagcaggtggcagtcactgggacaaggagggacttgcctctcttctcattattgtgtcctttgctttagtgtcagtcctggacttgtgcaggcctgttttgtgtagatctgttttggaagatggcatggtctaggtggttgaaggatgtagtagaaggatggatggtggaaggtggggacgttggtggctggctgaggtgcatgggccccacacaggacagctggagaatgggccgtccacttggcctcgttctgcgaggggctcatgggtctgagagcccccacccactaggcttgattgcatccctgttgtgccctttaagagacatgtttccaccccacccccaaccttgtcccaagtgccctggactaaatttcctgtgccagtgactgcagttggccaagggacaatgtggaaaacccagtgtccatctttccaccctccctgatctccagaaccttcgactgacccccttgtctttatgctgatgttgagttttgggattgttactggttgaagtgggggcagatgcctgtcaccaaggtgttgactgtgtgagaaaagcagtttgggtgacaaatcctgtgtggcacaagttggatcgcttcctagaaataagcaacacctctcccaaaaagcagcccacaaggcaggggcccagcagcccagccatcactcatctttgaggaaatgagttggtagcctctgtgcactgtttggtggccacatcacaggtgatgtcctgttcacatacctgcttgtatttaaagccctcagtctgtcctgtt

SEQ ID NO: 5980 - DNA, 1245 bp, Homo sapiens
gaccctgtctcttaaagaaaaaaaaagtcagactgctgggactggccaggtttctgcccacattggacccacatgaggacatgatggagcgcacctgccccctggtggacagtcctgggagaacctcaggcttccttggcatcacagggcagagccgggaagcgatgaatttggagactctgtggggccttggttcccttgtgtgtgtgtgttgatcccaagacaatgaaagtttgcactgtatgctggacggcattcctgcttatcaataaacctgtttgttttacacgtcgacccctggctctgcctggggtctgggcttgggtttgtccatgctcctacttgtctgccacccctgtgtaaggggagatggcgtcacggtccctggagtctggctggcccctgttgtgactggaccacagagggacccctgttacagccgccccctcaagcctgtgaaccataagagaacttcctgctcgggaccacacagctggctgggttccaagtgtgccctggtctcatgccttcatcctccaggtctcctgggcctgctctcaggaccgggatggggtctctgcagatccctagcagcctaggcagccaggctctgccctcctggggaccccactcggggagagtggttgcccctgggatactcagaccagtacagggttttgggggcccagaggacatccctgggcccaggtaggaggttagaacagggttctggagatgacctctgacctcctcctgagggatgagcagcagttttccagaacaaaggattgcagggaactgtcaggcaaaaggagttctgagtttaaaggccttagcctggccagcatggtgaaaccccatctctaccaaaaatacaaaaaattagctgggcatgacggtatgcacctataatcccagctagtcaggaggccgaggcacgagaattgcttgaatcaaggcaacagaggttgcagtgagctgagatcgggccactgcactccagcctgggtgacagagtaagagtctgtctccaaataaaataaataaataaaatcaattaattagaagaaagccttggaggggagagagaccttggcctgtgtattggttccactgaccccctgggtcaccatcgtcactccagctcctgtgactccctcagtgggaccattttcattcttggtgattataggatctgtgattgatggaacgccccgcctcctggcttctcgccctcctctcctc

SEQ ID NO: 5981 - DNA, 1182 bp, Homo sapiens
taaatttggagtagtattctggaaagtgaatgtcattaaagatttttagtagttgctttgcaaagcctagtgtcctccattgtatgcatcccccaattggtatgtgtccagtccttttgagaaccactcaacctggggcagacagtataggtaactgcatttaaaatatttaaatttatttatatttaaattattggccaggcacagtggctcacgcctgtaatcccagcactttgggaggcctaggtgggcagatcacttgaggtcaggagttcgagactagcctgaccaacatggtgaaaccccatctctgctaaaaatacaaaaattagccaggtgtggtggtacacacctgtagtctcagctactcgggagcctgaggcaggagaatcacttgagcctgggaggcggaggttgtgatgagatgagatcacaccactacagaccagcatgggcttatctaattgtatttaatttaaatttatttaaagtaattcaaatagtaaaaatagtgccaagactttaaaactcttctcctgcttttaactccttctagtttgctggaacattatcagatggcttagggaagacgatggacaatcggcatcagtcagagcgggagtacatcaggtaccatgcagccacaagtggtgaacaccttgtagccggcatccatggcctggctcatggtaagtcatgggtgacatcaggctctgctgctgctggtcctcagaggcgcctttgtatcaatctgattgcagctataaaaaaagaaaggtgggctgggcgcggtggctcatgcttgtaatcccagcattttgggaggcctaggagagtggatcatgaggtcaggagtttgagaccagcctggccaacacagtgaaaccccgcctctactaagaatacaaaaattaggccaggcacagtggctcaatcctgtaatcccagcattttgggaggtcgaggcgggtggatcatttgaggtcaggagtttgagaccagtctggccaacatggtggaaccccatctctatcaaaaatacgaaaattagacaggcgtggtggtacatgcctgtagtcccagctactcgggaggctgaggcaggagaattgctcgaaccctggaggcagaggttgcaatgagctgagatcgtgccactgcactccagcctggcaacagagc

SEQ ID NO: 5982 - DNA, 1203 bp, Homo sapiens
catgtgcctggttcacaatgcgtgttcactcctgaagtccctgccacctctgccagaaagggacctgctgaattgtatagccctgcagggccaggtgccatactcgattagcagagcaacccagaaagcttgggatttgggtgctgctgaataccactgcaagctgttttcctttctaagtcacactttacagagcatagttgtcatttgtctctgtgtacgtatttgtaaagcatttggagatcccaagcatgctgactatagctctttaagtttgtgtgtgtgtgtgtgtgtgtgtgtgtgtgtgtgtgtgtgtgtgtaggggtggggggcgcggggcaaacaaacctaaatagaaaaataatgagaattacagtttcgaatttcagttttcaccttgtatttttcttttctctgtcgcttgttttgtttttatgaaatgctttatatagagtacttgcatataatgaaaaagaattatccttaaaagttaaaaatggaggcattttaaagatactcctattttaacaaaagttttttacttttctccattttcaaggtgtattacccaaatttgggatggatgtgcattgatgccactgatccagagaagggaaactggctgcgatatgtgaattgggcttgctcaggagaagagcaaaatttattcccactggaaatcaacagagccatttactataaaactttaaaggtaacagcattagaattaatttactgttagttacgctgcttgtgttttcctttttctttttttgagacggtctcattctgtctctcaggctggagtgcaggggctccatcacggctcactgcagcctaagcctccccagccttgggcgatcctcggacctcaacctcccgagtagccaggactatgggcacatgccaccacacccggctgagttttgaattttttgtagagacagagctttgctatgttacccaggctggtctcaaactgctgggctcaagcgatctacctgcctcagcctcccaaagtgctgggattaccggcacaagccacaatgcctgggcctgcttatatttttctaatgctgtccttagttgtgactgacaatgactttgcagacctgggagggattatattgggaagtgctttatccacactcttaaggttctgtgttttaatatatggttacctgtgtgtgtcatggagctaaa

SEQ ID NO: 5983 - DNA, 1130 bp, Homo sapiens
atcattcagattgttcaccaagtagctggtttcccatgcttcacttccatgcttctgcttccatgtgctttctaggtcctaaagaagacgaagagaagccttcagcctcagcacttgagcagccggccaccctccaggaggtggccagtcaggaggtgcctccagaactagcaacccctgcccctgcctgggagccacagccagaaccagacgagcgattagaagcggcagcttgtgaggtgaatgatttgggggaagaggaggaggaggaagaggaggaggatgaagaagaagaagaagatgatgatgatgatgagttggaagacgagggggaagaagaagccagcatgccaaatgaaaattctgtgaaagagccagaaatacggtgtgatgagaagccagaagatttattagaggaaccaaaaacaacttcagaagaaactcttgaagactgctcagaggtaacacctgccatgcaaatccccagaactaaagaagaggccaatggtgatgtatttgaaacgtttatgtttccgtgtcaacattgtgaaaggaagtttacaaccaaacaggggcttgagcgtcacatgcatatccatatatccaccgtcaatcatgctttcaaatgcaagtactgtgggaaagcctttggcacacagattaaccggcggcgacatgagcggcgccatgaagcagggttaaagcggaaacccagccaaacactacagccgtcagaggatctggctgatggcaaagcatctggagaaaacgttgcttcaaaagatgattcgagtcctcccagtcttgggccagactgtctgatcatgaattcagagaaggcttcccaagacacaataaattcttctgtcgtagaagagaatggggaagttaaagaacttcatccgtgcaaatattgtaaaaaggtttttggaactcatactaatatgagacggcatcagcgtagagttcacgaacgtcatctgattcccaaaggtgtacggcgaaaaggaggccttgaagagccccagcctccagcagaacaggcccaggccacccagaacgtgtatgtaccaagcacagagccggaggaggaaggggaagcagatgatgtgtacatcatggacatttct

SEQ ID NO: 5984 - DNA, 1229 bp, Homo sapiens
aaaacttaaattactatattgatggtaaaattcaaactaataacaacactagtaactgtgatgtgattgagatggagtctgcttcggcagatttgtatggtataaattgtctgctcactccagttacagtggaaattactcaaaatataaagaccacacaggtccctgtaacagaagatcttcctaaagagcctttgggcagcacaaatagtgaggccaagaagcggagaactgcgagcccacctgcactgcccaaaattaaggccgaaacagactctgaccccatggtcccctcttgctctttaagtcttcctcttagcatatcaacaacagaggcagtgtctttccacaaagagaaaagtgtttatttgtcatcaaagctcaaacaacttcttcaaacccaagataaactaactcctgcagggatttcagcaactgaaatagctaaattaggtcctgtttgtgtgtctgctcctgcatcaatgttgcctgtgacctcaagtaggtttaagaggcggaccagctctcctcccagttctccacagcacagtcctgcccttcgagactttggaaagccaagtgatgggaaagcagcatggaccgatgccgggctgacttccaaaaaatccaaattagaaagtcacagcgactcaccagcatggagtttgtctgggagagatgagagagaaactgtgagccctccatgctttgatgaatataaaatgtctaaagagtggacagctagttctgcttttagcagtgtgtgcaaccagcagccactggatttatccagcggtgtcaaacagaaggctgagggtacaggcaagactccagtccagtgggaatctgtcttagatctcagtgtgcataaaaagcattgtagtgactctgaaggcaaggaattcaaagaaagtcattcagtgcagcctacgtgtagtgctgtaaagaaaaggaaaccaaccacctgcatgctgcagaaggttcttctcaatgaatataatggcatcgatttacctgtagaaaaccctgcagatgggaccaggagcccaagtccttgtaaatccctagaagctcagccagatcctgacctcggtccgggctctggtttccctgcccctactgttgagtccacacctgatgtttgtccttcatcacctgccctgcagacaccctccctttcatccggtcagctgcctcctctcttgatccccacagatccctcttcccct

SEQ ID NO: 5985 - DNA, 1130 bp, Homo sapiens
ctttttgcttcatggagttgggaatatctttgtgtgttctgtttgtaaaaaagaatttgcttttttgtgcaatttgcagcagcaccagcgagatctccacccagataaggtgtgcacacatcacgagtttgaaagcgggactctgaggccccagaactttacagatcccagcaaggcccatgtagagcatatgcagagcttgccagaagatcctttagaaacttctaaagaagaagaggagttaaatgattcctctgaagagctttacacgactataaaaataatggcttctggaataaagacaaaagatccagatgttcgattgggcctcaatcagcattacccaagctttaaaccacctccatttcagtaccatcaccgtaaccccatggggattggtgtgacagccacaaatttcactacacacaatattccacagactttcactaccgccattcgctgcacaaagtgtggaaaaggtgtcgacaatatgccggagttgcacaaacatatcctggcttgtgcttctgcaagtgacaagaagaggtacacgcctaagaaaaacccagtaccattaaaacaaactgtgcaacccaaaaatggcgtggtggttttagataactctgggaaaaatgccttccgacgaatgggacagcccaaaaggcttaactttagtgttgagctcagcaaaatgtcgtcgaataagctcaaattaaatgcattgaagaaaaaaaatcagctagtacagaaagcaattcttcagaaaaacaaatctgcaaagcagaaggccgacttgaaaaatgcttgtgagtcatcctctcacatctgcccttactgtaatcgagagttcacttacattggaagcctgaataaacacgccgccttcagctgtcccaaaaaacccctttctcctcccaaaaaaaaagtttctcattcatctaagaaaggtggacactcatcacctgcaagtagtgacaaaaacagtaacagcaaccaccgcagacggacagcggatgcggagattaaaatgcaaagcatgcagactccgttgggcaagaccagagcccgcagctcaggccccacccaagtcccacttccctcctcatccttcaggtccaagcagaacgtca

SEQ ID NO: 5986 - DNA, 2209 bp, Homo sapiens
ctcagcctcccgagtagctgggactacaggtgcccgccaccatgcccggctaattttttgtatttttagtagagatggggtttcaccgtgttagccaggatggtctcgatctcctgaccttatgatccgcccgtctcggcctcctgcagtgctgggattacaggtgtgagccaccgtgcctggtgtttttgggttctttaatgcttcttttagagccacatttttcttttcaaaccgagttcccatcgcagtcaagaaaaaggtagagaagcaaaatgaaattctagaccaagtttttccatttaccaggaattgatttaaaaaaaaaagtgctaatttctcatgcctccatctctgctacatcccttggaaataaatgcgtgtagttccttgcagggtgtgtcttctgggtaggacgctcgttcctaaatgccttcagtcatgtatgtgttgtcgtcttaataacatttgtcttacggtctattcacctttttctttaacatggtcaatcatgtaaggttatgttctgttgtcatttatcttcagttttcttattttctaggaacttcctgtagaaaagcccccaaaacaaaacaaaccttaattgactaaaaagtattgcatgctcaacttaggataagcactacggcaaaggatacgaaatctaccaagcttgcaagaccagttgaagctgactcaaaaatcctaacattcagctgattgccggcaggcttagagtcaggcatctgctgcttcggtgggggcccaacgcgcatgctgggcgcccgggtgattgagatccaaagagaagggcactgtaagacaggccagatgaactggctcctcgtcatgggactggtacctcagatctgagcatggcccttgtttttggcacgtagcagagaaaggattgatttgaacttaaccttgcaaagcaagttgcctgttttagcagtagtttgttgtaggtttcagggatgacagatttggatgcactcatttaaaacgttttggtcacatatcagctcttgatgcctttcttttaaattaattatagacagagagaggcatttagctgatctcttacccctggtatttcttttttttgttgttttcgtttttttaaatcacaagtagattgccagcgtaatggagaggaaaccagattggatatggactcttttttatgcctattctggtgttgcgtttgtatatccaaatggacgttatcctctcagattcttatctggcactaatttataactattatattatcagagactatgtagcaatatatcagtgcacaggcgcatcccaggcctgtacagatgtatgtctacacgtaagtataaatgaatttgcataccaggttttacacttgcatctctaatagagattaaaaacaacaaattggcctcttcctaagtatattaatatcatttatccttacattttatgcctccccctaaattaatgactgagttggtggaaagcggctaggttttattcatactgttttttgttctcaacttcaaaagtaatctacctctgaaaaatttgtagtttaatatttgtttggtgaatttgtgccactttaatccttccactatcattcccattttgttacatttctgttatggggactttatgttgaaatattgtataaagcatttgtagcaatttaaaaataaaatatttaaaattatttaaattgttttggacgcttcaattgtattatatgtgatttacatttcactttttttgttggcgttgttaacccggagagtgctcctgtattgaactttgctgttagttattttattgcttctttttggagagtgctataaaagactattctaatgaaaacattaaaatttacaatttgacatacaaaaaggggttgtccattgattttaaccaatgtagcactgagagagagagaggttaattatagatagacaagagtggtgtttgttgtttttcccctcccagcattgaaatcattggggcttgtcagatgtattaaaaaaagatttgttgtgctattgctgcaaacacttaataactagaggagaatttaaacaatgcattttatattattgtaaccaataaaaaactttctaaacatctgtgaaaggactgcattttgtacataattgggagcagttagggggtaaaacaaggtgtgtgtggaggattgttcagagcc

SEQ ID NO: 5987 - DNA, 1219 bp, Homo sapiens
gcagggaatggggacggtgtatggaggggagggatctcctgcgcccttcattgccacacttggtgggaccatgaacatctttagtgtctgagcttctcaaattagctgcaataggaaaaaaacaaattgggaaatgaaaaaaaaatgggaagattaaaaagcacagggggaagaagaagagatttcggaggccatcctgccaggggcggacggggctgactcctgctctctggaggacggtcagtccatgtctcggagaaacgggtgagctgagcttggcgtttggacccagttcagtgaggttcttgggttttgtgcctttggggcagaccccaggcaaggatgtctgagaccacttgggcgctgttttctcagctccaatttcaagagtgagctatcaaacccagagcggaaggagggagctctgatgagcacggtttgtcacacgataaagggattttttttttcagggctactacggttgatcttgcaactctgtaaatatgtatgtagacacttttaaaagcacgtatttatgtccctgactgtaaatgctccatttttaaagttttataacttgtgttatttaatgagtcagtcaatcggctgcagtatgggatctgataaggatctaggagaagggtctcatgcggaccctcacatgggcagaaaaatggtggtcattggccgacatcacagttttcctgtttcccacccagctaaaaaccgttgtttgctttaaattttcataaactggaatcctttcacccgctcctacagctaaccctcacaagcatgaagtgctgtggctgttccttatcctaatgatgcgcttttgtcccgtaaatgttaacactcatgaagcataccccggcctctcagttcttgagggcctccccaccgcagcagcaaggaaagctcacgaaccccaaacctggcaagtcacctgcagcccatggtgagctctgggaagtgtggttgaggccttggggtcactccttttttgcatgtgcaaatgtgctggtcacccttcaacgctcccagacggtcaggaaaactgttccaatcatgaaaaggggggatgattttgtaaaagtggcatttcctggtcagtggtggtcttcaagacgacagctctgtatctgccatgtgaagagaattaacaataaaagtgtgaagagcgattgtgaggaacaagcctgggagtgatcattctggt

SEQ ID NO: 5988 - DNA, 1256 bp, Homo sapiens
acgtcagcacatttgcatgtagacagattttagtcccagcagataagcacacccaacatgtcattaaacccggccgaagccatcgccctggggatcccgtgtttgctgtgagtcactaagggctgtaaacactccagagagacaggcatggttataaggggtgtgcgggcgtggagttattttaatggatttactctccgtgagtgcgtcttatgttgcgggtgccagatgagtgcctttcaagggagagggaaggtcaggcttgcctcctgttcacaaggacaacctctgtctcccttgtggcggcttctatgaaggtggggactccaggctttctctcgtctgctttttggatgccttcaagagaggccagttagaggatatcaattgtggcaattccccagagccctcatcagatggcattagcccgtcatgtgctgcagtggcacccagtttggaggaaattcggaaccagaagagtgtgacaggtacgtgagtgctggccgctgtcccagccctgaactggctgacactgagtctggcctaagcagcggggagctggtgggctctgggtggggcccgtcctcagtctacgtgctggacactggggactgttttgggaaacaccctccacctggcaccaggtgggtaatctgccggtgcccgtggtctcgtcttttgttgcttcttggattcggaggctggctcaggctcccagctagtttgggctgtaactttatcacaggcattcactgtgttcactaccttttaattgtacagaagtttcagaaaagctctcctggggaattggagagaagtaaaaacaacagctgctatttcccggatgctttattccctcccctcacagcacagcctcagcagcatgttcctgactttgaagttctatgtgcccaggctgggaagaatgtggattttcgctcagtcgggtcccattagtgtggaaggatcattgactgagggccgagcaggaaccaagcaccttgttacatgtgttccttttgatccccctcttcctgtcaggcagctgccattctccccatcttacgggtgagaccactgaagcttgggagaggttacaccggctgtggaaagtagctgttccaggctgccatgctgccctcctgggacccttcctcctgcagtttccttgtcagctgacgattccccgggctaccaggccacagagcggaggctgagctgccgagagtcacaggacttttcttcctggcaccttc

SEQ ID NO: 5989 - DNA, 1681 bp, Homo sapiens
ttgtaaatgtccctcgtccaaaccgctactcctggagcccgtctggcagaggatgtggtctgtttttgatgtcccccctcccgcccccctggtgtgaacgtgtgggaccagaccctgtcctgggggtgcgcccaagtcactttaaccacaaaacgccatcgtcgtcagggtaagctctgctctctacaaagactcgcgagccgggccaaggggccttgtcttggctgggtttgtcagaggtcaaaccggctcttttaaacggcctaccagtttttaaattgcattgccgtttctttctttatgaaaaaaaagaaaaaaagaaaattgtttcatttaatttatttgcacaaatgctgaaaacttattctatctaaattattacataaatattggaatgtctatttttccatggggtgggcgggaggtgggtgtctctgttgacttgtctgttctgttaccatgctgctacccaactgtgcaaagtagtttagggtggccagaacccagggaccattggatttcaaagcttgctttttctgttggttcttctctctccttctctctctgtctctcccattctcctgcccatgcatgaaaggatcctccaccttcttcccacccagagctccctccaggcctttctctatatatttatttatctgacatacagaacacgactttagtgagcagagtgctgacagtcatggtccccttctttgggtctgtcttttgagagaggttgagttcagggcaagacagcctgccacacatccaagggtacgaccagtgggaccctggcctgagtctgttctccgaggggcctccagcagcttctgttcctccctgcagctgtgtctttcttgtcctgggtttaggatgcaggtgggccaggcaggtgttgttaggggaggcacccacttcaaaaggagggccacagtggggacacagagtccagcacctgagccctccaccctccccattctggttggttccatcagccacacttagaatctcccaggatcccttggactccgtcccccaacttgtcacagcagcctgagcctacccaccccaggagacaagagctggcaggaacatctgcctatatggggggtggcgttggccccaaagaggcttcaccagcaaaggaactgtgtgtattttaatgccaggggacggaggatgtgtgagctgttcagcaaggtctgcccaaggcctaaaactcaatttccttattcttttgcttctgctcgtccttaacaactaacagctcaacccacacctctagacaacagtagtcgtgctttctgctaacggtgacattttcagctcttaaaaagaagcaaggagattttcaaatgctagagtatctctatcagaaggcataggacattgtgtccaaagtctcaagaacaaacaacactttccttctgacctggtccaaaagtcagcaaacagcaagcaggcagaggccctcataaggacttttctgtcctcctttgaccaaactgtttaaccgagcctaggggtgacggggagcgacccaagctggcatctttctctacggagacagattttagaaaatacttttcttgcccatgaatttcttttctggttgatttttatcattttccctttacttacaagaaaataagattgcaaccactcctgctaatgattt

SEQ ID NO: 5990 - DNA, 1235 bp, Homo sapiens
cattgttaacccaacaaacctttgttgtgatgtccctgtcacctgaaacataggtgacatagctcaccaatgtcctaaccgagacacaaactccacagagcaaaatcatttggtattggtggggagaaccccagcccttttcttgacctgccactgttatgctgtgtggcttcttcccagtggcctcacctctctgtgcctcgatgtcttcatctacgatacttctggttccctcccagggacatcgtgaggattaacacttgctaatatctgtaacacaatttgtaacctctcaggagacaatgggaagttatggggtagctaatttcccatttacaacacagaaatgatatagagctagttcgctccaactctttaggttgaagcagtgtgcaaaaggaagaaaagaaatgtttaatgttcagacctgccaagagcctccaacagggctcaagaaacatataaatcccatgagcacagccttgaaaaccagtttgactcaagccttcgggcctcagttcattgaccagatgacagccacgtgatgattagggaaggacggatgcattgcgattctgcttacacatcgggttatcaaagcgagtcacttgttggaaccatgatgctcgacctccttcaaggccgtttgcactggggcttgagtttccaagattcacaacaggtgtcagcctctgagaaccctcaaagcgtgtgttcttcaacctggcaaattgtttcctctcatgggggaagccgagctctgatgaacttgagaattacacctctctcatgccgaagaccgtggtgttccccctaatgacataaacgcagcctttcttgctgtctgagaccaaatgtctagttggtagacaggtggatgtttggcctcctaagggcacacttctgatcctgggccccaggtggtgaatctctggcatgtggcttggctttgttgagactccaaattccattatcttcatgacattcggcctcatccatagggtcctgaagctgcagtccacagctcagaaaggagaggtgagacctccctccaacctggtgccacaggtctctcccaagccacatccagcctggatgacctgggaccccagaaactgccgtttgggaggcagcaacagcaacgtgcccaggcaggcagttattcccacagagtgagccagaattgtagcagggcacttgaatgcagagctgatgatttgaaaccaacgttcacc

SEQ ID NO: 5991 - DNA, 1233 bp, Homo sapiens
ggggacccctccccagggccttttcctcctctgcgtcttccatctactgaaatgggagagggggtggggagcttctgttctggtgaagggacccgggcaggcccccagcaccccatgctgacttggagaaccccagatctctggggcccagccaggcagggtgtgggggcagctgtgccaatctacctcacaggcccaccccctgccgggcatgccgtgggatcatgggcagggaaggctctgggggtcggagacaccgctgcttagcacccccagccagaacaccctgagggtctcggggctctggagagagtggggcgggaggaagaattggcaccttcctagggaaggagacgagcgcttcgccttgattctccgagaagcctccgagaagtgctttaagtgtgtttgcatgcgccaggcggtgggcagcgggggcctgtccagccctctcccgccatccttccccaagtgacgtccactgccttgtcaccagcgacctgcctgtcatgcccaccccctgaggaagcatggggaccctaacaccctggtgccctgcaccagacaggccgtggtcaggcccaggccaccggccgggttctgccacagcttcccacgtgcttgctgacatgcgtgtgcctgtgtgtggtgtctgttgctgtgtcgtgaaactgtgaccatcactcagtccaaacaagtgagtggccctcgaggccacagttatgcaactttcagtgtgtgtcataacgacgtcactgctttttaaactcgataactctttattttagtaaaatgcccaggagtcctggaagctacgcggacttgcagaggttttattttttggccttagaatctgcagaaattaggaggcaccgagcccagcgcagcagcctcggacccggattgcgtttgccttagcggatatgtttatacagatgaatataaaatgtttttttctttgggctttttgcttcttttttcccccccttctcaccttcccttctccccgaccccaccccccaaaaaagctacttcttcattccgtggtacgattattttttttaactaaaggaagataaaattctatattcttatgtgtgtatggttcttgatggtgagtgggcagggaaatgacaaggtcacctgggtgtggggacagtggtgtcagagcctgggagggaaggggacctgccctagtggaggaggttggtgttttatgcccagatgctgtca

SEQ ID NO: 5992 - DNA, 1448 bp, Homo sapiens
gtcctactccatagaaacccgactcagagcagttgcttcctctgagggtcctgtggccttgtggctgccttgggaggcagcatgtatgggccccagctgctctgctcaggtattcatgccacgagaaggggctgcgaggctggggccactcctggctccttgcaaatatttcagtctgatttgaactttatgaatttggaaattttgaattttgagttttttaaaggtaaagttgaggtgcgtattctttaagccctcctgctcaaagaggctgcagtttgagctgtttttaaggtgcgggttgagtggacattccccccagcccctcttgaattcttccttcagtccagagaactgaactcacagagctctccatggtcatgtcttacaggtcgctaatgctgtttcggtgaaagggatttataaacagatgcctggttgctttaatttcctccggaaaaaacttttctttaaaacatcataaggccagggcccctcaccctgccttatcttgcaccccaaagctttcctgccccaggcctgaaagaggctgaggcctggactttcctgcaactcaaggactttgcagccggcacagggtctgctctttctctgccagtgacagacaggctcttagcagcttccagattgacgacaagtgctgaacagtggaggaagagggacagatgaatgccgtggattgcacgtggcctcttgagcagtggctggtccagggctagtgacttgtgtcccatgatccctgtgttgtctctagagcagggattaacctctgcactactgacatgtggggccaggtcaccctttgctgtgaggctgtcctgtacattgtgggatgttcagcactgtcccttgcctcaatgccagtaacgcgtcttcctgagtggtgccaaacaaaaaggttctcaggtgttgccaaatatgtcctggggtataaaactttcctcgcctgacaaccactggtctgtagggatttttggctacacacaaaccagtatcgctcatagatcagcaaaccggggcctactagagtctgaacagctgtaatctatgaattctaagtgaaattttaaaaattgttaatttttcctatattgcattaattttaaaaaataaatctgaggcaaatatggactctcttttgcctatttcttccctcattttgctccaactctttcttcttccttacaaaagagacttttgcttttttcgaaacatttccccatgtttttctggggtctcgctatgttgcccaggctggtctcaaactcctgggctcaagtgaccctcccaagtagctcttactacaggcgtgcaccattgcacccagccccatttattcatgtcttatttcacttgatccttatcccatcccaggaaggcaacaagggtgagaaccctgtgctcagggaggttaggtctcttgtcca

SEQ ID NO: 5993 - DNA, 1337 bp, Homo sapiens
tcaccccaccctcctgtcctgtgtcttggagaagcacagggctccaccctgcaagcggcatctggcggaccctcatgagcctgtcgtgcaggccaggtcattggccccttccccaatcccggccctgctgtgctgctgccatggcgcatgctcctaactctgaacaacccacggcagcttctagccccgcatctggaaaaaggcccctttccaagcaatctcacgtttactggttgttctgggagtaagtggctaaatgtatattttgggggtatcccccaacaacagtttgttggccacaggttgaaaaggaaaggaataaacgggagttctgcatgtgagttctcaagaaaaggaaagggaggctgagcagtggctgaagcgatgcagccttgagacacgctgtgagcatcccatccgccgccccagcgctgctggtagccaggggaggggtctgcacagcgagaagtactgtgatgactttgagccgttgacatgtatgtcttcagatgcctttctgcctctgtcgattttagggtatggatattaggagccataacttgtaatcttgttctctgaacgtagagataagctgctataaagccagtagatgttaaactgaagagaaattattcccacctgctatgagtcaggcttaaggaatctcttcaatagtgtctctttagtaaaataccaaacatgtctttgtatcaaggaacttaaaatttctcaacaattgtattttgaacactgttaccctaaaagtgctgtctcttcaagtcatcttttgcaggaagtgagccaagatttgttctagactcccattttgcaaaaggcttactttccacttctgggctgtattttgatgtctcatcttcattgttttcactcttaacttagagctgcttcaccagtattggggtcagactggccatcagcacctgagcgtgctgagctccaggtatagtggaccccagggtgcctcataccagccagttagagagcataccttttatttttcagggcagaatgaccagtggttctgagtttgagtttggacagcttcaaagagtggtccgttcaaatgtcaaagcaaggtgcctttggtggctttgtgaagggtgaaaatcagtgatgggacatttactaagtatttctttttttttttttttttttagttgttgagacagagtttcactcttgttgcccaggctggagtgaaatggtgcgatctcggttcaccgcaacctccacatcccaggttcaagtgattctcctgcctcagcctcctgagtagctaggattacaggcatgtgccaccatgtaattagcccggc

SEQ ID NO: 5994 - DNA, 1165 bp, Homo sapiens
atttgcacttccggtgaaagaaaaagtttaagacttgcactacctcattttggggtctttggaaatgctctttacccaccacatgcgtttctggttaaattcttttgaaaaacagtacctattggttcaactcaagctgtttgtttgtttcggttctaccctggtagtaagccagaaggccctttttctttcaggtcacagttcagagtttgggtcagttcaaagctcaatgctttaaaaggatatttgcttggaaacggcctagtatcagtgctgtttggtggtttcatttccctactcagcttgctggaaagaagttcagcctctcatattttaactaagcaaagtaattctcaaaatgctttggggctgcccctagtctttatcaaacagaatcggtgacactaacgctgtaaactttacactaaaacacttagatcatgacttaataaatttagcctggaggaaatagtctaaacattaagaaaattatagaggtctcccaagtctccatcaagtaaatcttgattttctactgcagttatgaaatagtttacaaaacgattgcccaactgcagcttgttctgctgtcttatggtaaacacgtgtcaatactttgttcagaagtatgattcctttacacaatgtgaactttagaaccttggcataaagctgttcagaaagaatttaaaaagttaatccacaaaagctcaggaaccagttctgtcagtgaatgcctcatgtggagaactaggaaaggactgtttaaatagagaaaataaactcttcaattttttttctttttttgtttttgtttttgagacggagtcttgctctgtcgcccatgctggagtgcagtggtgcgttctcgactcactgcaaccccagtctcccgggttcaagcgattctcctgcctcagcctcctgagtaactgggactacgggcgcgcgccaccacgcctggctaatttttgtaatttttttttagtagagacggggtttcaccatgttgaccaggctgatttcaaactcctgacctctagtgatctgcccgcctcggcctcccaaaatgctgcgattacaggtgtgagccaccgttcccggacaactcttcaatttttgatagtggctttttcttttcttttcttttcttttttttttttcg

SEQ ID NO: 5995 - DNA, 1674 bp, Homo sapiens
ctgaaaagaaagaacatctttctttacaagatctttctgatcatgcttcctcagcagaccatgctccaacagaccagagtccagctatgcctatgcagaattcatccgaagaaataactgttgcaggtaatctggagaaatctgctgaaagaagcacccagggcctcaaatttcatctccatacaagacaggaagctagtttatctgtcacatctactaggatgcatgaaccacagatgtttctaggtgaaaaggattggcatccagaaaatcagaacctgagtcaagtgagtgaccctcagcagcacgaagaaccagggaatgaacagtatgaggttgcacaacaaaaagcttcacatgaccaagaatatctttgtaacataggggaccttgagcttcctgaagaaaggcaacagaatcaacacaaaattgttgatttggaagctacgatgaaaggaaatgggctcccacagaatgtggatcctccaagtgcgaagaaaagtattccatcttcagaatgcagtggctgctcaaattcagaaacatttatggaaatcgatacagctcaacagtccctagttactttgcttaattcaacaggcaggcagaatgccaatgtcaagaacattggtgcattggatctcactttagataatcccttgatggaagtagaaacatcaaaatgtaacccttcatctgaaattttgaatgattccatttccactcaggatttacagcccccagaaactaatgttgaaatacctggaacaaataaagaatatggccattactcctctccaagtctctgtggcagttgtcagccttctgtggagtcagcagaagaatcttgcccgtctataacggcagccttgaaagaacttcatgaacttttggttgttagcagtaaaccagcttcagaaaatacatctgaagaagtaatctgtcaatcagaaaccatagctgagggccaaaccagtattaaagacctttctgaaagatggacccaaaatgagcatcttacccagaatgaacagtgtccacaagtctcctttcatcaggccatatctgtatcagtggagacagaaaaattaacaggtacttcatctgacactggaagagaagctgtagaaaatgtaaacttcaggagtctaggtgatggcctgtcaaccgataaggaaggtgtccccaaatctagggaatccataaataagaaccgttctgtcactgtaacctcagctaaaacatccaatcagttacactgcaccttaggtgtagaaatttcacccaaacttttagcaggtgaggaggatgcactcaatcagacttctgagcaaactaagtctttgtcatccaatttcatattggttaaagacttaggtcagggcatacagaattcagtaacagacaggcctgaaaccagagaaaatgtctgtcctgatgcttcgaggccattacttgaatatgaaccacctaccagccatccatcatcaagtcctgccattcttccaccattgatttttcctgccacagatattgaccgcattctccgtgctggctttactttgcaggaagctcttggagctttgcatcgagttggtgggaatgcagaccttgcacttcttgttttgctcgcaaaaaacatcgtagttcctacatgactgtgggaaagtgggc

SEQ ID NO: 5996 - DNA, 1674 bp, Homo sapiens; identical to SEQ ID NO: 5995

SEQ ID NO: 5997 - DNA, 2262 bp, Homo sapiens
ggccgggcgcggtggctcatgcctgtaatcccagcactttgggaggctaaggcgggcggatcacgaggtcaggagatcgagaccatcctggctaacacggtgaaaccccgtctctactaaaaatacaaaaatacaaaaaattagcctgtcgttgtggcaggtgcctgtagtcccagctactcgggaggctgaggcaggagaatggcgtgaaccccagaggtggagcttgcagtgagctgagattgtgccactgcactccagcctgggcaacagagcgagactccatctcaaaaaaaaaaaaaaaagaaatgagagtaatgtaataatgcgatacagatattttccccagagagaaaaacgttaagtgtaaaagagagccatttaaaaagtcattttgcaggtcgtccctcctacatacataacgcaaattgtccaaaaaaaatctaaaaactcattttggaaaattattgatatgcagcaataacgttgactttattttttccagatatggccgcgtggaaagtgtcaaaattcttcccaagaggggatctgaaggaggagtggctgcctttgtggattttgtggacatcaaaagtgcacagaaagctcacaactcggtcaacaaaatgggtgacagagacctacgcacggattataatgaaccaggcaccatcccgagtgctgctcggggattggatgatacagtttccatagcatctcgtagtagagaggtttctgggttcagaggaggtggtggagggcctgcttatggtcccccaccgtcacttcatgcacgagaaggacgttatgagcggagacttgatgggtaagttccaaggtttctgtaggcaggtattttgtatttgatatggtgagaaacagaaactcatatttaggggccccagatggatttaaagttttgggcattctcaatgtttcctattttgggttggaaacggaagtgatttatatcccaatggctggtatcttatggaatcgtagaggatatttcctgcagctgattggatatctgttcctgagatataatgtgatggaagatttcctatggaagcttcatttttggagttacctgtcttctagaattacttattccttctcttggataatgttaagtccttccttggatatatcccttctacctgatggagctatttggcttttgtgttcatactatatggaatatttctggaatattagagcctacagattcttttagaagttgatatctgcctctccattttcactacataaagtgtacaaacaaattggattgtaacaaaaaatctggcagaccataatgattcaaccacttggattctacaaacaatactttaacatggaaatgtgtacttggatgaagaagagagaaggcaatgcctgatttttccattttggatctacacaatttctgtattgttggaattacactctttgatggaatggggaaaaattaaaatgatggatgtttcctaaatcctggaatatagccattcttttctaattgctgggatatatgggatgtcttgctgtcaagattccactagcccagggaaagaggattactatatcatttcttaagcaagttgctgtccaatcaaaggtactttagctttgaacacatggtgatgatcagttgtggatacagcaatcaaaattgactgggctggatggctacaaaagtgaactattggcgagcaactgtgccttcctcattcgttggaattgtagaggatatttcctcttctgccagctacctgattcatacttagggctggaaatatttatgaatgtggataaatttctaattgtctgctatctcaagaaagaagtctgggggtttgagagttacagtttgtctgggactacttgcttccagtggaattattttgtctggtcactaagattttttttttcttgtggttcatctaaatatcatttgacacccttgcccattaagaaggtggattacccccataagaggggccaaaattggggaagttatgttcacaattctctccctagatttaattgggattataggtcgtgtttccacacttggaaaaggttggtatgtcctgacctgtgtatattagcccctctcctaacccaagtcaaactctctttttttccccactaactctagaagtatttagtactaatagtgaatcagagaatagccattagatttcagctctgctagctcttgtgcctgccttctgtatcttcttaatggataagaac

SEQ ID NO: 5998 - DNA, 1256 bp, Homo sapiens
actatccaagcagtcaaaacttaatgaaaaaaagttaaacttagaaaattttttctggacttcttgaaagtccttcctattgttgagacatgcgctgcagcagggctttcatgtctaagttaaaacatagcatggaaatgtggcctaaaagaaatttgtgagtaaataaaatttggtatatactttaatcagatgaaagtgtaaaaactttcatattattaaaatagtctcttgttccgttaacatgaaaaggagattgtatatttatgtatgcaagtcagaaaatctctaataaagtaagcaagtgagctgcagaacactagtcatgaaagcccaatatacaatgaaaacaatgattgctcagctgtgaaaataatttttggagtcaagtaaaatgttaagcttgttagcgtttgcttattaagtaggttaatgctgtttagaaaatgaccagttgcaaagacaaagacaatgctgaagtgaatgtttgcatgacttgcttttagttttgcttgctcctttctgattaaatatttttccccctcctaaatgcagggcttcagataacagggagcgtgcttatgaacatagtgcctatggacaccatgaacgggggacgggaggatttgatcggacaagacattacgatcaggattactatagagatcctcgagagcggactttacaacatgggctctattacgcttctcggagtcgaagtccaaatcgctttgatgctcatgacccccgatatgaacctagggctcgcgagcagtttacactgcccagtgtggtacacagggatatctacagggatgatattacccgggaggtacgaggcagaaggccagagcggaattaccagcacagcaggagtcggtcaccacattcatcccagtctagaaatcagtctcctcagagactggctagccaagcatctagacccacaaggtcccctagcggcagcggctctagaagtagatcctccagtagtgattcaatcagcagcagcagtagtaccagcagtgacaggtaggttaacagccttttgttataacagatgagctagctttaaacaaattctcaacaatcagtgggaatggtttcagcatagtattattttttaaagtaatcttggatcatatatgtatgtaatcagtaaagaaactggcatgtggccattgaattaactgttctaagtactcgaagttaagtgatgatttgcaaagttctgtttcatcctccagatgcacagt

SEQ ID NO: 5999 - DNA, 1168 bp, Homo sapiens
tttttgtatttttagtagagacaggttttcaccgtgttggccaggctggtgtcgaactcctgacctcaagtgatccgcccgcctccacctcccaaagtgctaggattacaggcgtgagccacggtgcgcagccagatatcatattttaaatggcctggcccctaataacgattttagatattgcagaagggaattatttcttaggatttcattaaatagcctgccttttctttattatcgttaagtttctcttaatgctgttagtatggattttaaattttgaattttgaattgcaatgctgttgctcctctgcagagagcttcacatgagaaggatttcatggtttgtgacaataaatgctatatgttttatagcaaactagtaacttaccattgtattaaggtgtacagtttttttaactaagtaaatgatgattgagaacatgacttttttgagaaataaataccctatatggacttggttcattctaatttattttcttgggcatattgctaagttgtattcattggttttttcaggatattgacattaagaaagtaaatggagttcctcagtatgcgtttctgcaatactgtgatattgctagcgtttgtaaagctattaagaagatggatggggaatatcttggaaataatcgcctcaaggtaaatgaatttgcataaattattgtgctgttatgatttgctttgttttttaagacttgaagggttttttttttgcatatgccttattatttaagatcctactaagacagataaccataaaagtgatatacttctttgcattcctatcctattatatactgtaatctgattaatattcgattagccaggcaggattttttttgtatattcctatttaattttaaccagatgtttcccacttgagatgttgatttgataagattactatagaaaaccagttttctgagaattctgttgtagttgaatagtaattgtgaactttactaatagaaattttgccttttatattcagctgggttttggaaagagcatgcctacaaactgcgtgtggctagatgggctttcttcgaatgtgtcagatcagtatttaacacgacatttctgccgatatgggcctgtggtaaaggtaggcgggaggttttggtatgtggttcagacttct

SEQ ID NO: 6000 - DNA, 1237 bp, Homo sapiens
accactgcccaatagaagcataatgtaagttatataaattctgtatatgtaattttaaattttctagtagccacattaaaaagacaaagtgaaattttctttaatatatctaaaacgttgtttcaacatataatcagtctaaattgttgtttttctataaactaggtctacaaaattggctgtgtattttacacatctcaatttagctagatttcaagtgcctagtagctacttgaagctatagtggatagctactacaaactaatcatttcacaaatgattaaataatgtcaaaagattttttagaagcaggaatttctgatttcatatgtatgattttatgcataagtgatgaggaaacaaaagaactaatatctttgttattttttggcagagaggaacgaagggcatcctacgactataaccaagatcgtacatattatgagagtgttcgaactccaggcacttatcctgaggattccaggcgggactatccagctcgagggagagagttttattcagaatgggaaacttaccaaggagactactatgaatcacgatactacgatgatcctcgggaatacagggattacaggaatgatccttatgaacaagatattagggaatatagttacaggcaaagggaacgagaaagagaacgtgaaagatttgagtctgaccgggacagagaccatgagaggaggccgattgaacgaagtcaaagtcctgttcacttgcgacgtccacagagtcctggagcgtctccctctcaggcagagaggttgccgagtgattctgagaggaggctttacagccgatcctcagaccggagtggaagctgtagctcactctcccctccaagatatgagaaactggacaagtctcgtttggagcgctatacaaaaaatgaaaagacagataaagaacgaacttttgatccggagagagtggagagagagagacgcttaatacggaaggaaaaagtggaaaaggacaaaactgacaagcagaaacgcaaaggaaaggttcactcccctagttctcagtcttcagaaacggaccaagaaaatgagcgagagcaaagccctgaaaagcccaggagttgtaataaactgagcagagagaaagctgacaaagagggaatagcgaaaaaccgcctggaactcatgccttgcgtggttttgactcgagtgaaagagaaagagggaaaggtcattgaccacactcctgtggaaaa

SEQ ID NO: 6001 - DNA, 2781 bp, Homo sapiens
tgaagaaaaaattggcattgacatcgatcacacgcagagttaccgaaaacaaatggaacagagtcgtaggaaacagcagatggaaatggaaatagccaagtctgagaagtttggcagtcctaaaaaagatgtagatgaatatgaaagacgtagcctcgttcacgaggtaggcaaaccccctcaagatgtcactgatgactctcctcctagcaaaaagaaaaggatggatcatgtcgattttgatatctgcaccaagcgagaacggaattacagaagttcacgccaaatcagcgaagattctgaaaggactggtggttctcccagtgtccgacatggttccttccatgaagatgaggatcccataggctcccctaggctactgtcagtaaaagggtctcctaaagtagatgaaaaagtcctcccctattctaacataacagtcagggaagagtctttaaaatttaatccttatgattctagcaggagagaacagatggcagatatggccaaaataaaactatctgtcttgaattctgaagatgaactaaatcgttgggactctcagatgaaacaggatgctggcagatttgatgtgagtttcccaaacagcataattaagagagatagccttcgaaaaaggtctgtacgagatctggaacctggtgaggtgccttctgattctgacgaagatggtgaacacaaatcccactcacccagagcctctgcattatatgaaagttctcgattgtcttttttattgagggacagagaagacaagctacgtgagcgagatgaaagactctctagttctttagaaaggaacaaattttactcttttgcattggataagacaatcacaccagacactaaagctttgcttgaaagagctaaatccctctcttcatctcgtgaagaaaattggtcttttcttgattgggactcccgatttgcaaattttcgaaacaacaaagataaagaaaaggttgactctgctccaagacctattccatcctggtacatgaaaaagaagaaaattaggactgattcagaagggaaaatggatgataagaaagaggaccataaagaagaagagcaagagaggcaggaattgtttgcttctcgttttttacacagctcaatctttgaacaagattccaagcgattgcagcatctagagagaaaagaggaagattctgacttcatttctggtaggatctatgggaagcagacatctgagggagcaaacagcacaactgattccattcaagaaccagtagttctgttccatagcagatttatggagctcacacggatgcaacagaaagaaaaagaaaaagaccagaaacccaaagaggttgagaaacaggaagatacagagaatcatcccaagaccccagaatctgctcctgagaataaagattcagaactgaaaactccaccttccgttgggcctccaagtgtcacagtcgtaactctagaatcagccccatcagcactagagaagaccactggtgacaaaacggtagaggcgcctttggtaacagaagagaagactgtggagccagctaccgtctcagaagaagcaaagcctgcatctgaacctgctcctgcccctgtggaacagctggaacaagtagacctgcccccaggagcagaccccgataaagaagctgccatgatgcctgcgggtgttgaggaaggttcatcaggtgaccagccgccttatctggatgccaagcctccaactcccggggcctcgttttcccaggcagagagcaacgtagatccagagcctgacagtacccagccactttcaaaaccagctcagaagtctgaggaagccaatgagccaaaggccgaaaagccagacgccactgcagatgctgagcctgatgcaaaccagaaagccgaagctgctcctgagtctcagcccccagcttctgaagatttagaggttgatcctccagttgctgcaaaggataaaaagccaaacaaaagcaagcgttcaaagacccctgttcaggcagctgcagtgagtatcgtggagaagcccgtcacaaggaagagtgagaggatagaccgggaaaaactcaagcggtccaattctcctcggggagaagcacagaagcttttggaattgaagatggaggcagagaagattacaaggactgcttctaaaaactctgctgcagaccttgaacatcccgaaccaagtttgcctctcagccgaacaaggcgccggaatgtaaggagcgtctatgcaaccatgggtgaccatgaaaaccgctctcctgtcaaagagcccgttgagcaaccaagagtgaccagaaagagattggagcgagagcttcaggaggctgcagcggttcccaccacccctcggaggggaaggcctccaaagacacgccggcgagccgatgaagaggaggagaacgaggccaaggaacctgcagaaacactcaagccacctgagggatggcggtcgccaaggtcccagaaaactgcagctggtggtggaccccaagggaaaaagggaaaaaatgaaccgaaggtggatgctacacgtcctgaggccaccactgaggtgggcccccaaataggcgtgaaagagagctccatggaacccaaggctgctgaggaggaggcagggagtgaacagaaacgtgacagaaaagatgctggcacagacaaaaacccccctgaaaccgcccctgttgaagttgtagagaaaaaaccggcccctgaaaaaaactccaaatcaaagagaggaagatctcgaaa

SEQ ID NO: 6002 - DNA, 1024 bp, Homo sapiens
cactggcctggtgaacgtctccctggtcccggtgaatgccctgaaaggccccgtgaagggctcagtgaccacactgaaaagtttggtgagcacccctgctgggcccgtgaacgtcctgaaagggcctgtgaatgttcttacggggccagtgaatgttctcaccactccagtgaacgccacggtgggcacagtgaatgccgccccaggcacagtcaatgccgctgcgagtgcagtgaatgccacagcaagtgcagtgaccgtcacagcgggtgcggttactgctgcatctggtggtgtaacggccacaacaggcacggtgacaatggcaggggcagtgattgcgccgtcaacaaagtgcaaacagagagcgagtgctaatgaaaacagtcggttccacccagggtccatgcctgtgatcgacgatcgtccggcagacgcgggctcaggggcggggctgcgtgtgaacacttctgaaggggttgtgctcctgagttactcagggcagaagaccgaaggcccacagcggatcagcgccaagatcagccagatccccccggccagtgcaatggacattgaatttcagcagtcagtgtccaagtcccaggtcaaacctgattctgtcacagcatcgcagcctccatccaaaggccctcaagctcctgcaggctatgcgaacgtggccacccattccacgttggtactgaccgcccagacatataatgcctctcctgtgatttcgtctgtgaaggccgataggccatccttggagaagcccgagcccattcacctctcggtgtccacgcctgtcacccagggaggcacagtgaaggttctcacccaggggatcaacacaccccctgtgctggttcacaaccagctggtcctcaccccaagcattgtcaccacaaacaagaagcttgctgaccccgtcacccttaaaatcgagaccaaggtccttcagccggccaacctggggtccacgctcacgccccaccaccctcctgctctgcccagcaaactgcct

SEQ ID NO: 6003 - DNA, 1234 bp, Homo sapiens
gtgtcccaggaggcaaaggggacccagacgggagtagagcagcctcgcctcccagctggacctgcaaacaggccacctgagcctcacacccaggttcagagggcacaagcagaaacaggcccgacttccttcccctcccctgtgtctgtctccatgaagcctgaccttccagtctctcttcccactcagactgccccaaaacagccgttgtttgtcccaacaacctctggccccagcaccccaccaggactggttctgccacacactgaattccagccagcccccaaacaagattcctctccacacctgacttcccagagacccgtggatatggttcaacttctgaaggtaagcatgagcaggggctgcccttcctggcccccaagttttatgccatgtcaaatgtcctaagattccctagttaacagacccacaagctacagcctctggctgtgtccagcatggctcagcgaggggccatgagctcacttcctgtttgtttccctgtgagcagaagtaccccatcgtgtggcagggcctgctggccctcaagaatgacacagctgctgtgcagctccacttcgtctctggcaacaacgtcctggcccatcggtccctgcccctttctgaaggagggcccccactaaggatcgcccagaggatgcggctggaggcaacgcagctggaaggggttgcccgaaggatgacggtaagactctcaggcccaggtgagcaactgccccacctacagggaggaagacgtaggtagtccctgccagcccatctccctggcctgtcatggaagcattaactgtattcttgttgttgttgaaacagtctctgtcgcctgggctggagtgcagcggtgcgatctctgttcattatagcctctgcctcccgggttcaagccattctcttgcctcagcctcctgagtagctgggattataggcacgcaccaccatggcaccaccatgcccagctaattttttgtatttttagtagagatggggtttcaccatgttggccaggccagccttgaactcctgacctcaagtgatctggctgccttggcctcccaaagtgctgggattacaggcctgagccactgtgcctggccagtaacggtattcttgaagtgagcaatgaagggtccactatgcttctacttggtggggggatgtaaagtacctctagacccagaaacaaggctttacagtttttaaaaattattat

SEQ ID NO: 6004 - DNA, 1124 bp, Homo sapiens
gaaacaagaaaacagaactgcctttgcactaaattagtgacttggacttttgcccagtgaagacaggctgtgacactctggatgtcttggtgtgtgtagacacacattgcagactcttaacgcaggaaggacttcaaacttctgctgagaccttggggtcaaggaacatttcattggttttttttgtccacccccatctcccttgctcatttggatgcgtcaccttaattctcctgctgccaccgtctttgattcaccgggatgtacagtttacagttgaagagcaaacagaaaggttttctcttggtgggatatgcagaacttgggatgtgtgtatatataaatatataatatatataaatatatataatactgacttaaaaaatcaaatcccccgacatacgttttttttaatctgtgccaaaaatgtgttttcagaggaaatcttattttcatattcagactttgtattgcccactcatttgtataagtgcgcttcggtacagcacgggtcctgctcccgcgatgtggaagtgtcacacggcacctgtacaaaaagactggctaacccctcttcctattaccttgatctcttcccccaacttcctaacacttattaatttatgaaactgtttttctcagcgcagttttgttttgtgtgtccattggattacaaactttattaaaaaatataaaacacaccaagtgtgagtgtgattgtcacttgggtgggaggacgaaccatgggtccttggcttatgggaacagtcagccctcatcccgcttttgatccccatgccaagtctgtacatgggaactgtttcccttctgcctcctagtcagtcagtcctcctccccaaggataattttatcttgtacaaaggagatttttgtcacggacactgaacttaaccatttctcactcttgtggtgtcttcagagtcctaactggttcttaggtaatgtggaaggaaggcacttccaattttgatacagaatataaccacaccccatgccatctcagaaacattttagcaagctttggtttcttgtctctctcttgccccctcttcccttctcccagtgtgaagcaggctgactcctgcagaggcagtggcctcctg

SEQ ID NO: 6005 - DNA, 1733 bp, Homo sapiens
ttcaggcaagtcactttacctctctgacctcagttctctaatctgcaaaatggggatgaaaaagagcacctgcctcacagataattcagaagatttgatttatttttatttttttaaagcatcgtacagagttgaggcttctgtcgttttcctaactttgttgatggtgggccaccttggcaagcttctaggctgtggctccttctcccaggcctacctaaccagagctctcttgccctacaggtccccaaggcaccctctccaccctcctcctctgcctccctccactcccctccccagccgcccaccgagtcctgtccccacccagcccggccccctcccctgctccagcccctaactctccctctctccctcccggcccacagcgacatcaagaggattggggtgcggctgcccggccaccagaagcgcatcgcctacagcctgctgggactcaaggaccaggtgaacactgtggggatccccatctgagcctcgacagggcctggagccccatcggccaagaatacttgaagaaacagagtggcctccctgctgtgccatgctgggccactggggactttatttatttctagttctttcctccccctgcaacttccgctgaggggtctcggatgacaccctggcctgaactgaggagatgaccagggatgctgggctgggccctctttccctgcgagacgcacacagctgagcacttagcaggcaccgccacgtcccagcatccctggagcaggagccccgccacagccttcggacagacatatgggatattcccaagccgaccttccctccgccttctcccacatgaggccatctcaggagatggagggcttggcccagcgccaagtaaacagggtacctcaagccccatttcctcacactaagagggcagactgtgaacttgactgggtgagacccaaagcggtccctgtccctctagtgccttctttagaccctcgggccccatcctcatccctgactggccaaacccttgctttcctgggcctttgcaagatgcttggttgtgttgaggtttttaaatatatattttgtactttgtggagagaatgtgtgtgtgtggcagggggccccgccagggctggggacagagggtgtcaaacattcgtgagctggggactcagggaccggtgctgcaggagtgtcctgcccatgccccagtcggccccatctctcatccttttggataagtttctattctgtcagtgttaaagattttgttttgttggacatttttttcgaatcttaatttattattttttttatatttattgttagaaaatgacttatttctgctctggaataaagttgcagatgattcaaaccgatcttggctttcagtcttgggaaaagcagtggggtcccagagcttcctgggtgggagttgaggggctgagggttccccccaaacccctagtgtttaaacagagattcgtgcacaaggcagacacgtcacttaaccctgggagcaggggtgggtgggaggtgggcagggggccgggaagcaggttctgccgagcccggcctccatgccagcaggccccaatcacctttgatctccaggctgctcagagtcttcgggagggctgggaggtaggagaacagcaagagccgccgtcagcttccctcccacggctccccggagctgtcgaaatagatccttcaaccatccatgtacagctctgaggttt

SEQ ID NO: 6006 - DNA, 1229 bp, Homo sapiens
attattattattattattattattattatttatgcactcgtaaatatggggcacctctgatgtgccagcccctgtgatggggccagggtggaggcctggggctctggccctgtgctctggagctgaaagtttaggatcctaggttgggatctaaagagcctgggagctgggcgtggtgaccacgcccataatcccagcattttgggaggttgaggcaggaggattgcttgagctcaggcatttgagaccagcatgggcaacatagggagaccccatctctacaaaaaatacaaaaattagccaggtacagtagcatgtgtctgtagccccagctattcaggaagctgaggcaggaggatcacttgagcacaggagttcaaagctgtagtgggccgagatcatgccactgcactcgagcctgggtgagagagcgagatcctgtctcaaaaaaatgaaagaatctgggctgtggaggatgtggctccacgtccacttgtccccccaaaccctgcctgctcgtaggcagcttcttacccacttcccccactgcctgtcctgcccagagccccccaaggtgaggctggagggccgcagcaccacctcgcttagcgtctcctggagcatccccccgccgcagcagagccgagtgtggaagtacgaggtcacttaccgcaagaaggtaactcccagaggggcggggctggctctagctgggccgacagcaggggacaggctggtcacatagatgatcaccaaaccacccagccatctgaagaagcacccttctgcagatggggaaactgaggcctggggtctgccagggggttacatctcccaaggcagcacagcagagatttgtacgagagaagacatggcgtccttggaagaggcagtcagggtgaggacaggggcagaattttgggaccccacacactcagtttgagtcctggctcatgcatttagtggttctgaccttgagtgagtcacttaattccgagcctcagtttcctcctctgtaagaagagcctcaagtttgctaacaaaggcaagccaccttgctagcttggggtggtctccagcgggctgagccgaggcccctgccctgccctcactgcctgctcctccgccggccacccacccacagggagactccaacagctacaatgtgcgccgcaccgagggtttctccgtgaccctggacgacctggccccagacaccacctacctgg

SEQ ID NO: 6007 - DNA, 1203 bp, Homo sapiens
tcttgcaggagccagtggggagtgaagcaaaggtttgcagcatgtgtgtgaagcacttcctgggtgcccggtacatgctaggcccttgccatgcatttttccatcacaagacattttgccgatgagaaaacaggtccatagagatttactgacctgcttgcagggcaggggtccctggtgagggaatgagacagtcacgtggggtggaagcagattgaactgatgtccttgtgctctgtctgtcctgtgtccaccagcctgctcgcctggattttttaagtttgaggcatctgagagcccctgcttggagtgccctgagcacacgctgccatcccctgagggtgccacctcctgcgagtgtgaggaaggcttcttccgggcacctcaggacccagcgtcgatgccttgcacacgtgagtcttgcagtgggtcagggtggcgtgactgagggtgacgtgtccgcctgggtccagcacagcactgactcctcctgtctgtgcaggacccccctccgccccacactacctcacagccgtgggcatgggtgccaaggtggagctgcgctggacgccccctcaggacagcgggggccgcgaggacattgtctacagcgtcacctgcgaacagtgctggcccgagtctggggaatgcgggccgtgtgaggccagtgtgcgctactcggagcctcctcacggactgacccgcaccagtgtgacagtgagcgacctggagccccacatgaactacaccttcaccgtggaggcccgcaatggcgtctcaggcctggtaaccagccgcagcttccgtactgccagtgtcagcatcaaccagacaggtgaggtccaggggtggcagctgtgccctatggggcctgcccaggtggggcttaaggaggacggccatctggggctcgggtgtgtttagagagaggcagcagagcaagtggttaaaggcacagtgtctagagcaagcttgtccaacccgtgggccacatgtggccccagccgacattgaatgcggcccaacacaaattcgtaaattatcttaaaacattatgatattatttttgcaatatttttcccttttttttgagacagagtctcgctctgttgcccaggctggagtgcagtggcttgatctcggctcactgcaacctctgccttccgggttcaagcaattctcctgcctcagcctctggagtag

SEQ ID NO: 6008 - DNA, 2356 bp, Homo sapiens
ttcatgtgtcacccaaatagggcttgggtttttactttcacttcatttctgagattaaggtgtaaccaagtagagcatttctttgcttgatacagaaagttactagtctcaaccatggcctgggcataggagatgtcaaaataagtttatttcaaatggcaccatttaaatagggatttttggtgatttctcatcagtggaaagaggatttttgttttgcctttgttttgttttgaaatttaaatcctaatttcaaaacatcaccttgccaccctgacactcctctttttattattagcgtttctcaggcacaaagcctgctgcagctggccctgggtcctggctttcagccagcatctggcagcctaagtgtactgataagtgtgttttctcctgttacatcatgctgaatcctttcccttagccattagcttttatgatgtggtcttcgtaggaaagccaccctggtgccaagcctagcttgtggggaggggtatgtgttccagaaactgctctttgtgttcccttcaatgaggaaacaacatgtgtctacttatgtggcatccaactgcttggagctccacacttccctttcgcgactcaggctctggtgctgttgccaatccttgcttggcaaagactgttcgatcatgtggggtccttatttacaagggaaagctgggccagaaggctagcaattcaggtgttaccgctattgctgtaccttgtgttaggacattgtgtttgtgcatggactgtgcctccaaactcagtagttcctatctaaatataaagtatattagaaacctgaaagtacagaatctcaaccttacagtctttcccttagtcctgtggccttcctaagccagctgttaacgtgttgattccttccacttcccccaagtaggcaggcaacagatatgttgattgtcttagaaagtaatctggttcctctgaactccattgaattccagtttgacgcatactgcctggaaccagactgtttgcttacagctttttaagaaaaatctgccttgtctgcccccattatggttggtcttggtagctcctgggcactgtgggcgtgtaccatgggaaagtgattcaacacagtgaaggtgattgtctcctcaggcctcctgaagccacctgtgcggtgggacttcacgtgtctcggccaaggcgagcatttccacaatgccgtggatgctgcagtcaggccagattgaaccatgaccccatttttcacatgataccaattttgtcttaaaattcactgagaaaaatgagactaaattttttttaaccctcaggagcacctgaagcaaatatttatccgtatttattgaaaattcattttgtttctacttgaagctttaaccccttccattcctgcaagtgtgccttttgagagctcccatggcctagtgacttcactggtcaccttgtccatcttacttaagaattttagtctctccctaccctcttggacagagcttcctgttctcttatttcacaggttatacagcagagcgggttttgtgttttcattcctatttccacccttcatttggttggtggactccacaacctcaccctaccctacactttgggagcacaaatttggtgttgaaacaagcttaaatttcattttagggcatactgggcttactctcctcccagctgtctgtggattgatttgattttaatgttcgagttttacagcaacagctgaaaaccatgaactattctaggaactgtgttggaactctttaaaataaagaaaagaggaggaggaggaggaagaaagaaaaccaacttaagaagccttgactttggaggacagaaagccaccagccaatggagaacaaagagatgtttccctttcctttctttcaccttgtcattctgggtttccttctgcttcactctttccttcccccttaaaagtggtattcctggttggtctgtctgtctgtccttgtccttgtggtgatcctggcatggtgatatgctccactttgcattatccatggtctcttaccagcgcacaagtcagtggggaggatctaaccacgcctggtggtgaggaagctgaatttccaggcctgcgtcccatgtagcctctccatgaactgcagaaggcatgttctgcatggttaccagtaagtggctccctctcaccgtgttcattgtcaaatgagagcaaactttaggtgttggctccattgtacactctacttgctctgctcccctccctccaaccagggttcatgtcagtgcacaccccatgtgccctggcgaagctggtgctgtgagtgatgtttcccatacaactcagggatgccaggtggct

SEQ ID NO: 6009 - DNA, 1165 bp, Homo sapiens
caccatgcctggtcgaaaaacggttatttcttaacccatattctcagaatgttattactttttgcaagacccagagttagtttttccttcaaaatttgaggtcttagatcattgttactggccaaggaggctagttgctcttccctttgctgtcggtcagtcagatccttgagttagaagaattgttggagaacaagttttctggtttacgattataccagaacttggctgccactctggttttcagtgaagagaaaaaatgtaatcaaaagcctttggggatgggcttggtatttgagctgtacctgtcgaattaaggtggctcacaagtggtattggaaagtgctgaagagcagatttcacactgagagtggaaacgaaattacaaagagcttggatgtacatgcctgaattgtttttgagctgctttcagtggaatactgatatttatgttttacctattacagctgttgagtggaatgtcatggccagctcctcggacagtgaagatgacagtttcatggctgtggaccaggaagaaactgtgctggaagggacaatggatcaagatgaggagccccacccagtattggaggctgaggagactagacataataggtccatgtcggagctgccagaagaggttttggagtatatcctgtcctttctctcaccgtatcaggaacacaaaactgcggcccttgtctgcaaacagtggtatcgacttatcaaaggtactgtggataggagaaaggtttatttattgatttcaaatttcactgatttatttttagactccaaatttagtttttttcctcccttaaatgtattatggttataaaatctagcattagacgatactacccggttttctttcttaccctggttagtttaatgaacagcttgaatactgaagtatctaatcccatttgcattttaaaatgaggattgtttttaaaagcttcatattcttagagttgatctggttaattgtattgttcttttctttttttttttttcagacggagtctcactctgtcgcccaggctggagtgcagtggcgcaatctcggctcactgcaagctctgcctcccggggtcatgttattcacctgcctcagcctccagagtagctgggactacaggcgcctgccaccacgcccggc

SEQ ID NO: 6010 - DNA, 1164 bp, Homo sapiens
catttctgtagatgtgtagcctcataggacaagtgatgtcaaggtttggcaacagtagatcttttgcttaggatttggacccggaacacagaatgtcaccttctgtgggctgcttggtgctacttggctgaagagcctttccaggagcaggagccataggagatcactttcctggccaccgccctgtgtggtatgcttgtgccctagcacttgccttgtgcccactcacagcagtcacagcgatggttttctttgactagcgatggaggtcaggcctctaacacaggagcctagaccttgggcaggactctgcatccttgtctaaagagagggttcccttaggtagtacgattccttatttcaggcctgcatctagatgcttccccacacaagttctgaggcctgtttaattccattgggctattgcatctctgggggagatgcacattttccttgtaatacaccctgtaggaaagttttgacttggtccagcttttcagagcatgagtctgagagcagattgattgcaaggccttgtctgagaagagaatagactgactcatgatacctggacagactccagagggagatgcgatgccctctccagctgctggcagagcattccttctcctgcttgggcgcctctgagcatgctggcgtccagctggccatctaaagatgaccaggatccactttccaccaaagctgcttgggtttccatcccattctgtaatcttatggaagaatccctctccagctctgataaagctcttctgcctttcacagtggagttggatgagagttgtagttcttggcatgccagggagcagtgtggaattgggggagatgaccaatatctaatggtttatactggcatttccaggggatttgagcaattgtcgggggagggtggtatgtcagcataggggcctcaaaaggcgaattctagggctgtctctgtggtttactaccttgtgaccttgggtaagttccctaaccctcatctgacagaaggataaaagctactttgtctgccaaacagggctggtgtgagcagaaaatgaatgtctggggaagaatgttgacagccataatacattatatcgatataaggtattattttaaaagctattagtattatattacatgccaagtatgttaatc

SEQ ID NO: 6011 - DNA, 2976 bp, Homo sapiens
gaggatcacttgaactcaggaggtgggggttgcagtgagcggagatcgtgccactgcactccaatctaggtgacagaatgagactccgtctcaaaaataaataaaaaataaagaaatgatgggggacatctattatatccttcttcaggccttcctctgcttttcttcctttcaggccaaccaggatctcccaacccgaagacagcaggcagcccaataatgtgatcagacagcctttgggtcctgatgggtctcaaggcttcaaacagcgcagataaatgcaggcaagaaaagatgccgccgttgctgccgtcaccgcctcctgggtcgtccgccacgggttgcactgccgtggcagacagctggacttgagcagagggaacgacctgacttacttgcactgtgatcccccttgctccgcccactgtgaccttgaaccccatgcactgtgacctccccccttctcccccttcccactgtgattggcacatcgacaagggctgtcccaagtcaatggaaagggaaagggtgggggttaggggaaggttggggggacccagcaaggactcagagagtcagacagtgccacttggccacttggggtaaagccagtgccagcaataacagtttatcatgctcattaatttgggatttcaaaacacaaatgaaaactcacacccacccacccccaagtgcatgtctccatcacttaaaaagtaagttccatttgaaaatatcctttcttttttttttcttcctatttttgtttgtttatacaaatatctgatttgcaagaaaaagtgcatgggaggggttttagtggtttaatgaatttttaattaagaaagggtagtttggtagtctacttaaaaatgtttctgggaaattcactagaaacattaaccaataggattttggtgagcttagcttctgtattcctactgccgcccagaaaaggggcagggctctgcagccgccaggacagacgagcaccccatgcctatacctccctccccgagctaagtcccagggcatctgggccttgcctggagactgggctagctctgtaggctcggagagcctggggagggtgccaaccccacctctagtattttgggagatagggaaagtgaaccgacttccccttcccatacccctcagggtggttccctaccagccaggcttactacttctagaagaaagcagagtgccagggagtgagattgcatccctgggcttagaagtgacggagagaagacttgtttagtattttgccatcagcacaaggaaaaccaggagagagtctgcctccaggactctgagccttctgcctcgtatgttcagaaggtggataggtcttcccactccagcatggcttgaactcttaggggtctgcagtgctccatctccattggtggccccagctcagtaactatacctggtacatttcctgtgtgcaatcagtaccttgaaggcagaacattctgaataaagttggaaaaagaacagctttgctttgcaaagattgatgacagactggttcctcagaggcctaggctacccgtcacccctttttccagagcgagggcctggaatgaaggcagtttatcctctgtccctggagcctggggtttgctttggctccttgaggtggaagagactaagagggcagctgcccagagcagctgtgtgtacctggctcctctcaggcttcctgatcccttccgttgcactgcgccttatccctcagccagccagacagcctccctgctcctgaccagcagatacgtttcggagtggttggtgtggtttttgtgatgagggcagcacgtggtggccaaggtggcaagctgagtctcacaggctcactccctcgttggttccctgtgggaatggtaggccaggcccagtaagccatgccccaacacgtcctctcctccggaggaagggccagctgccagctgagtcagcagctagtccatagcacagccttataactgtaaagccaggcattgcccatgagcagagctggaaccagagcttcagtcagtaagagggaggattaccttcaggagaaggcaaggaagaaaactggctgctatctttatagttccactgccctaaccaagtgtccacattctaaatgtgtagtgtccatcccttatgtaatagtggtttcccgcccaaagtgagactttccttttaattggagaagggtatagaggtagtccaggtgggaacgccagaagtgctgattgcccagccattgggaccacctgttcttgccccactaccctctagtgggaggccaaagtaaaggctggctggtgggtgtctgtggattgaggatgtggcagggactggtcctcccacctccctctggccaaagatgggctttgcccgctgtgtgcctgtcaccacccaccagcagtcatgccctgggcttcccaaatggagaggtagcaggcaacgtttttaaaaagaaagaaaacaggaaactgtattgtgtcgggggaggcgggagggagatgaggaaacggtttggattttgtgtgtgggagggtattttttgggggtagttgtctgtaactttcctaagtgctttttttccttttcttttttaaagtaagttgcaggctttggcttggaaaaccccagggggatggggggcagaaacctgaggctgctgcccctttatctgccttcacggtactgtccccttcccccagctcctccctgaccccatgggccaggcctcagaccttccagctaaccgcttcccatgagccactactctgatgtcagcctataaccaaaggagctggggggtccaggcctggtgaccaacctttctcagcccactcaatcagggtgctccccacctgcaggcaggaggcaacaccctatctgctaccatcagccccttccagagcccatctgccccgcccagccctgccctgcccagccataccctgc

SEQ ID NO: 6012 - DNA, 1246 bp, Homo sapiens
tgtcacatcagaggaaaattgagaaaaaaggtttggataaatacctcggacattattttggttggtctccgagactaccaggataacaaagctgatgtaattttaaaatacaatgcagacgaagctagaagtctgcaggcatacggcgagcttccagagcatgctaaaatcaatgaaactgatacatttggtcctggagatgatgatgaaattcagtttgatgacattggagatgatgatgaagatattgatgacatctaaattgaactcaacattttacattccatcttttctgaagattgtcctacaatttggattttgatcatgacaaagaagattaaaatttcattagcatgaatgcaatttgttaaagcagactgatttgtttctaagatatttttggtttttttaaaactgataataatgctgaattatcttaagtgagatgttaagcccactttgttcttttaatgtaatggagcttatgggtagaagaccatgtctactaattacaaaaaaaaaaaaaaaaaaaaccatgcattgctgcttttcctaccacttccagtaagaaaatgggtgttttgaagaaatcatttgccttgtcctcacggaatctgattaagccctggcctcttgattgtatagagtcattgtgtatattccagttacctagatattcccttgagattttgatacaatttgagggaggcagaagtctgcatttgaagaaaaaaaataagtctgtttgtcatatttaagtagcctgtggctatttttatactgattttgatatcatgttcttttcatagtcgtattttgccaccgtaaacataaaaaaaaaaaaaaaagatttccaaaatgccgttttcagaacctgggttttaatagcagtattgaatttgtaagcttagtagttgcagaaattgaacactaggtggcactcagttatcttaacaggggaagtactgatataattgttgacttttcttttactatgtgtaagaaataccccaaacatgaaaagattgttttgatcatatgcatgtatgtagaatatttttgcagagcagaaagattatgttagaagtgtgatttttattttcagaagtcatatacatgtaagctacaattttgagtgctttataaacacttaagatatatatataaattttaatttcatagcaacttgtaaaaaataaaatacttgttgaaaagcctttttcaacatatccctaagctaagggaa

SEQ ID NO: 6013 - DNA, 1197 bp, Homo sapiens
ggcgcgggcgggagatgctggcggagggagggaggagccctggggtgctggggaggcagatgggagagaggtgccggccgagtggaagactggcgtgcacacgtgtgtctgtgggtgccgggggggcgtggctcctgcctgagagactctcctgctcccagtgcccttcctggtggccctggcgctcctgagctccgtcctggtgggccttgtcctggtccccggcctcctgcaggggccgctggcgctgaggaacatcactgacaccggcttcaagctgctgctgctgggtctggtcaccctcaacttcgtgggggccttcatgctggaggtggggcccgccctgggtctcagcagcgggagagaagggaggtgggggtgcattgaccccagctcagccccggctgcccctgacaccctccctgccctttgcagagcgtgctagaccagtgcctccccgcctgcctgcgccgcctccggcccaagcgggcctccaagaagcgcttcaagcagctggaacgagagctggccgagcagccctggccgccgctgcccgccggccccctgaggtagtgcaggcccacgggcaccccagacactggaactccctgcctctgagccaccaactggacccctctccagcaacaccaccgccaccacctcccacatccctgaggttggcgactgtctacactcctcccccgagaccacccccaccctggggaagcgttgactactgtcccctaccttggaccatcccgcgtaggggtggcagcccccagctcccctcagtgctgctgtcagtgtagcaaataaagtcatgatattttcctggctctgctgtgcctgtcttgtacctggcaccatagaccctcccacctgcccaggaggaaatgcacatacccccgggtgcccagctggcagcccctgcacgtgtctgcccctggaaccccctggggggctggtttttcaggctggtttttcagcctgacaaccccctggaaccccctggtttttcagactccattggccaactcccctctctgggcctgtgttccctcatctcacagtaataatgtttcctctgtgtccagcatgtgcctggatattccgtttagcttttttttttttttttttttttcttgagatggagtcttgctctgtcacccaggctggagtacagtggggtgatctctg

SEQ ID NO: 6014 - DNA, 1104 bp, Homo sapiens
ccacactccttccccttaattctggtttgtcaagcctccacttagatgacatgtgaggaagccttctctgactcttcactcattgaagtctctgctgtattcatccagagctccctgtactttcccaacagtatcgctctttatattcatcgtgaatgtttaatttaactcttgttcactacaaagtaagttctgtgaagatgaaggtttttgtgtattaagtgctgtgtcactagcccctaataccatgtctgatatattagcatatgataggtgcttaatacttgttggatattgaatgcctgccttttctaagaagattatgtgtcagtaatgtgtgagtttatatccagcgttacatctgttgtgccagcaaaatggaattatcttgtatttctaatttttttttcctttttgtgaactttaaaaaatttcaggcctcccgaggagcccagacagctgcagccacagctccccgtatcaagaaatttgccatctatcgatgggacccagacaaggctggagacaaacctcatatgcagacttatgaagttgaccttaataagtgagtatctctgtgaaagccagctattgaaggagagttcttgatttgatttagggacatgcttttcacatccttggaaggcttaaaaatctgagatcatccgatggctctgtttttaaaacaagaatgagcttgggccgggcacggtggctcacgcctataatcccagcactttgggaggctcaggcgggcagatcatctgaggttgggagttcaagaccaatgtggccaacatggtgaaactcccctctctactaaaaatacagaaattagctgggtatagtggctcatgcctgtaatcccagccactcaggaggctggggcacaaaaattgcttgaacccaggaggcagaggttgcagtgagctgagatcatgccattgcactccagcctgggcaacagagtgagactctgtctccaaaaaaaaaaaaaaaatgaggttgttacctgattcagaagaataataccaaaataattcccaaatgaaagtatgacaaatttctagaaatactggtataattaactttatgcacagtatt

SEQ ID NO: 6015 - DNA, 1283 bp, Homo sapiens
tttataaccaatgaaaaggttataatgtaatttatattcttggaggaacaagattttcatttgggattatttccttcaaccattcaacaaacatttgttgtatgccactaagcgccaggcacggcgttgggctctgcaaacacagtggttagtagcagtctggacctggtccctactggcatggaacccatcactccccaacatgcaaagcccacatttaaaggccagcctctgccccttcagtgatgcgctctttagaaatgccagtccactatattcagaaatccgcagggcacaaaacttccagcaagtcactgttgtggtgaaatgggcagtgggggtggggggtcttctttaaacaggcccccttcccatctacctagccagtacccatccaatgagtccccagagcctccagaagctgttgtctcctctctggggacagcagctcctgcctttggaggccaaagccccagatctctccagccccagagctgaaaacaccaagtgcctatttgagggtgtctgtctggagacttagagtttgtcatgtgtgtgtgtgtgtttggttaatgtgggtttatgggttttctttcttttttttctttttttttttagtctacattagggggaagtgagcgcctcccatgtgcagacagtgtgtctttatagatttttctaaggctttccccaatgatgtcggtaatttctgatgtttctgaagttcccaggactcacacacccgttcccatctcacttgcccacccagtgtgacaaccctcggtgtggatatacccccgtggactcatggctcttccccacccccactttctataaatgtaggcctagaatacgcttctctgttgcaaaactcagctaagttcctgcttccaccttgatgttgaaatatcttatgtaagagggcaggggatgtcgtgaagatggcaagaagaacacagtttcaaatttctggaaaagagcctgtggtggagatctaaagatgtttagggaagagctcgactaaagaacaatgaaataaatggtccaaggggaagtcatatggctgttggtgtgatgttctttgctgcttcatagacacggcctggagtgaggcaagccacacactgggccctcctggtcctgcagcccttgctgttctgggcacagggtctgggctctcagcataggtatcttgagggttcggaatccccaacacactcagcaactgcatattacatggccaccaccgaaggtcaagaccagtacccgcaataaagtctgac

SEQ ID NO: 6016 - DNA, 2634 bp, Homo sapiens
ttccgttttacacatgatccaacgttaactacctttttttctgtatgctttccaaagtccttttttttcccttaatgttgaattaaaatacttgctcatagttgatttaccattcctacaaaagaggcagaaactttgagcaatctaggttttttttttttttaagttttttctttcttcctctcctgaatacactccccaaaacacccctttccagttacaattagcatcgtgatccaagcagatgccacatggaagaggaatcgccatttactcagaaaaaatgtcccttacaggaaccggcagcagctaggcagtcaccggcccgcctccatccaaaatcacgctcgcgtgcttcggaagcatccgggtcactccttctccgctttttcttgcagatgggcctaggccggtgtcggttctgtttctccccttggctgcctgtacgcccacagccttctggctgcgacattatagaatcggccgtgtcccccctggtgggggattggggatctgtgtttagccatttatatctactttagctgttaaagaggtccaaatgaaaatcaggtgattgtggaaccatggggacttgggggtggggcagaggtgggaacatttgtatcagttgagtcagcttggtggctccctgtggagccagggctgagccttgtcacgcgcactcgccaattaagagatggaccagccagcagtcaagtgcattctccagtccttgcaagaaggatcagccctttctgtgccagcctcgatcgccttgtgctttggtctctttttctcccccccgcctggatcctgcctcgcgcgggccgtcctgttgctgagactcggggtaccgttctgctgacccagctccctttagtcacgtttgcttggctctggtaccaaatagttgggattaccgaagagtccccttccttgcgtgtcagcacggatgctgtgactgccacctgcgtcctcgtcaagtgcccgagctcgccgccgtgtgtgctgcgctgagtgagttatgaggtgcctttcccggaaccctcctctcgcctggacccaagagaggcgacagctgtggctggggctcttggtttccagagggtctggactggtttgggtgctttaaaatagatatttagttcagtggtgcttatgggggagatgggactagaacttaagtgtgagacttgggtggatgggaaagttaaatattggtctcttcaagttttttttttcttttgctttgttaccacttgtcactgtctccatgttaaaatgccaaaaatgatgtagttgttgttgcttttttccctattttccaccccagtcgctccttaccgtgactcctgcccttggagggcatgtagcagtgtctgtcctgccagtcccaaggccctgtgggaggagactggcctgcatctctctaagacttagtctgacgccacgcgcatctcttgttctgtgttcaatcagtagtccaggggagaagcttctgctacttcagagctttgctaaactaacctaatttgtccaaatcaccccaaaaccaccatctctgacgtaagcttccatgcgacagcctgatccgtttccctggacaggtctctttcctggaatgcagcccaggcacctgtgctcctggcacccttgaggtctctcctttgagccgtggtcaccgagagggttgaggacgcagcacccgaggtcccagcctttgcaggagcctccctgggcttagctggacttagatcttcggtggcctcatgtaaacgtggcagccagcctcttctagaaccctagcccagggactggagcaggaaagggaccttcaaagtgaagactgccttgtcccgcagctccttctggcttagattgaaaaatgggcttcctaatgggttaaatcctttaaaacaaggagttgtgggggaagggtgtcgtgcactcctagagaaaggtacacagttgcccggttgggaatgtgcttggcgctgaccctgcgggcatctgactggtcttccagctcaggaaaaagaatttgaaagaggcttagcgtgaaggggaatcaaagaggaggttgtgatttggtcgaaggtgcctggtttagtgctgtaattgtcttattattttttttatatatatatttcttggagtaaacattttaaataaacaacaacattgtctactgtcttggattttgcatttctttttcggttggaacggagctctgtttttcttaactccttatatgtgtacctcctaagccctggcacccacagaaggtggtgccaggagacatgtggccccaggggagcttccaggtttaaactgcactggttgaagtgagtggatcccccaactctgccccatgaaatgctaggggagtgggacagagtcagtacctcagttgtccaattcagaagtggagttctttgcattttcactggggctttgagaggaaaaaaataagtcatgggaggcatccagcgcggtgactgcatgtgcacccactccccagacttcagcagggggctctggtcaggccccggctgtggcttcaggccagtgctgctctgtgcaggcattgtggccaactgcccaccagagggcaccaggaggctggtcgtaggt

SEQ ID NO: 6017 - DNA, 1103 bp, Homo sapiens
gaaggatgagatggtcccccgcctggtgaagctgtttgacttccctgggcgtggggcttcccagatctatgctggttacacctgctcctttgctgtcagtgaagtgggttagtgatttctgccccctggcttatcagtgctctggtgcggaaccgtgtagccattgtcctgtccctagaccacgaaccccaattctctttacctcccagtgttctttatttttttgagacaggaactcgttgtgttgtccaggccggtgtcgaactcctgggctcaagcagtcctaccaccacagcgtcctgagtagctaggactgcacaggcacgccaccacgcctggctccagttatcttttagacagaacacttgtttgccatcccgtcctcttttcaccctgataatactgaagatgagactcagctctcgatgtctggtcacgctgggaacatgttttgtcttcccttaggtggtctgtttttctggggggccaccaacacctcccgtgaatctaccatgtacccaaaagcagtgcaggacctctgcggctggagaatccggagcctggcttgtgggtaggtggcagcatctcctgtgggtatgaggtctcttcctttcatgggggtgtcagacacacccatggggtgcccctccctgatggggctctgtttctgctgcctgttgggctgtcctcagcaggccatctgacacactgaatcccagagtccgggggtacaggaggggagagggcccatttgctgctagaacagatggctgttccctgtcttgtgggaagaaagtcattttgaaggtttctgttcaaagaaataaacaagcagagcttgatgtattcctacgctgcaggttgaaaattatacgtagttggaaacgtagcaggacttgagttgctgtgacactgggaagacgacattgtcttggcagcagtggtttgtagttcatttcaggacacctgttgagttagctagcacttcttgctgaggagttggatttatcagctggcaggtgtgggtggaacagtatgaggggcctctgtcggcgtggctttaatctgttgaaggctctagccctgcccaaatcattatgcat

SEQ ID NO: 6018 - DNA, 1150 bp, Homo sapiens
gatggggtttcaccatgttggccaggatggtctccatctcttgacttcctgatctgcctgcctcggcctcccaaagtgctgggtgtgagccaccgcgcccaggagataggcagtctttttttttctaagaaacttgagttggaggggtgagatttataccttaaaaacaaactactactaaaggcagaagaatgctaagtgcctaattagtggtctaggtgatgaaggaagggagggacttggttttattgatcttaaagagacagtggctaggctttgaactgctctgtgctgggagggtgggggtctgagggtgcttctttacatatcttctaagctttgtgttctagaaatgccttcagcttttgccttcagaattactgagtttattaaacttccgtttgtaacctagtaattgtttcccaccaacatgcagagaggtagaggctttttatcagtctttaaaaaaaatgaaagtctcctttcttgtcttttcagataatgtacaacggccagccaattaccaaaatggcctgtggggctgaattcagtatgataatggactgcaaaggaaacctctattcctttgggtgccctgaatatggtcagctgggtatggaagtacattttttaaaagctctgtaatctaactgtatatattcagaactagagatcagtgtggggctgcacacacgtgttagaaatgtgggtaattgatctcagataatagcctttgtccgttaagtggatctcacgttcagcagaacagcgcgtcctcattcacaggattatggagtattgcaacactgcctcaatggaaaagttgggactggagtcctacaaaagatttctttttttctgatttgggaattcatttatataaagggatttcaaagttaaaaaaaaatcagaccaccttcattcaatttcacatttaaagattatgcctttattgaaaatgagaaaattacggaaaatgaacgttgttctggaaaccctggcctgggcgattatttcgggttgccacgtgaggagccctggtggaccccctccccgtgcgtcatccctagccagaatctagttgtccagaaacttgtttcttcgatctcattggtggaaaaggagaattcaggcatcagttctcagttag

SEQ ID NO: 6019 - DNA, 1235 bp, Homo sapiens
cctctcagtgacctgccccacacatgggccaagtgctctcacagcagacttcttttaggtaaagaagtgcaagatgccagcttggcatctgctccctcgccaccaccattaactgagcacttactatgagccaggatgcccgctaaggcccttccctgaattagctaaatgtcttgtcaatggacattattgtcctctttttacagatgaggaaactgaggcccagagagagccacaaagagagtctgggagagttgggattcagacctgtcattttgtcttcaagcacttagtaagcacctgctgagtgccagccagtgtgcttggtcgtggctttgccgttaaaacccacatccttacccactgaattcaatgctgctggtgcaggagcgctcttccctcttgggtgcagagtccatattttctggattctctaggatggtcccaatggcaacactttttattcttttcaataaagataatttgtggtatatataaccaaatgcactctaatgtttaaatcttggtaacactttttgcatgaataaattcactcttcccttcccactgggagtgctgtgtctaatgagaaattctcatttgggctgggaaaatgcggtcgctgaaccagagggatgggagccggggcatctgactcaaagctcagggttccgggagctgtctacgtcacacgatgatggggccagttgggttcctgagcacctccccctgctggaagatcgtgcaggctccctgggcgatccatctcacccaccctcttcccagtgtcttcggcctcccagagcttcttgctcccattccagagcccagggccttcccctctgtcttcatttttcaccaccctctgcagtgctgtcgtcaggtcaggaatggaccactgtcaggcagtgtggctcagtggttatggtcaaaggctctgggacaggtctctgggtttgaaggccagccccacaacgtgttgggtgtgtgacctaggcctcattatctggatgccctaggcttcaatttcctcatctgtgagatggggttaatattgtagcagatgctgtcagtgcctggctgtactctctgtatttctctccacccgccaaagtctgcttactgtgaatgaaactcattgcctgaggcagcatccctggccagtgcacagggcaggccagaagtgcagagagctagggctcctggaagcagctctcaaccaaggacagacaggg

SEQ ID NO: 6020 - DNA, 1519 bp, Homo sapiens
gggtcttcctccaggatgcctgcatgggaccccacccggagctggtgtggccattccccaagtgccactggcccatggatgggggtgggtgctggtgccagctgggctgggtgtgggttctgtgtccttccaggatatgtgtcatttcccatgaggggccggggcaggtggctgggtgggggcacaggctggagtattcttagttctactggttctacactgtgaggtggcaatgggatttgctcagatgccacccaataaaatgcctgttacttaatcacagtggtggatggtctttctggaggggatggtgggggcagccaacatcttttaagtctggtgtcattgccaatgtgtcacctggtcatgggcacagtgctctcagtgtgacagaaggaacagtaggtgctgatgtttgaaattgtctgttggaggcggtggggctgggttcacatcctggctcactgcccccccgccagccagatgattgccacaaagttatgcaacctctctgaccttccatctcttcatccataagatggggtaaccgccccctctccccgccatgggtcatcatgagaattgaatgagttaacacttccacatgcttagaatagtgccagacacatgatgattcaaaaatattacccataaggccgggtgcggtggctcacgcccgtaaccccagcactttgggaggccgagataggcggatcacttgaagcctggagtttgagacctggctggccaacatggtgaaaccccatctctactaaaaataaaaaaattaaccaggcatggcagcatgcacctgtaatcccagctacttggggaggctgagacaggagaatctcttgaacctggaaagcagaggttgcagtgagctgagatcacgccactgtactccagcctgggtgacaaagtgagactctgcctcaaaaaaaaaaaaaaaaaatacccgttacccattttcgttgtaagaaccactatcctgtgtggtgatggttaattttatgtgtcactttggctgggcatggtgcccaggtatttggtcaaacattctgggtgtttctgtgaaggtgtatttggatgagattaacatttaaatcagtggagttttaaaagtaaaaagcaaggcaggtgaccgttcatcctgtgggtgggcgtggtctaatcagctgaaggtcttcataaagtgaagaatgagctctccacgcgggaaggaattctgccagcagattccccttgcactgaatcgctgcagctcttccttgggcctccagcctgctgggctgccatgcagattttggacttagtaagcctccataatcacatgagcaaattcttaaaacctctctcttgctcctgttctgtgtctctggaggatcctgatgaatatgtgtgctgaaggcccagtatgtttccttacaacagcctttggaaggaattctgccaccctcccattttggagagaaggaaatttaggtacagaggtcaggggccttcctgggggtatggt

SEQ ID NO: 6021 - DNA, 1452 bp, Homo sapiens
tgtgtcactgtgactgtggaagttggagctagtgagaggaggaggaggtgggcagaggaaggagggtcccttgggctcgagctccacatcagccctgagctgctggcaagcacccctggcctgcagccagggagagccagagcctttgccaggcagcgagcctccgtgccttccactcctaggtcaggttttgacagcaccactttattactttgtttaagctgttagaaaatttcagaacatcagacacaccctattcaaatgtgagaacaaaaacaccttccagcagtgcctgcttctggaacaggactcctcctgcggaacagggttttgctcaatgactacctccccggtcatgctgctgtccagtgagcagccgggccagagcttgtcggaccgcagtgtgttctctgctagatgcggcagctgtgactcagggggaatgggggctgtatgcctgctcctgacacacctctgcccgttgtgctttgcaggtcttttatcagaaatcaccgatccagagagcttcctgaaggacctgttgaactcagtcccctgaccaccacacagcagctgcggcggcgaagacgaagctggcttgccttccaccctctgttctccctccttgtgcattaagttccctccgcgggatgctgcattgttaccccgccctcccctctctcatttttcttggtgtggcttggggtttttaggcttcctgttttatctcgtgtgtgtggtgcaccagctatgaggttgtctgtaacccaagccatcaaagggcctgtacatacctaggagccatgagttgtcccggccagcttcatacttgagtgtgcacatcttgagaaataaacaagtgacttaacacacattgaaaaggaaggtgttgcctgctgcttcaactcgtcctcagtggcgcaggccaaatggtttcccttgaatgcacagccatttccggcgtcagcccgggaagactcatgtcagacccgctgtctccaggcctgttgtcagcgctaagtgcaacctgtctattcttggccagcaagttggggcaccacattggatggctctgatttttcccaaaacaaagcccatgccttgctcttaattttttggccttaagagctggaacccaaagacacgtggagcccagagctttcctagccctcggctgaaggaaggctcgcggagtagggcacagtcttgttggaccacagaggcctggggagcatttgacattctcatgctgctgtgaatcgggaatcccttggtgacttctctccagggttgtcatgttaagagagggcctggggcagacttaggatcaggataaagagagtggctgctattgacattgccaagcacccagtgtatcttatttctaatctctttgcccatgagccagagccgcttgcccaagggctcccagccaggggctgtggagttgtc

SEQ ID NO: 6022 - DNA, 1212 bp, Homo sapiens
cacctctagtatccctagcctgagaaaactgtgctcctaggtttggtggacccaggggctcccgtggagaactcagggcaggtccttaggagaacgtccagtgcctgctctggctgctggttcaccactcagtacacatcaggtgttgctgcttgtcttaccagaatacggggatcttctcctggcccctttccacatcctctgtgatggatgctttgcatatgttatctagtttttagtcatcacagcagcccttgcactatccccattttatagatggaaatactgagcttagagcataggaattggtcagaggcagtggcagagccaaaccctcttccatttgtctgtgtctgtcaaagtgtggaatcaaaggacctgattgcagctgagcaggtgacatgagatggtgcatgctggttgagtttctaaacctttaagctcccgggaagaaggtttgtctacataattggaggcatgtgtctctctggtctcttactggcaggttctgattggaactgattccatcccgaacctgcataagctggagcaggtgtccagtgatgagggcattgggaccttggcagagaacctgctggaagccctgcgggaacaccctgacgtaaacaagaagattgacgcagcccgcagggagacccgggcagagaagaagcgcatggccatggcaatgaggcagaaggccctgggcaccctgggcatgacggtaaagctaccacctagagtccccatatttctgcccacactgttgatgaggaggtggccatgggacagccctggggttggccatggggaaagagaaggctggacagagtaggaggaaggaactaggtgtgttcggccctctcagaggtggaactactatcgttctatcatacagatgagactcggagtaagtgacttacgaagtttaccaaaacagtaaaccagtgataatagccattaagtttattgaggacttatttaagccctcaagtagttctaggaggttgatattgttatacccattttccagatgaagtaactgaaactgagaggtgaagtaaataggccaaggcacataactaataagtggttgacacaaagggttctgtgctcttctaactgtcccaccttggaggaagcagagtcctacaagctccttttccaaagcacagacttgagtgtcagcagttgaaaagctcacctgggaac

SEQ ID NO: 6023 - DNA, 1101 bp, Homo sapiens
ttggcatttcctcagctgtggtacatagttggttactggtggaatcaggcctagaacccagatctccaactcccagaatttctctccacctgctatgcctgtaatttcctccattcttattggtgctaatgatttggctagagctatgaccaagtgaatgtccagcagcctgcattcttttacagggagggaagattgtattggtatattttgaccacctgagacaattaacagcactgtcacagaaatttagaaacgaatttctcaagtgaaactccgactgtttgttattccccaagaagtgccgagacatagttcttctaggggtattcctgatgactctgatggaagtggtgacttttggggctcagatgttggctgcagccacagtcctgactgcattaatggcatgttcaccctcttttctgttgcagggcaacctcctcctgacaggtgacaaggatcaactggtgatgctcttggaccagatcaacagcacctttgttcgctccaaccccagtgtgctccagggcctgcttcgcatcatcccgtacctttcctttggagaggtggagaaaatgcagatcttggtggagcgattcaaaccatactgcaactttgataagtatgttactttgatttcatatagtgaaatgagagtctccactaaaacgccgaactaggtctgtgagatgaggaagaatcctctgaatacctattagatttttgtgtcctcgttctggcttttaaggagctcagtctagttgggaagtgaatagttaaaatatactgtattagagtagcaattggctagtcagagaaggcaaagtggttggtgagatgggaggaatatgacgagatggagccacgtgtgcgcaaatgtgagtgcaagagaaggctgtgagcgtgggagacatagcaggtaaacagggagagtggcaggagccggggcagataggtctttgtgtcacgttagggaatttagccttgatcttctataggctgttgacagttgttaaccaagagggtgacatgactgggttttgtcccgcctttcacaccctcaaactctgctctttcctcctagatatgatgaagatc

SEQ ID NO: 6024 - DNA, 1171 bp, Homo sapiens
tcttgactagagtgccctgtccctcttggtggcagttacctggatgagctgagcatagctggggagtgtgcagctgagtacctggctctctaccagaagctcatcacttctgcgcactggaaagtctacttggcagctcggggagtcctaccctatgtgggcaacctcatcaccaaggtatcctaccctattgcccaagagagccccttccctaattcccccttgtaccttgatgtaaactctactatggtgttttgtttgtttgtttttgctgagaagaaatatttgttgaaggtgtttggaaatatttttatgacttcattgtatttattatgtagctgtagcaaactcttgggagcatttggactgtttacagtttttaagcaatcccttaccagcgctgtgactgttggcttcctggaaaggagttctgcaagggttcgattaagaagatgtaactacagagtgtctggtgctgcaagctcctgggacagtggtggaggtaactggtatccttggcagtgatatcacactgactgcacttgtcatcctgtttaggaaatagctcgtctgctggccctggaggaggctaccctgagtaccgatctgcagcagggttatgcccttaaaagtctcacaggtaaagagccacctggaccttcctttagggcatcctgaatctgtttagggacaacccttagttccttgggtgctggggttgactctcttctctctggtactgaccttagtgcagatttaagctctgcattttttttctgtattgatacgtttatgattttgagaccctgtttgctattgactgtttccgcttgttgaacacctgctctgtgccatgcacaaagatagattttccctgctttttgagttgctcataatcttttgagacacagactgtccttatgttttcatccagagctctcacagcaacattttcctgtctccacaggccttctctcctcctttgttgaggtggaatccatcaaaagacattttaaaagtcgcttggtgggtactgtgctgaatggatacctgtgcttgcggaagctggtggtgcagaggaccaagctgatcgatgagacgcaggacatgctgctggagatgctggaggacatgaccacaggtagcactgcccagtggcctggagcctaag

SEQ ID NO: 6025 - DNA, 1142 bp, Homo sapiens
acatgccttgtgtttctcagcttcccctcccaggtcctgcggtgactgaggagggaaggagcagaacattaccccagaatggttttcccagggaagagcctggagcacaagggtctccgtctgtcctttgtctctgttggagccacctaggaccagaaattgtattaatagttaagagtcgctggaccggagctgaccctcttgactcatgtctcttcccattgccttctaggcaagtagcctgcagtatgaaatgctgctgctgacggattctatctccaaggaggacagctgctgggagctccggttacgctgtggtgagttaggggattttcagagaaaggaaaggaggctcaaaggagcagtcctggccggactgggaggggaggagggaaactgatgcttgggcggcctctgcagagcagatgtgtagtgttcctgattgtgactctgcctttcctgaccatccctagctctcagccttttcctcatggctgtgaacattaagactcctgtggtggttgaaaacattaccctcatgtgcctgaggatcttgcagaagctgataaaaccacctgctcccactagcaagaagaacaaggtactgggccaagcaggggtctaacaaggaagggcagggcggccaccctcctcattccctggcagtgtgccctgcctcctcatggtctccgctttgccttgagcccacctcccctgagaggctccagtgcagcctttgccttagttcagcagatatgggttgggatttttgagaaggatggttcaagtaaaataaacatgaaactgcaaagcagagagcaaagtggctagctgtgaaggatgaactctttccagtcatgttagataacttgcagcccccagaaagcattgtgtccttcctacccctgtgcctttgcacatgcagtgctgtgcggtgatagaaatcccaggctctgaagcagacttcctgagttcaaattccagcgcttccatttattagcatcatgatgttgggcaagttgttccttagtttccccatctataaaatgggaatatagtctccaccttgaagtgttgtgaaaaataaatgacataatgcagactaagtgatcaaaacggtgtctgcctaagttaatccttaa

SEQ ID NO: 6026 - DNA, 1059 bp, Homo sapiens
atctccatgagatgggaggctggccatagacagaggtacctcatataaggagagcatccagtttaccttccccctcaaccccaaattgctggagtgccatctttgctacacgtgtattagcttctgacctttgtctttgttacatgggagttaagagcataagcctgccatctgagtctgagttctgactctgccacttatcttggtcaagccactttctccaagcttcagtttccttctctgtaaaatggagataaagcatctaaccagttgggttattgagaagattaagttatataatgcatgtaaagttttttctaaagcaaaactaattttctaattaacatcctcttcttattttaattgctaattcccattattgttgcctttttgttcttagaaagtctttgcttcgcgcaaagagttgttggaatatgacctacagcagagggaagcagccactaaatcatcccggacctccgtgcagcccacattcactgccagccagtaccgtgccttatccgtcctgggctgtggccacacatcctccaccaagtgctatggctgcgcctcggctgtcacagaacattgtatcacactacttcgggccctggccaccaacccagccttgaggcacatccttgtctcccagggccttatccgggagctctttgattataatcttcgccgaggggctgcggccatgcgggaggaggtccgccagctcatgtgcctcctaactcggtcagtacctacaccatggttatgggcctagtggttcctactgacactggcagccatgccaggagcgttagagagtgcacagaatagtgcttctgaccacccagcaagttaggtagcttataacaaaggaaagatggaaagagacacagggtgtaggtgagcgagcttggggagcattgaaacccaggtttccttgtaaatggcatgattggcttgtgcttttttggttccagtacagtgtcttgaggaaactctccctgaggccttgtgagggaagggaagggagacacttgaactcgagaaagactcacatga

SEQ ID NO: 6027 - DNA, 1681 bp, Homo sapiens
gggaacttggcatgcatcatcattgcacctcttacaggcttcagtgtggcatgcttttggagtcatggtttcccttgttatatacttctgttgttttcctggaatttcaaaaggtatcatgtataacagcttaaagcacttgtatgttctttcctttttttatagagaaaaggtagtagaaaacttttttaaaactggcttcctattatatgccagatttcttttccttagagtaaccacttaattgccttagaaaaatacatgggacagtcttcctctttgtctcatcagactgttatcactgagggttagatgagaaaatctcaaggctgtctgtctttcctaggccagctcgctggcacaaagccaagaaggttcagctgacccctggacagacagaggtgaagattgacctgccgttgcccattgtggcctccaatctgatgattgagtttgcagacttctatgaaaactaccaggcctccacagagaccctgcagtgccctcgctgtagtgcctcggtccctgccaacccaggagtctgtggcaactgtggagagaatgtgtaccagtgtcacaaatgcaggtaagtcattggtcatcccctaggccagggctgtgcacattccttgttatttttctgtagtagtgtcagtgtgagcaattacagtgtctgattccctcagaacatttagagaattatgggtttgtagagtgggttcaagggtagaaagggaggaggaagaagagagagtgagtgagtgtgtgtgtgtgtgtgtgtgtgcatgtgcacacgagtgtgtctgtcctgtggcaggggtggagggtaagggcggagggaggtccagaagtttagctctgggtcttgctttcttgttacctggctgcttaagtcattcatttgttattgtcccttcagtagcccctgcagtagttaccagagtatataaatgtggcacaatccatttcctcagagtgacccccaccccacccagccttgtcaccttactgacccaaacgctttggttactcagatccatcaactacgatgaaaaggatcccttcctctgcaatgcctgtggcttctgtaaatatgcccgcttcgacttcatgctctatgccaagccttgctgtgcagtggatcccattgagaatgaagaagaccggaagaaggtgaggccagatctggcctagactcagggctgtggccttgatctggactttgggcagacctggtgcagtgcagtgcactttactttctagcctaagccttcttcgactcaacaccagtttcagggcccagcttttgggtgggagcaaagaatggcatgaggtatattgtattgaaagacatggtttgcataggattttagaaaagtgttgattggtaatgaaactagagtatctccaggtacagataactttggatttggatgctttgccctgcatttcttccacagactgcttcatattgaggctgctggccctccctcagtattagattgtccagtgctagttcccagcctgcataatatgggcaggggcggggggaggttctagatattaaagaacagtgaaaaaggggcacctatagggttaacagaagaacatttagctttggagtcagaaggacagaaattctaattccagccatacttttaatacttgtgtaacctagtat

SEQ ID NO: 6028 - DNA, 1111 bp, Homo sapiens
actcacccccaactcctttggaagctggttctatggaagactctacagggggtggggtggggtcgttcagaagtgcctataatggaaagttttctctctccttcttgaattgggcttcttttctagttgctcaagataaaagaggaaacgcgtcccctccagggggaaaggttatttaatccttgcctccctggcttctggcatatgtgcgtgtagcaaggttagagttgagaacagatgtgtttctttgtttgtcttaccatgtggttgttcaaaaaagttctgaaaaacctcacaaacttccttggggaagtttcagtgcaagagcctgattcactcactgccataaaagctaagactgttgtgagtgtgtttcccatccccaacacccacctggatttcacattgtttttacaagccattcttcccatctctgtattttctctgtctcccagtcatcttccctcatctccagtgccacagcagcagctctactgagctctggggctgtggactactgcctgcacgtgctcaaatcactgctggaatattggaagagccaacagaatgacgaggagcctgtggctaccagccagttgctgaaaccacatactacctcctccccacctgacatgagcccattctttctccgccagtatgtgaaggtgagatctttccctcatcaaagaaacactcgtcctttgttcagagcactcttctctttcctcgcggtgcagagagctcaaggggctgagggtgaagagccataggaaggagccggcattccttggtgggggttaatctcggcgtgattgaataaatgaccacttctcccaaccttctgtgggattctcattcctgcctctttgtaaattggaggaattgaatgagatcatggttatctcgtttcacattaagtttagaaaaagatgagaaggtacaagctaatgtcatgagttgtgggtcatgacatgtgtgtcagatattccctgtgctgtcaccactgagaggccctttaacgtacttattaagaagatgggccttctgatcagattgatctgggataagtcccatcttgtgttcttacttaccagtcttgaagcatggagaa

SEQ ID NO: 6029 - DNA, 1663 bp, Homo sapiens
ggtcagagaattttttaaatgcacaagttcatccaggtagttattgacagagccagtgcaaaagcccacttctgagattctgagtctctagtctttatgttgatattagagtgtgggccaatagctgttcttccactcactagctgtcttcctcagaggcaaaactgttctttaattcttagtttggtgtaccaccctttctcaagctacttgcttggatataatataggttagtccattaattttacaaactttttacaaaacatttttttgtaatgtcaagtgtggcatatatcagaatttgacttttctgactctgaacactgaagctttggatacctggaatttagaacgctataatggattacagttatgattgatagggatgtcaggaagattaggatttcttctgaaacaccccgtatttcaagtcgttcttctttaggaaattgggttttgtgttttctgtctttgacttctaggtcattctaatgctcactacagatctggatggagaagatgagaaagacaagggggccctagacaacctgctctcccagcttattgctgagttgggtatggataaaaaggtaaaatctgagaggcagactgtgtgagaaacaggattggctgagatcctttctcaggttcccattcgtttcatagaggaacttcacctcgtttcaaggggtaaccatccactgagggctgcattctgttgagtcaacaaaagcgtattcagggcctgctttggcccgagcatagttttggaccctgagcatagttgagggcaaagatgaagttcttaccctcatggcccttttgtgctcagtgaggtgagaacattaaattagttgttcgtatcttaatatggcctcttaagtgtatcgggctctaggtaccccaagtatagtccatggatatactgggggttgttttgtgtctgattcaatctgaggaacattttagggctgatgggcttgacttgaagggatcttgttcagaggatgcctcaagcatcgagtaagtagaggtttctggacttacgctttggcctgcaggatgtctccaagaagaatgagcgcagcgccctgaatgaagtccatctggtagtaatgagactcctgagtgtcttcatgtcccgcaccaaatctggatccaagtcttccatatgtgaggtatttttgctttgggttcatgggtttggggaaaggtaagcggattgtctgggtagtgctagggccagcacagaggtggtagtcctctgtaagaataaagccattgttccctgaggggagtaagattctaagctgtcaccttttcaagagcagaacctccaccttttcccgaatcccttccaagctctggtctttggtaacaatccctccaatggaggggtaaaagggtttggaagttccattattgaagagcagggctctcttctgcaaggcacagagtggctaagaggattcccctagtgtatgttgctataaggtatggtaataaagcagagagaaagcaatgtgtgtgtggtgaaaggagattagcataaagcagagaaggtagaaattgaggctgaactgcatccaatcttaatgagcttagggagctgtggggtttgctgggatttgcaaggctcttctaatggtcttatttacagtag

SEQ ID NO: 6030 - DNA, 1201 bp, Homo sapiens
ttccttattagaaggccttctcaccttcacacaaaagtgggcacaggcaggacctgcagtggtgtccttggtttccagtcaatggttttacacttcaattctggttcttctcatagtaattacgtagtgtgaaaatctcactgacctagttgttttagaaaaaaatagtgaaataaattctaatctgccatgacagacaaaaggtaaagatcccaatcatatgatttttcctgtcttatccaaggtctcctgagagttagcgtgagtttgggaggcctactggttttagatctctcacctttatggaaatccctttggaatccaagtttgtttccttcaccagctggaacattttatttttgtggggggcaagctgtcgcagccaactccatcttcccagatgctgtaggtccaagaagtaagagaacaaggccaggcatagcaccccggagttctcccgctaaagcccagggtgctagctggtagcttgtcttgggtttttgttgccacctgacttatggcaccatgtgccaagggaggaaagcaagcaccttcaggtgactggggtttctttgactcaggagacaaggatgatgatgacgatgatgatgcagatgagaaaatgcagtcatcagggatcccgaatggtggtcacatccgtcaggaaagccaggaacagagtgaggtggaccatggagattttgagatggtggtgagtctctggcagcaggagaaggggaggaggagcttcacaactctcctctagctcttattcagtggacttccaaaagttaccacttaccatgggacactgacagagctttctctctgcagtctgagtcgatggtcctggagacagctgaaaatgtcaacaatggcaacccctctcccctggaggccctgctggcaggcgcagagggcttcccccccatgctggacatcccacctgatgcagatgacgagaccatggttgaactagccattgccctgagcctgcagcaggaccaacaaggtagaaggccatgccaagaacaaagcggcccattggccttgcacaggaaaagagggtttggcagttactgatatccagctgacttagtttgtccccagatatggggagaggttgatctgggtgagagctgttcagagatacaggtggagagtgagagggatgtggtgggaatttcagtctgagtgccaa

SEQ ID NO: 6031 - DNA, 1201 bp, Homo sapiens
attattctatttctaagctatttggtctctaacttcttacactattgaaaattcagatggaagagtaaagggtctgaatagcaatatagaaaagtaggatgatcctggtgctcattcatgtttggaggacatttgggtggtaaacctaaaaggcaagtcaaggtcatgttttgtcatcacctgaggttgggggatattagggaacatttagtatctgccttcctcttcatatttccttgccttgtcttttgatatccagagagagtggacagctacttatttctgtgactcaagatatctggaaagacttttgaggacaatttgggagtttaggaaactgttaatgaaacaaatcataaataatacaggctactgtgtgtgaatgagtgtgtatgtgagtgtttgtcattttgtttgcatgaccttttacatggagataaaaggttacacttttgtctcagactctcaagtagttagagttttttcctccagattttcaaataatgtttgtctctcctttaggactaactcatattgaagctactgtcaatgctctggtggacatcatccatggctactgtacctgtgagctggattgtattaacacagcatccaagatctacatgcagatgctcttgtgtcctgtacgtagcattacaatcccagagagctcgcagcagccagggaatatctggaaaattgtttttagcttgctaagctaatgaaataaaatatatttagaggaagctgaagggaatgaagtttcaaatatcaataaaagctttaagatcttactccatggaagagaaagatttggaaaggggatgggctcagtctttcttattcagtgctgaatcaccagggacagcctactgcttgctacatagtaagtgctaggtaactcggtgaattgtgacttaaatgagcacatgaatgaaagtagtacatcaagatttctatttccagtgaccctttcacagaagctaagtgttaaaactactgattttagcacagagctaagacgtgcgctgggggcttgatcatctgataaaaagccagaaccatttgtaaggggccaaaatggcctcaggagcaaatgacctgccagtccatccccaggaactgagagacaggaggttagcgaatggctcttaatgtgtgccagaacaggaagcggggattaacttaacctgctgaactt

SEQ ID NO: 6032 - DNA, 1158 bp, Homo sapiens
ggtctctgagctggtggtctagcacttgactgactcaggactcttcaggaaagtgaaagcttgagtttagcagtgagcaaatccagctaagcaaagaccattacagggatcatcacattaccttaaatttgctctacagtctattttgaaagaatggtttattcatttacattcattaaagaagtagctcctattgtttattttaaataacccagttacaggagagcctattgttattagctgtacacccaataccaatgccagatttcttggtattgctaggacatgtcatagttagggataacaaccattggagagctaaccacatgtaggcatcatgccgatgcaaatgttataatccagagtttgcttagattagagtgtgagtgtgggctctgtctgggaggagtctttaccagtggtgttggggcagaggtgggagagactcttgacgatctggtaccgttctctgcagcaacccgcacgtctagccaggtgactttccccattgacttttttgaacacaaccagcagctgacagatgtggagtttggtggtaacgacctcctacaggtctataatgcacaacagataaaacaccggctgaattccactggcatgtatgtggccaacaccaaggtaagaatggcactgggctgggatcaatccctgggtagaaggactcaaacaatatggtttgagaacacatctccttttagaaagcaagtatagagtatatactcacagtcacaaccctcggttctagttaaatggttccttagaaaaatggatattcttactcacttggcaaaggacttgtacaggttgggtttccaccaataccagcaggattactgtgtagaggacatcaaagaggtggttaatactggggagaaggaagcctgacattgaagagaatctgctctcttttcctattttcccatttttagaaacaaggaagtcattaccagggagttaaaaggataagttttaatgagcttcacatgttgagacaatgtcagagaagaaggagtcctagttaaaacttaagaacttctgtagtttcttgatgtgtgccttgtctccctacagcccggaggcttcaccattgagattagtaacaacaatagcactatggtgatgacaggcatgcggatc

SEQ ID NO: 6033 - DNA, 2342 bp, Homo sapiens
ctccaacctgggtgacagagagaaaccttgtctcaaaaaaaaaaatgagtcacggttttatttgatactcttggaattaaaagaagtcgtaaaatcagtcacacttttagagcattggtttttagatattaaagatgaagtgaaaaaatacttgggttgggggcccataaagttgctgatttttatgttgccaggttagatcaatgaaaacaaatgtcatctgtcaccacaatttgtaagagattggacattttaacatttttttaaaagaccagtactttgtatttaagtttagctttatgaaaacatttactatgttattcttaatggattgataataactttaacacatttacacagccatccacggtttggaggccgaaatcactgcttttgaatgactgaattgtgcagtgtctcaggcacatgaatagtgcgtgaatccacttgattttatttgcctcattactgcccactttctctgcttccttctttgccaggttcccaccttagggtcccaggaaggtgcctttgagaatgtgcggatgaattacagtggagaccagggccagaccatccggcagctgatcagtgctcatgtgctcaggcgggtggctatgtgtgtgctctcctctccccatgggcgccgccaacatttggctgtcagccatgagaagggcaaggtgggtcctccaattcttgtgcgcttactttaggtcatattgtcttaaatgctaagcaaaacaaattgatgaccacattcggattagccctctgtgggaaaaagtccactgcgttctaagaatgcttcagggacagatcttgttgagcttttcaaatacttgaaccctgaattgatttgattagacctagagctggtatgactaggactgttcctaattagtaaatttccactcaaaacgtattcttcaaagccctcaggaaaaagtaatgattagcagttaccgaggacggcttggctcccagtcttgccctgtttggtcactctggcgggcataagctgagagacaaaagttttcataggaacactcagtgttgcttatgtagtgctgccgtgccatcccagctctgttaagcacataagtaagtttgtattgtgttatagagctagtagaagttggaagagtgctaggtatcttaactcacacttttctgtattctggcctctccatcaccactaatgttgttttaacttttattttaagtgaaaatatggatagtccttcaaacaactctaaaatcattttaaaaacagtttcctagaaaactagaaaaggacagtggtacgtaggtattcttaaactattttgtgaactatataaagagaaattgttttcattacttacctgttctgtcctccatggaaatacattccatagcttttagccaggagtaatagagactaatactgatctaggattttctactagacttatctgtaaagaaaaaagtgtgcaacctgttatccctattgaaagagtttttgttacttgctttgacttctctgagaggaccaggagtaggaataaattagtcattgttcctttgcagatcaccgttctgcagctctctgcactcctgaagcaagcagattccagcaaaaggaagttaactctgacccgcttggcttctgccccagttccttttactgtgttgagcctcacaggaaatccctgcaaggaagactacttggcggtttgtgggctaaaggtaaaaatccggatctaggtttgattgccttgagctgtggattctagtcattttctctcccctgttctcagaactactttttcttattcgttgtggagattaaaatttaaaacctactgaaatgcaaaaggaatttttctttgaatttctcccagatctttcagatttctccaatattggaagtaatctttgtgttcatgaaacctgaatgttactagacagtctaaatactgtctgaaggcaggggatattagaggaaaaaagggaacgtcattactctgaaatgaattagcccacttttcagatcatcttttcaccattttgtttcttaaacattgtccaggactgtcatgtgctcacctttagtagctcaggctctgtttcggatcacttggttttgcaccctcagttggcaacggggaacttcatcatcaaagccgtgtggttacctggttcacagaccgagttagcaattgtcaccgcagactttgttaaggtacagttacagttctttgatgatatggtcctagaatttttctacttttaaatccagaatcactatgtgctagcttctcccaggagttaaaaaaatcagctgggtgccatgactt

SEQ ID NO: 6034 - DNA, 1118 bp, Homo sapiens
tggttaaaaaatgctaatgttaggggggaaatgctaatgggagtctcttcatactctaatctggtcttttcttgaatgattttaatcagtttttactctattcttctaatttcaatcctacttcatcttacaagactttgtaaagagctgtctttgtgcctaagaatgaatgaatacatgttacttcagtacaatttactgaccagctacgtggggacggagtggtaaaacctggttaataaataaaaacacactgtttttcttctctgctctcataccatttctctgatcttgagctttatttgaaaaagcttgagaaaacatggtttacataatgaaacatggagaatctgaagttgctgtggggcttctcttacagcatgtgatgatcttggagtgcacatgccatatcatgtcttacttggctgatgtcacgaatgccctgagccagagtaatggtcaaggcccaagtcatctctcagtggatggggaagagcgggccattgaagtagactcagactgggtggaggagttggcggtggaagaggaagattcccaggctgaggattcagtaagtactaagtaacctcgaagttaacctctcaaggtaatgactaactggcatggtaccaagcttttggctctgttttccagcctcctgtgagcttcaaaacttcctagtccttgttgctgccaggccccaattttctaggccttcagagcaaggcatggggatctaatctcttgtggaaaggactttttcataagctttttccagagtcacttgtcctgctttgtcagtctttaattccaaatggaattttagggataagttcttcatggggggtagtggaagctcccctatagagaaagcataagatgttttttcttaaccacaaacccctaagatctcactcacctgaagtaacaacagattttcagccagctagctatttccagttgtggtagatttccacgggtcatttgcgagtcaactattcaccccgccatagggcgttgaggcacatgtgtttttgtgggtgtttatatgcagggatatatttcgaattaaaaagacttattatttttgaaggatgaagattctctttgcaataaac

SEQ ID NO: 6035 - DNA, 1102 bp, Homo sapiens
tctgctaggtgcactctctagaaagatctggagaatggacttgggggccaaatctcaatttaaaatcaggactctatacagttctggtttaaaagttgtatttggagtagttcgtactgtgagggagatcttgaggccataccaagtgctacctctatgctgcttttcctttctccaggaggcctgtgcccttcaatattacttcttgatactgtggaggatcctaggaattttaccaccatcaaagacttacattaaccagctatccatgaactcacctgagatgagcgaatgtgacatcttgcacactctgcgatggtcttctcggctccggatcagctcctatgtcaactggataaaggtaacacagagcttgctgctaagactattcaaagccaaagtgctttgtgcttactggagcttttaaatttgaagataatgaaagctttgcctatagtcatctcctaaacactttttcttgctgtccaaataggatcaccttatcaaacagggaatgaaggctgagcatgctagctcgcttctagaactggcatccaccactaagtgtagctcagtgaaatatgatgttgaaatagtagaggaatacttcgctcgacaggtatgtaatattggaacctaaatgatagaacttggtttctaccatagcccattgccacagctaattatattttgcatatttttaaagatctcatccttctgtagtatcgactgtaccaccatcttgcagctgcatgaaattcccagtctgcagtccatctacacccttgatgccgcgatctcaaaggtccaggtctctttggatgagcatttttctaagatggctgctgagactgatcctcataagtcgtctgagattaccaagaacctacttccagccacgctgcaactcattgacacctatgcatcgttcaccaggtgtggcgaactgcctgcccagagatgcacatgcactcttcactccgtgcagatcccgcattgactcagaatttgacatttttctctttcttcagcttaggggtttttttccccacgtataatgctttcttctctagtatgaaggggtgcttgatgaggaaatttt

SEQ ID NO: 6036 - DNA, 1211 bp, Homo sapiens
ttttattgctttatagtctatcgagttatttttgactattatcatgcagtgatttttaacctgtagtataaactctcaaaactagaattaaatgatagaatcaaaatatggggaaaagtaattgaactggttcacctgtccaagtttgttaatcagaaaggaacaatagcaacatttttgtgggggagcttgtagtacttttcatggccacaaatgacagggtgggcattaacacgcctgtgttaaggcttgcctcaagcaatcctcccctcgacctcccaaagtgttaggattatagactgagccactgtgcctggctggccaagtctgactttttttagccaaaatttagtttctgtcttgtctttaccatgtagcctttttttcttccttaatttgttatcttactgcctgggtttaggaaatttaactcttctagtgcttgacattataactcctggggaatgctctttttcccaccagatatagtcatcttttctctctggtaggtttttgtctacaatgaagcagaatgccctgcaaggtgtggtgcccagtgagacagaggatctgaatgtagaacacctgcagatgctcctcctcattttccacaatttcaccgagacaggccggcgggccatattgtcgctttttgtccagatcatccaggagttgagcgtcaacatggatgctcagatgcgcttcgtgccgcttatcttggctcgcctccttctcatctttgattatctgcttcatcagtactccaaagcccctgtgtatctatttgagcaggtacagaccaacacgttcttttttgcttcaccattactgagaactttattcttctcaatggttaccatgatccgcagcccaaatgacctacccactttaggttttaggttttggtaggttgatgggtaggattaggaggaccactgagactttgtacttgatgtttagccagaagtgatacatgtagattacttgatttgatgcattttttgaaagtggaatgtaggctgtgttcaaaggcattctcccacgaattgccctgctctacctgtgtctgatgcagtgccctgagcatcggcccttgatgagtatttgttagtggttgaatgacagtcaagtagtaaattttatggattggtaaattcctttgttgtaaggatccaaaataaggataggaggatccgttcagacttaactgt

SEQ ID NO: 6037 - DNA, 1472 bp, Homo sapiens
caggctgtatgttatctgttgcagctagttaactatgcctttttagtgtgaaagcagccatagattaatatataaatgatgaacatggctgtgttccagtaaactttatttacaaaaacaggcagtgtttgaattggagctgtagtttgccaacctctggtacatggggctacagagtcttctcaaggattgcaaacttacatacctgcaggggccaggtaggtaacagaaaatgagtaaagtgtgctagttgagaagattgcaggtcccaactaaaggggctaaccactatttggctctgggttattactgccatgcaggaatggaggtgcaaggttgctatactgtgaattatttgagcgtgagaatttcagatttgcatgtgaatcttttcattcccttcaaattttaaaaaaatattgtgagaacaataagacaaatctataagctacatacggtctaaggacatcagcttgcagtctttgctttagtgtttatatgaacctaaatttggccctgtgccagttagaatttccaaaagagtagaattttctgaaagatctatttgtttttgttttcttttgtttgcatttgttttcttttcagaaacacttgattctcctaatcaagggcctgtgcactggctgtagccgactagatagaactgaaattatcacatttacagcaatgatgaaatccgccaagctgccccaaacagtgaagacactttcagacggtgggtgttcctttgacagatctgatcacatgaccacccccatggcaccttttccatggcacctttgccttctagtggcactttcctcagcccttttttttgcctttgtattttacagtggaagatcagaaagagctggcctcaccagtaagccctgagttgaggcaaaaggaggtacagatgaattttttgaaccagctgacctcagtttttaaccctagaactgtagcatcacaacctatcagtacacagactctggtgagtttctttagtcaaatgtcttcttctctgtgggttttgttaagatgataacactaggggagaaaaagtgatgtattttatgtttgtgatataaaatgatatacatgtctgtgggacaaaagaaattgaggaatacaaaataaaacaagtaaaattcaccccaactccttcttctgtccacggttattactgttttgacgaccattctaggcttctctcaatgcaaattaacaaatgtaaggtgtatgtacagttttctatataaaggcatcactccattttggttatagaacatatatatattttaaagctgtatattttttccctcctcctgaaaatgtaacctgtattttctccaacatgagtaaggaattttcccttcactaactggggagtctggagagtatccgtgcagctactgctcacttttgacagttggtttggtgaagagataatagtatcttgacaggcctta

SEQ ID NO: 6038 - DNA, 1164 bp, Homo sapiens
agtggagagccaggggagtgtgggtcagataagcagctacagctgcagtttggtggattggtggagtatgtgtgtgtgtcagtgctcagctaagaactgtagggaagatggatgaccttcacgcagaactccttttgggatatacatgatgcagaaaggatcctacatggagagagacagaactctctcagctgacactctcagagattcctgatgggctttctcttgaagtccaaaggcgtctgcattgtttcctttctttgcccatccatgaatgttctgttttgttttttttaataagaattccggctgatttttgtgaggcctgtttaaattgactttactttgccttttgtgtttctcaattttatctagaaatctttctgactttttccatctcttgcttcaaagtaagaggggaactctccttgccgactccaccttataggtacatttggtgttttgcactgggaagaaataggatccatccttagctgaggcttgaggactgatccagcctctcatggcttccctccaaagtaacttagggttgagggatctatatgtgatgtcaaaacttactttaaacctctagtttcgtgctgtcatttattaggctgggccaccaaatctttgtttcaatttatcagaagccaagtgcatactagcgtcttgtttgttgcccattgcctatacttttcacctgagatgtgtgagttggggccttttaaaaactactgaattgtctgagccttgaagacatttccagggagaagagataatctctcatttcacccacaggctggtctaatcataacctagttaaagatgtccttgtttaagaaccccattatttatttttagtttttaatataaattaacatgtgggtcattatatttctccttaaatgaggaaattttaaattttattgatctaacctttgaagctttaaaaaaggagaaagagggtaggggtgggaaactggcatactgtgtgtatagcactgccgattggctaggccactgtgtctctgctacaaattaaagaaatcctaaaagttttccttggtcatagagttggggaatgacagaatttttctttgttgtgaaatgtatgtacagagtagaccatctctagccctgtggtgaaagaggtacactcga

SEQ ID NO: 6039 - DNA, 1437 bp, Homo sapiens
gttctagggactatggccgggtcaccggtggccaggggcagagatgagcacctgtccatgtaagccatatgccacccccacagggcctggcaaggtgcagagggtgcaggtctcggccatgtacccctttgcccctttctgagaggggcagatgcccagcccagtgacccagagcctcaccccaggaagcgggtccatgcagcaaatcagccaggcactggcatggtggcccccaggcctccaccgcctcaccagtccctgttcaatctgctgataacgcctttcctcccttgcaggtctgtgcagacttttgcagacaaatcaaaacaagaagctctgaagaatgacctggtggaggctttgaagagaaagcagcaatgctaaacctctgtttcatgctaaccagacacgccgtgcactcgttagattcctttcttagaaaactcgttttctgctcccttccctcgtcccttccctccccgacaggtcacataacagctgcatcattgaccgcacagcgccatctctccctgagaataaagccgatagccaccctcctccggctccgagcctgcttctgccacacctcgctctcagttctctccacatttccatagagaccgtgtggtttttgttcacccgggccccccgtcttcctccctgtccccccatttataggcataaaatccactgtctgccagcctcccttccctcccacctttttggtacattggtgtaaaaaatgtaaaacaaaaaaattttatgaactaactgtggtgtgtgaaagagagaagaaaaactggaaatcttattccgtgtgtgtttgggagttgcttggggttgggggtcgtggggacaggggacagctctgggagcagaggtggccctcggtgccgtcctgcgcagactctcccgtcccacggaggccgcggggtgggggctggggggggtgccgccgaccgttccgctcttccggccaggtgcttttctgtcaatttctatggaatgcaaaaggaggtttttgttttattttgtttttttgtaaagcttaagaaaaaaatctacatcttatacttgagcctccatacttaaaaaaagaaaagaaaagaaatcaataaaaagaaactggggcgcagttagcgctggccttctgtgttccttctcgccggcctcgctttccgagcgcgtgtggccgtggccgtgcgctggctccaagctgggacgcgtgtgggccccgctcacggcagcaaggaagtgtcccgtccccagccccgccgccctgaaaacaccaggtatgtgatgaggtgcagagtccctgtccctttccgccctctgccgttggagggcagaagcaccagcaaacactgttctggcgccgcagcacgcacctcccgccgccttcccactgtgcctagtacaaatgtgaggcagccgagg

SEQ ID NO: 6040 - DNA, 1152 bp, Homo sapiens
tccgggcagcccggctgcctctggctggcctgctctccgagacagcagagcgcaacgtgcaggcagggccctcagtccgggccttctcaggcccccagcctccctgacgccacatgcaggcagggccctcagcctgggcgttctcagggggccccagcctctctgacgtcctctgccagggctctgctgccagtggccagtgtcctgcaccatccttcccacctcgtgccctcagctctgcagtgtcagcccaaacaaaagccgggcgctctctggaccctccaggtccacggcggacagagcaggaggcaggcctctgacatgaggccagagcccagctgggggcagtaaacggctgtggagggagcactggccttggagtcaggagagtcaggaggccgggatctcccctaagctctgtcatcccgagctgcatggcctctggcactcctcgcagaggcccttgtccagtcgaggaggcacggtcggctgagatgatgaatctagaacacgctctgcagtccagcagcaccgtgtgagtcgggctgtgctatgcctttagcggccagccctctcacccactgccgtggtgtagctctcacagcccagcccagaggagaggcaggctgcagtcccggggctgccccagctcgtggactggggtgggcgacagatttcagtcacctgctttacagttttaaaacagaggaggagtcctctttggacccttgtcttctgatcccctgcccacctgggggaggcttggtcttcgtgacctgtgacagggttagagcccagtggtccctggcgttaggcctgccactggcagccactgcccgatacaccaaacacactttcccgcccagccaacctgcacagtccccaggcagtggctgggaagtgggggagagaagccgaagagcctgcgggtggtggtggcgagcccctgaataccacgaccaccgccagcgtggacctctgcagcggcgataccactccacaccccagagccgccacggcatccccccttccgcctcgtgggtctccctgaatttcctcctcagctgtggccccctgcgttcctggcttctcgtcgttctcttccctcccactccactcatcttgaacactctctgtagatctattgatgct

SEQ ID NO: 6041 - DNA, 1233 bp, Homo sapiens
tgtatcattaatagaatcagtagtaatagcacatatttattcattgctgtgtgccagagacagtattcaagacattaagtcaatgcatcatctcacttaaatgtaatgacttaatcttcattcaccccagtgagctaggtgttattatcctagttttagagacaagaaaactgaggctcagtgagggtaggtaattcgcctgttatgatgtttctggtgatccatagcattcggattcctactcaggcttgccccattccaaactcttcttcagttaagtatttatgcagtggcttctaaaagatagatttcgtttccataaacacttaaaactcttattttaagtaaaagttccatcaggtttttacaaaaatagattttaccctagtgctcaagtcaagggggcaatggccctgcgggtttaggatttaggatgaggtgagcaggaagcatgcgtggaagccagctcatgcccctcatgcatattcacgaagggcctgcttctgtgaaacagaccccgactggagtgcctctggatgcccatgctcagctcaggctgggtgaagctccgcctcagccaggagctccaaggagtggcaggtgggtcgggggagagagaaggaggcagagcctggtcctacaacgttcagttgtccctctgtgtgacctatgctgagggttgccagtttgcaaagcaacagtgacctatgctgaggcttgccagtttggacctgaaagtgggctccaccccctgcttactagctgggtgaccttgtgcaagtcccttcacctctctaagcccatatgaagatccattctcccatccactaacaatacttctggaggctcagcccatgagccacgtgctgtgctggaacccgcccctcccccccccgcccccgcccaggggtgaataagagacagctgctctgcctacttgaagcttgcatctgagtgaagatgaactttcctttcccagccttgagagagggaggctgagctcagtagctcagctcctgggttggttttgaacagtaaatgatctaggtacctggccagcacagctcctggtgcccctttcctgaaggctaacaatgcagttcaaattatatgcttatgcatgttcagaacacagtagacatcatgtgtcggtgggtgttgagctggggtccctggctgcctgttgctcttaaggagtgatacagccatcctcccctatccgtggggaatgtg

SEQ ID NO: 6042 - DNA, 1477 bp, Homo sapiens
gaagtttatattatctctgtttttccagcaagaaaagtagctctcaaagaaatttatagaaattgagaagttgatttttaaactctgaaaatgtaaacaatccaaaatagtcaaaccaatttttaaaaagaacaaagttgagattcttgtattagctgattttaaggcttgcagtaaagctacaagacagtgtggtgttggagaagagctggacatataaatcagtagagtaggataaagtccagaaatagacccatacatacatggtcaattcgtttttgacaaggcaatttaatggagaaaggaaaatcttttcaacaaaccatgctaaaacgactaggtttccatatagagaaaaaaatgagcctcgcttaaaagggtcgtagacctaaatataaaagctaaaactataaaacctataagagctttcccgtgtggagtctggagacgacgtgcagaaatggcacctggaaaggggaaggaaaagaaggaagaacaggtcatcaacctcggacctcaggtggctgaaggggagaatgtatttggtgtctgccatatctttgcatccttcaatgacacttttgtccatgtcacggatctttctggcaaacaaaccatctgccgtgtgactggtgggatgaaggtgaaggcagaccgagatgaatcctcgccatatgctgctatgttgaccacccaggatgtggcccagaggtgcaaggagctgggtatcattgccctacacatccaactccgggccacaggaggaaataggaccaagacccttggacctggggcccagtcggccctcagagcccttgcctgctcgggtatgaagatcgggaggattgaggacgtcacccccatcccctctgacagcactctcaggaagggggtcaccgtggtcgccgtctgtgaacaagattcctcaaaatattttctgttaataaattgccttcatgtaaaaaataaataaaaaaagtgaaacctgtaagagaaaatcctttgtgaccttggagtcagaaaagattttggggaatacaaaaagcaagtttcaaagaaaactgatatactggatttgataaaaattaaaaacttttgctctttgaatggcaccattaagaaaacaaaaaggcaagccgcagaatgggaggaaatatttgtaatacacatatctgataaagggcttagaatacataaagatctcttaattttaaggttcccccccacccatagactcagggtctcacatgttgctcaggctactacttctggcctcaagcaatcctcctgccccagtgtccgaaaattctgcaatttaagatgtgagccacttttcccagctttttttttttttttttttttttttttttgagatgggatctcactctgtcgctctggctggagtgcagtggcacagtcacgggagcctcagcctcctggactcatgatcctcccacatcagcctcctaagtagcta

SEQ ID NO: 6043 - DNA, 1477 bp, Homo sapiens; identical to SEQ ID NO: 6042

SEQ ID NO: 6044 - DNA, 1109 bp, Homo sapiens
atcctgggtgctttatctttaataatctttccctctagacctgccagttgatttgtgagagatgttactatcctcattcagctgatgagaaagcagactcttaccggggttgagaaacttggcaaggccatgtagttcgtaggctgatgagaaccatgctctccccactcccctgggacgccttcgacaggttttaggaattgttatccaggtcatgatggtttggccctgttccactcgtttcccactcttctccctggaagattggggctggatggcactcttaggaacctaggtagggtgtacatagtcctgttgtgagacagttttaacgtaaacagtgtgataaggttttggcttctggccctttgggtctgacctgatacagcaattagagagggttgtcagaatgccgtctgcacagttttaagctgaatgtccttgctttacaggagcaggagcagtgacttcacctgagaacatcccagcgggaggacaagagaaatcatgtttattcctcaggaatactgaagtgccctggagtaagctgccattcttctgtaacaatgttatcagtaatgctttaaactccagcacctggttatgcatttgaaaccaagtctgtttcttgttttgtattttctctctggaagttgtaaggaggtggtcttaaataaattaaacaaaaagaggaagtccattgcatggcctttgtttcttcacctttggtctctgagcatgaggaggactgtgtgtgaactgccagcagctgtagccacctgctcacagcctctctgagaaccccctgaaaccagttgttgggtatccttcccatttgccccctcaggcgtagttttcagaactgcttccacctcgtaatcagaagttgaagattgctgctgcgtggcctgatggagatgactgatgtcttaaggcgcctttccttctgtggcacctcttcgtgtgttctcacctggggacctggcagggcacatctccgctgtgcctactgcaaggcggtcccactgctgctgtattagcaggggaagaatcctggctgtgtggatggcccactccattgaagtcaagtcctgcagcttcatagagct

SEQ ID NO: 6045 - DNA, 1161 bp, Homo sapiens
aaagcattttccttccccaatttttctgtcattttcccatcctcattcaggcagagagaagaataacatgcccccttccaaaaaagacaaaacacaaggtagccacaaattccctagacacattagaaaaatagggagtggagaggggcattggaatgaaagttctctatctcattagctgttaggctttaggcatttatttggatggatccctttggcaccttggaagcaccactgaagtgctctgagaaaggggtcagctgtctgagggaatagttctggatagaggccacaggaagcactggccagttgctttagttctagatagctttgtattcccgccttgttgcccttagcggaggctggcccaaagcacacttgatcttgtccccactccctgcccccatctcagatcaaccttcagaaagtcccggcttgttggcaaaggcacacattctgtgttactcttaagtttcattagaaattcaagtcctctggggccctgttcccttgtgggcttgtgcaactgactttgtttcttgtctgcctttctggaaccaaatccaaggaaattcatgggtttggggagacagcgatgggaacccagcagggcacaggatgctaggataaagctgtggcgccccaaaagtggcctgctctgccaacatacataaatacatacagtctgagcttgacactgtataatttggcccagaacaatatgtattttgagctcatttaggtgaatgactttggcattccatgtacccactaggggaagctttatcaggctgcatttgccttatgcagaagtatgcctttgttctgagaaatggcctcagaacacactgttgagctgtctcctttagtgagtgtcatcctctcatccatttcaaaagattgcagatgccgtcttgaagtcctgcttgtaagaaatgcaggggttgggaatggaggagatgacgatgtagttttgcttttagttttcccaaacctgtttacattttttaaaaatgtaaccaacccataattgcattttacttgtcgtggttcgatctgattgtattgtcgaaggactatttttgaacctgtccaaataaactctgcaaagtatttccacaaggatgtgactccatggcgcttggacagcctttatcctga

SEQ ID NO: 6046 - DNA, 1205 bp, Homo sapiens
agcctcctgagtagctgggattacaggtgtgtgccaccatgcttggctaatttttgtatttttagtagagacggggtttcaccatgttagccaggctggtctcaaactcctgaccttgtgatctgcccgcctcagcctcccaaagtgctaggattacgggtgtgagcaaccctgcccggccagtaaattgtatttttttaatgacatcattgatttgaagatctagatggcataaattacgacgtctgccatcgcatattagaaaggggacagtcatatttgtaacgtggagagaacacggagcaccagtcaccacgtgcacttaggatgcagagcttaccgcacaccgctgatggggacctccggaaagagcggtgccttgtggttggcctggaagttctctcccaaggtgaaattcctttaaaacctcaggctctgacctatgtctttgaagcagctgctttgtagagtccctctctttactgtcctcgttaggactgttttgtggttccatgaaaatgtttagcatccttgcagaattacttgagaaggggctggtaccagtgtaaagaatctatttctgtaaaactacgaacttttgcatagggaatttattctaagcaggtcatagccgtgatccagagctgctgctgctcactgccagtccttgcggctggcggcgattgccggacagactctctgtggcctggctctcatccttggcgtgtcagcctgcggcaggctgccagccatccatgacaatcatgtgagctcagccacagacctcagctggcggtttgatccctggcaggtccctcgagcagtactggtaagaggcttcacacattttcccactcttacagttcatttttcatagtaggaagggcccttggcctccccagtgcctcttccagagcctccaccagcactaagctcagaggaaagaagaaaagggccaggagtcagacgtcacacccgggggctcccctttcccatgtagaagtgttggcatgcgtcagtctcctttacagaggggtggatgtatccgtggaggaggggccttctctctttctaattgcactatacttgttctagcttcagtctggagatacttaagacctccatggggtcgtgatccatagacttagcaagtcttgccttatctatggagctcgatggtgagaattgtgaccattgtctgatgt

SEQ ID NO: 6047 - DNA, 1167 bp, Homo sapiens
ctccctcccctccccctccgcccctcgcagccccgccgctcgcagctcccagtctgcctccccgaaccggcgccgccgcccgcactcgccgcaggaccggcccgcccggctcccggggtgcgccctcctcggtcccgcgccctccgggctcgcagggacgtctcctccctcccggctcgcggccccgcccggcccggcccccgcccagagccccagcgcgccgaggatgtgagtcctgctcgcctctggcggagcagcagccactcgcgcgcggagccggagcgcagcgcagcgcagccgcgggcgctctccgggccgctcgcgcgagtgccgcgctcttgccctagcggcgtcccccggcctctcgccggcgccaccgccgcagcagcccgcgggccgtccccggccggccgcccccggccccagcgccgctgaccctgtccgccgcgggcggggacgcgggcggaggaggcgccgcggcggagcccccggacgcgaccatgtcggaggtgctgccctacggcgacgagaagctgagcccctacggcgacggcggcgacgtgggccagatcttctcctgccgcctgcaggacaccaacaacttcttcggcgccgggcagaacaagcggccgcccaagctgggccagatcggccggagcaagcggggtgagttcgcggcccccttgtctgacaccccctttttcccgcgccgcggcctgaacaagggttgcggaggtctcccacccgctggagcccgttcagacctgacggaatcccttcttgcagaattgggggatcccgcactgcgggtccggctgaagcgggtcgcaggaacgcgtccccctaagccggatccccggctgggtcaccctgggggcgtggcggcttctagcagcagctgggggtctccacccgcgcggcaaagtttgctttttgatttgcgccccccacccccgccttttgcgcagtgtagtcacagctgcactcgctccataaccctgtggggagggggtcccagggacccccaggggacggcgtggggacctgcgtggggaggatcccattcctgcggggaaggctagggtgttcgggtcgcacgggcttttcattgttacttggcttgggagggggtttgccaggcctgggcgatccgcgcgagagctggaa

SEQ ID NO: 6048 - DNA, 1116 bp, Homo sapiens
ttcctgcacgaggatgctgccagaaacggccccaggcctcacttgctctcgaggcccaaccaggaaaagctctgggaaacccctcccggttattcttgttggttcttccgcaggtggcaaatacagtgttcagttcaagttgcccgacgtgtatggtgtattccagtttaaagtggattacaaccggctaggctacacacacctgtactcttccactcaggtaagcacaggtgacagcttctgttttcagctagcatgtgccctgcctgggctctgcagtggccaggtcctgccacctctgtcctcctgcaggtatccgtgcggccactccagcacacgcagtatgagcgcttcatcccctcggcctacccctactacgccagcgccttctccatgatgctggggctcttcatcttcagcatcgtcttcttgcacatgaaggagaaggagaagtccgactgaggggctagagccctctccgcacagcgtggagacggggcaaggaggggggttattaggattggtggttttgttttgctttgtttaaagccgtgggaaaatggcacaactttacctctgtgggagatgcaacactgagagccaaggggtgggagttgggataatttttatataaaagaagtttttccactttgaattgctaaaagtggcatttttcctatgtgcagtcactcctctcatttctaaaatagggacgtggccaggcacggtggctcatgcctgtaatcccagcactttgggaggccgaggcaggcggctcacgaggtcaggagatcgagactatcctggctaacacggtaaaaccctgtctctactaaaagtacaaaaaattagctgggcgtggtggtgggcacctgtagtcccagctactcgggaggctgaggcaggagaaaggcatgaatccaagaggcagagcttgcagtgagctgagatcacgccattgcactccagcctgggcaacagtgttaagactctgtctcaaatataaataaataaataaataaataaataaataaataaaaataaagcgagatgttgccctcaaacttcacctggccccggtcctggtttgctaatggctgtgggtgggggttgctg

SEQ ID NO: 6049 - DNA, 1199 bp, Homo sapiens
ctggggttacagatgtgagctaccactcacggcccaaatcttcttgatcatatgtttaaatatattttttaatatttggagcatgagttgtcacttcttgtttgccttttttataaggaaatgttggagagttacatcattgctaatgtagaaatgttaagtggaaaaatatacagtttggtaaaataaactagattctacatttatttgtgggtttttttcccctcctttctttccacagcacttttgatatcaagcaagtggcttcctttttgagatattaaaaaaaaaaagaaaaggaaaaaagtaaatgaagcccaactacctaaccctttcttatttgtatttgttttagtattgtgaagttgtgttaaatagtactagctagaaatacaaatttctggttatcatttctcttccctgtggcacttgacattttaattgtcttaaagtttttgaagtacatcttctggccccttgagtactgccagaggcaaaagatgtttgtttcttattcattccacttttgtctcctgggatcccttctgtagcctaaagtatggctgggaaatggacttgagaagattggcttgaattagatcataatcatgtgtgatcccatcatgaattcattggaatttgtgttgcatgtaaggcaatctttcctgttgtaaatcttccttttttaatgtacatatattttgaaaaatatgaataaacatgaaattttaaaagctgctgaaccgtagcttatatttaaaggttttgagtatagtatatcctcagaagtagctaagtgtcgccctcactttaagtcttttctactccttgaaatgaacaccatcattttcctttttaaatacaagctccagttcatgtgttttggaattcttatagagggtaaacgatgtttccagatacattgaatgctaattacttaatgaatcaaaggtttaaaaaatcattttgtattttattaaagactgcttccaagatcatagagtacaatcatgttcaataaatgttcaatattcagataagtccttggactagaaaaaattacagtactgcaaaagataacagataaatcctagacatcaaattctagaagtaattgtagtaattactcctgtgctctctagcaagtaatgattcttaatagtatggatgttaggtacctgtgctcagaattctgtact

SEQ ID NO: 6050 - DNA, 1224 bp, Homo sapiens
ggactgatcatattcctctctgcccagcattgctgttcaggggaaaagagacatgggtgtgtcgtgcctggcacattgtagggattccagcgtgcccccttccctacctcccaaaggcttcagtgcctccttcaagcagctagagacagtgctgggaggggcggtgggaggagtacagcttcccggcctggtgaatttgattacacatctggactttgcagcccccatgcatgtgcctttggcaccggggctgtccctctctggcctccgtcaggttgaatggctgcgtaaaatgcctaggctgtggtgctagctcagagtggtgcccggcgaaggttcctgtccttccctagctaacaaaggttaatccagcagcagtgttgtggggctggggagcagatcttcctcccctcctccctcaccgaggcctttgccttggtgtcccaaggaggcagaattgaccacgggcaccatgaaggaaaagccaagcaggccctgcatgaggcggtggagatggaccgggccatcgggcaggcaggcagcttgacctcctcggaagacactctgaccgtggtcactgcggaccattcccacgtcttcacatttggtggatacaccccccgtggcaactctatctttggtaggtgggccttctttggggtggacactcctggggtctcctgtctacccacctgggagcaggagtgggtgggagagccagcaagcccagagcatggtggggactcaatgacaactgggtggggaggaagagttactggggatggggagaaaatgcagggtgaggcaggggagtgagttgagtggtggtcgggtagacaggcaggtgggtggatggatggccacgttgaccatggctgggcgagaacgtggatagatgaatgagagaggatggctggctggatgatggatggatgatggatggatggatggatggatggatggatggatgatggatggatggatgggtggatggatggatgggtggatggatggatggatgggtggatggatgaatgggagggacatgggtacaatgaaaactggggaatggttagttggaaataataaggtttagaaggtggcttcttggaggcattgcagggcccttcaaagaagatcccaggggttaccaagccaccaaggagcctaatctgggggctggggactgtactcctggggccccagcatgacccctgaacaccc

SEQ ID NO: 6051 - DNA, 1431 bp, Homo sapiens
tggcccacagctcacaacaactaccaggcgcagtctgctgtgcccctgcgccacgagacccacggcggggaggacgtggccgtcttctccaagggccccatggcgcacctgctgcacggcgtccacgagcagaactacgtcccccacgtgatggcgtatgcagcctgcatcggggccaacctcggccactgtgctcctgccagctcggcaggcagccttgctgcaggccccctgctgctcgcgctggccctctaccccctgagcgtcctgttctgagggcccagggcccgggcacccacaagcccgtgacagatgccaacttcccacacggcagcccccccctcaaggggcagggaggtgggggcctcctcagcctctgcaactgcaagaaaggggacccaagaaaccaaagtctgccgcccacctcgctcccctctggaatcttccccaagggccaaacccacttctggcctccagcctttgctccctccccgctgccctttggccaacagggtagatttctcttgggcaggcagagagtacagactgcagacattctcaaagcctcttatttttctagcgaacgtatttctccagacccagaggccctgaagcctccgtggaacattctggatctgaccctcccagtctcatctcctgaccctcccactcccatctccttacctctggaaccccccaggccctacaatgctcatgtccctgtccccaggcccagccctccttcaggggagttgaggtctttctcctcaggacaaggccttgctcactcactcactccaagaccaccagggtcccaggaagccggtgcctgggtggccatcctacccagcgtggcccaggccgggaagagccacctggcagggctcacactcctgggctctgaacacacacgccagctcctctctgaagcgactctcctgtttggaacggcaaaaaaaaatttttttttctctttttggtggtggttaaaagggaacacaaaacatttaaataaaactttccaaatatttccgaggacagagctgagtctttgtggtcagtgagaaaaagactgaaagaagcttatttctctgggaagaactggcctcagggcccggggtacaggtgggttggacagggtggaaaggccttctgctgtcctgggggcttcacactccctacctgtgccactttggacacataggtttgtgtctcagttttcttgtctgtgaaatgggagacaacccccttctgggttattgtgaggattaaagaggaggctgggtgcaatggctcacacctgtaatcccagcactttgggaggctggggcaggtggatcatttgaggtcagcagttcaagaccatcctggccaacatggtgaaaccctgtctctacaaaaaatacagaaattagccaggcatggtggcgc

SEQ ID NO: 6052 - DNA, 1300 bp, Homo sapiens
gctttttgctttggtgcatttcagaaaggatggagaacatttattatgtgtgaaagcatcctcttccggttttgctgttattcaaaagtgggaaatgtacctggcacgtttgaaaataaaaaatctgactacctatcagaagagtaaatcagactgaagtacatttggataacacaaggtttctataaaatttgttcttcctgtcctccatgtcactgtttcttggacctcagttctctttttgaaagcattattccaaaatgccctgagagggtctcttagatcattgtttaaaaaaggaaaaaagtatatggatgtgctgtccatccaactcaggattatcattcttagcaacacgtaaccgaagcaatattcttaagaatattgaaggggtttttttaattgaacttaagactggagtttttcctttgaaaaaaaaaaaaaagttttctctgttgagtccgtctgtgtaagtttgtggctgagatgctagcttaggcatctctcttgttaacacttttcttggccttgggtttgtgcaaggctttttccccctttcatgaaaatgtgaactcagatcatggatggggaaggcagattttgatttgagacccgataaccttggcagcatcccttttgaatagctccttttgtcagagtaattacggccatttggtaaaattctaacttcgtgtttgtgtttcccctctgtgtttctaatgtcttcagtctgtgtcccctgaggaggcagggggtctctaatgagcctatctatgggggaaggtgagagctgcacacagccccctgagaaaccatcctaggagtggaaccaagggaccaactgttctggccttgaggttggcacaggggaaggacttgaagttgagctgatggatcctgatttttagatctcattgttttattagctccaaagaaatgaatgcaggagcctaaaactaataacacaaacttcttctttcccaaggtaaagacttttataaaagttcgcacaatgcttgattgaagccacttccttttccttacaaagaagcttgttggccagagaaggttctttttggggattgacataaacatgttagcagcccccagaaatctgatatattttccccaatttgctgttgataacagttttgaaatttgttacttgggtattttttcctcctgcaatgctacgaaataacagccttttgtaaatctttcaggctggtggtacctgctctgagtactggcttctttattatctctgtccaggggtggggtgggcaccgagtgagcaggt

SEQ ID NO: 6053 - DNA, 1145 bp, Homo sapiens
ctccctgtaaaattttcttaaatcttttgttctctggtataaaatattatccaatttagatgtagtttcattattcagtttaataagagtatttcatagtgtttgcaagagagcgcttcttccatctttcgttttctcaattcttaaagagcatgtaactcctgccacttgaatagtttgagaacttgaaaaggcttggcaatcagtgtgctcgggaaggtgtcaagcaccttcgaacttctgcaaaataacatcattgtacaagactgataataataactgctctgcagagacctcttaaatgtatggtgagcacattaaatactacaagaataagtcatagggtaaaaaactaacatgttaaaagagcatagaaaaccgtgaaggcttgattcttgatccactctccagtctataatcccaccatgataaaggtgttcctcgtcttgataaaggttgccggtcccagcccccacatcctccatagcctgccttcctagggtctgacctacttctctttgttgtcctggcacattcaggtgatgaaggattcggctccggaactgaatgtgagtagttctgaaacagaggaggacaaggaagaagctaaaccagatggagaaaaagatccagattttaatcaagtatgtgttgaagctgcttttcattgttatactttctgctgttcttatagagcagccactcgaagcccctggccatgtctctgtaccctgtatgggatattggttctttttttttcttttttttttttttttgagatggagtctcgcactgttgcctgtgctggagtgcaatggcactatctcagctcaccacaatgtccgcctcctgggtttaaatgattctcctgccccagcctcctaagtagctgggattataggcgcccaccaccacacccggctaattttttatatttttagtagagacggggtttcactgtgttggccaggctggtctcgaactcctgacctcgtgatccgcccaccgcagcctcccaaagtgctgagattacaggcaggagccaccgcacccggccttttttttttttttttttttgagatggatcctagccttgtcaaccaggctggagtacagtggcacaatctcggctcgctgcaacctcc

SEQ ID NO: 6054 - DNA, 1140 bp, Homo sapiens
aacctctgcctcctgggtttaagcagttctgtgcctcagcctcccgagtagctgggattacaggtgcgtgccaccacgcccagctaatttttgtatttttagtagagatggggtttcaccatcttggccaggctggtcttgaattcttgacctcacgatccacccgcctcagccttccaaagtgctgggattacaggtatgagccactgcgcccgcctggcgtcatctattctaaagtggtgattttgagccattcgattgttctgggaggctgatgatgtcatggagagctaggtggggggaatcaatttaggattattccagtggctgtcttcacttttacttctgccttcagtttggaggtttctagcagacagggagaccatagttggaatttctgccaatgttttaatcagtatttgatatgatttagagattagcatggttcactatatgtgaaaacaagaataaagttgttttttgtctttctgttttgaatagcctttcttcaagagctggtagatcgggataattccaaatttgaggagtggtgtattgaaatggctgagatgcgtaagcaaagtgtggataaaggaaaagcaaaacacgaagaggttaaggagctgtaccaaaggttacctgctggagctggtctgtaagatattctgggacagcactgttgccattaagtgccttgtttttttatgttcacaaatgtatatgaagaaactttctcaaacttactctttctaataacccactaaagccagcttaaacactctaaaagtactttgtaaaccaacaataacttgatgtgtagcattccatattatttcattacgttgtactcctaaaaatgggaagctgttaataaattataacatttaggtcagcactctgcatccatgagtattgtagatatttatattttgtgagatattaacttgtttaagaaaaatccgattggattactatggaaaaagcaacttgcctgttctgtttctttgcatactttgtgacctaacagttttaacagacattctattatatgaatacagtttttttgatactattagattaacttgaagtttaataccaaatattatgctaagagtagaaaagctttctgctgacccctga

SEQ ID NO: 6055 - DNA, 1078 bp, Homo sapiens
ataagttttaagtttcgtaacacacagagagtatgaacagccgattcttgggaagcgtgtggcctcgctagtgtgtgctgaagagcacggtgtgtagtagagtagcttatattccctgagtgcccaggaggccgtagtttttcatccgtgtattttgcagaggcttggagaattaatacagtgtgctgttcagagtgtgtctaagagagtgttaagggagtgtaattatacattattttgtaaaactaatttgtaaaaattttaggtgacatgtttttagttataccacatgtgtaaagattcgtaatcattacaattcaggctcaggatataagaaataactgttatccaacgtttcttttactttctccctttctctccaggtgggtcctacgtgtatgaactcagcgcagtcctcatacacagaggagtgagtgcttattctggccactacatcgcccacgtgaaagatccacagtctggtgaatggtataagtttaatgatgaagacatagaaaagatggaggggaagaaattacaactagggattgaggaagatctaggtaaaacctttaagttgtgagtgcccttttaaaatataaatttattttactagaaatatttgtgataaattattatggctcaagattgttatgttacagactatcaaggatatttgcatttcttaaacacatgtaaaatcactgaacatcttgtattagcaatgcttgtttttcgagtccggttcttactctcttgcccaggctggaatgcagtggtacagtcatggctgactgcagcctaaacctgctaggctcaagtgatcttcctgcctcagccttcccttcctagtagctgggcctacagataagtgccaccacacctgacaaaattttttttgtcaggtaaaaattttgtcaaaatttttttcagtaagagagagtcttactctgtcactaaggctggagtgcagtaacaccatcttggctcactgcaacctctgcctcctgggttcaagcagttctcgtgcctcagcctcctgagtagctgggattacaggcatgtgccacaatgctca

SEQ ID NO: 6056 - DNA, 1179 bp, Homo sapiens
aggctgaggcaggagaatcacttgaacccaggaggcggaggttgcagtgagccgagattgcaccattgtactccggcctgggcaacaagagtgaaactctgtcttggaaaaaaaaaaagaaagaaaaactgcaagtaattgaattaccctgaccttctgtattgtcctttattttaaatagaataaattttgtactcattacacccccgccatgggaatgtatttttcattttataattaaaatcaaggcaatgtttgcacatgtgcatgtcttctgtaaagcaggataatctgttttgtgattaagttgaaacttctggaaaataagctgtgtttggaatcagcacttcgcattcacattttttaacctcatatttgtccagctataaaacaatattctgtttacttctaattgtacatgttttggaggaagattgtgaagtgaaagctagctactgttgagtttattaaaatagctaatagagcttatatattgtattatgattgttttaaatgtaaatataatcagctttcctcttggttaggcaaactggacataagaaaaagctgaatacctacattggcttctcagaaattttggatatggagccttatgtggaacataaaggtaatatttttactgaggagtaaacattataatgctcagagactctaacttgtgatcggcttgtgattaatatagaatagcagtcaattgccaatttttgtttgctaatctctctctgggaacctctgtctgggaacaaagacttttttaggagagccaagatgttaattccattttgtgtgagtaagcatatagcaaagatgaggtggttcatcgatatgtacagaattaagggtataaaaataatttgtaaaaaatgaaaaaggtattttactgtttctgaacccgcacttgccaccttagtttcaatactattatttatcatttctcaaaactaacagtctccaagcgcctctattcacttttttaaaaacgttgtcccagaaacattaggtggcataattccagtatttatgctttcatttttcatatctgcaactactgatacgccctaggatgctatcattgttttaacaagaaataagtactgcttttttcttttggtagtcttcatcctaccaaacaggttgagtcttactagagaaaggact

SEQ ID NO: 6057 - DNA, 1242 bp, Homo sapiens
taccattttttggaaagaaaagtagcaccttaaaaaaccccaaatctatatttttgttttaatagattatgagcctcaaacaatttgtgagcatctccagtacttgtttgccttgttgcaaaacagtaataggcgatacattgatccatcaggatttgttaaagccttgggcctggacactggacaacagcaggtaagaactgaatttttttttttttttaaatattcagaggtacccaaacatcctaagcatgtttataaagggagatgaagtagaatgctttttaaaaattaaattttttctattttgaatgaaaacctttatttactgtccaatagtttacacattatacttgattccatttatggaaattcatatgggggcacaaactgattgaacatagctgtagcccctgtttgaaaatgctaagttgaaagtataggtagtttctggaatgttgaatgtattactatttgtagtagaagttgaaaagcaagatatgatttttcttttcattaacctaaacttgtaggatgctcaagaattttcaaagctctttatgtctctattggaagatactttgtctaaacaaaagaatccagatgtgcgcaatattgttcaacagcagttctgtggagaatatgcctatgtaactgtgtaagtctgtttcaactttttcatggtacattttattctaagacagttgctcatatgttaactatttttcagtgcagttccaggttgtagctttagtggtttatcatgggacctgaaatatttatagtaatacatttccatgggaacatataaacaagtgagttggtaattgcagttgcacccatccaggtgttaggaacggtgtctgggtgagctcttgcagtctgctcttgctttatggctgtgtggtgtgagctaaagagtaagattggaactggctagaatactaaaagtaaatgtaaaatgcctgttaaaaaaatgtgcatgagtacaatatacaacatttgggtgatggttacattaaaacctagacttcaccacagtgcgatatattcatgtaacaaaactgcacttgtacctcttaacatttattttaagaaagtttcccaacgaatgtttagcttcaccaggcactttgtttttatttcttttctttttttttttttttttgagatggactcttgctctgttgcccaggatgagtgcagtggcgtgatcttggctcactgcaacctctgcctccc

SEQ ID NO: 6058 - DNA, 1897 bp, Homo sapiens
acgccaagggcagcgtctacatcggtaagtctggggctccttctcagggcaggggcaggaacggcactcccttagggctagagctcgcccagccttcctcgcctcctgggctgctggagcccacaggccctgtcctctcacctcccggcaggcggagcccctgacgtggccacgctgaccgggggcagattctcctcaggcatcacaggctgtgtcaagaacctggtgctgcactcggcccgacccggcgccccgcccccacagcccctggacctgcagcaccgcgcccaggccggggccaacacacgcccctgcccctcgtaggcacctgcctgccccacacggactcccgggccacgccccagcccgacaatgtcgagtatattattattaatattattatgaatttttgtaagaaaccgaggcgatgccacgctttgctgctaccgccctgggctggactggaggtgggcatgccaccctcacacacacagctgggcaaagccacaaggctggccagcaaggcaggttggatgggagtgggcacctcagaaagtcaccaggacttggggtcaggaacagtggctgggtgggcccagaactgcccccactgtccccctacccaccgatggagcccccagatagagctgggtggcctgtttctgcagcccttgggcagttctcactcctaggagagccaacctcggcttgtgggctggtgccccacagctacctgagacgggcatcgcaggagtctctgccacccactcaggattgggaattgtctttagtgccggctgtggagcaaaaggcagctcacccctgggcaggcggtccccatccccaccagctcgtttttcagcacccccacccacctccacccagcccctggcacctcctctggcagactccccctcctaccacgtcctcctggcctgcattcccaccccctcctgccagcacacagcctggggtccctccctcaggggctgtaagggaaggcccaccccaactcttaccaggagctgctacaggcagagcccagcactgatagggccccgcccaccgggccccgcccaccccaggccacatccccacccatctggaagtgaaggcccagggactcctccaacagacaacggacggacggatgccgctggtgctcaggaagagctagtgccttaggtgggggaaggcaggactcacgactgagagagagaggagggggatatgaccaccctgccccatctgcaggagcctgaagatccagctcaagtgccatcctgccagtggcccccagactgtggggttgggacgcctggcctctgtgtcctagaagggaccctcctgtggtctttgtcttgatttttcttaataaacggtgctatccccgccaggggcctcctgagtctttgatgagggcttcactcagtggagcctgtggatggggcagagcagggcaggtgagatctgggggtgaagcaagctggcttgggatcagcgaggcccccaggcccccaaccctgtgaggcaggaattgtcctattttctagaggggcagctgagtctcagagggttagggggcctgtccaacatcagacagagagccagggggttagaacccaaagagtctgaccccagagcctagtatcattcccatgtgcccgaagcccctctagggatggcctccctgatcctataaggctgggccactcaactgcagccccctggggagacctggctgggacatgggtagcacgtggtacaggctgtgctgcagtggaggcagaggccacgggcaccaggttgccaggccagccagctgggagagcaacagcaccagaggaggcccaggaggaggccagcagaggccaggagcatcgaggaggccagcgcc

SEQ ID NO: 6059 - DNA, 1203 bp, Homo sapiens
gctgcccctcagtcctgccccaatccctcagccctccctctccagaagcccccagacctctgggcctccaccctggtgtgccttctcttgtgcctcccggcttctccatccctgcctctgtgatatctccagcctcctcgtggctcctctgccaccggggcatcacccccagtcctcctgtcccagcttcctttccccatctctgctccttcctccctcctctgcctccatctcaccctttcctcctctctttctctcgtctcttacgggtctctgactttcactgtccaggcctccttctctactcgggtgagtctctgcctccctctcccccttgagggagactccagtgtgtgtgaagcaaattcagtttctttctaggggcgctcagtaaggcccttgcgtttggggcaccagccctgagatagtgagaaggccctggctgtgtgaggagtgccagagggagggacaggttccgagagtggacaggctcaagagcttgggtggtttctagggtgggggaggacagggagcctgtggctggaagggggccccttacacagtggtgcccacccagggatgctgctgtacaatgggcagaagcgagtcccagggagccccaccaacctggccaaccggcagcccgacttcatctccttcggcctcgtggggggaaggcccgagttccggtgagacccccagcctccccacctacagggggactggacacagggctttggtctggcaagtgctaccctgggctccattatacaaaggagatctggaggaaggagaaaatgtggccgttacccttggtgaccacccaatctgctagagtaggaatagtatgccagtcaggtggaggagggtgcaacctcagacttgggactgctgcaggccaggattcattcattcattcattcattcatgcatgcatgcatcagttatttgctgaccaccccatgtgtgccaggcactgatacaggtaaaacaaaacagaccaaattctggctcttgtgggaagaggtgtattctcactggggaagaataaacaagccataaacagagaaacaaggtgatcacagggagagaggagtcctcagaggaacaaggaggccaggtgctaggctgcagggcgctgagcctggggtccctgtgggctgctctgggaaagctcccagcaaaaggatgtggggagagaag

SEQ ID NO: 6060 - DNA, 1170 bp, Homo sapiens
atccccctaaatgtgtcagaataaagagaattattccattttgccttgcttgtgtctagcatagagtaaaaggggcttgatacatatttcaagggagggaagaaggatatggatggagtgtgtgagtgctcagatgaaccgatgaagattgaatcagtgtgaaccgggcatggtggaacgcacctgtagtcccacctactcaggaggctaagctgggagcattgcttgagcgcatgaattctaggctgtggtgagccgtgatcacacctgtgaatacaaccaagaccctttgtctaaaaaaaaaaaagaagtggacacgtgagtgagtaaatgcataagacctgacaagtgagtgtgtttgtgagtgaatgcatgaaaaagtgaatgaggagtgaatgaatgctggagcttcagtgctcacctttccttgggcagtctatggcctccctcgggccaggcctgcagtgactgatctcactggacctctgcctccctcctccccagccctgccctcggtgctcatcaacatccggacctctgtgcagaccgtggtggttggccacgccgtggagttcgaatgcctggcactgggtgaccccaagcctcaggtgacatggagcaaagttggagggcacctgcggccaggcattgtgcagagcggaggtgtcgtcaggatcgcccacgtagagctggctgatgcgggacagtatcgctgcactgccaccaacgcagctggcaccacacaatcccacgtcctgctgcttgtgcaaggtgaaggccagtggggacttttgttgggggacagtgagtggggcaggggcttctcctgctgccatcttctgcctgcccgctctgctcttcctttctgttcacttgggacattttccattgtgtgtgtttaaggggcaggtttcataacaggtggcagcagcaggggataaaagtgagattcccccagggcagcctggaatgtacagggagagagctaggccatagagcatcaagaagaaaaaagaaaccttgtcctcatctgcagggagtgcctgctctgctgggagagacctgcagcatagtctgagggcagagacataacccagtcaacaaacagacctaatagagagtaaaacaaggacaacagatgcagggcagacacaaacactgtgtgttctt

SEQ ID NO: 6061 - DNA, 1262 bp, Homo sapiens
caggggcacaggctggcagcaccaagacacgagaaggaccaggtcaatcctctctcaccctcccccatgcaacctcacagacaacgtccacatcagtcccaatggctccatcatcaccatcgtgggcacccggcccagcaaccacggtacctaccgctgcgtggcctccaatgcctacggtgtggcccagagtgtggtgaacctcagtgtgcacggtgaggggacgttgaccctgtggggctctgccctgtttccagccctgattctcagctcagagcctccaagtttaaatcctccttccaccattgactctgtcttgggcattctccctctctgagcctcagtttccacctcagtgcagtggggagacaggtgcccacccagcagttactaagctggaggccatggcagtgtgggtgagcagcagagccctgcctgtgtgtcagtggttgtcattcctccgcacagggccccctacagtgtccgtgctccccgagggccccgtgtgggtgaaagtgggaaaggctgtcaccctggagtgtgtcagtgccggggagccccgctcctctgctcgttggacccggatcagcagcacccctgccaagttggagcagcggacatatgggctcatggacagccacgcggtgctgcaggtgaagccggggctgcctctctgggtctgaggcccagtccatggcccagccttgagcgggtgcttggaggagatagtagtggatgggcaggtggtgatgagtggatggagagaggaagggaggaatgggatgggatgggtggatgacgaatagactggaagatgagagggaagagagaaggaaggtaggagaaggaagaaagaatgagtgggagggtgggtcgaaggccaagtggatggatggactaatggggtgtcatgagggtgagccctcaagcaaccagatgggacagctaaaaaccaaggaaagggccaggcatggtggcacgtgcctgtaatcccagcacttggagaggctgaggcaggaagatcacttgagcccaagagtttgagaccagcctgggaggccaaagtgggtggatcacctgaggtcaggagttcgagaccaccctggccaatatggtgaaaccccgtctctactaaaaatacaaaattaggctgggtgcagtggctcacacctgtaatcctagcaatttgggaggctgaggcgggcggatcacaaggtcaggagattgagaccatcctggctaacatggtgaaaccccgtctc

SEQ ID NO: 6062 - DNA, 1196 bp, Homo sapiens
tcagcccctgccttgatccccggagcctggcctctctcacccaccccctgtgcccacagctccaggactggcccagcccatctacatcgaggcctcctcttcacacgtgactgaagggcagactctggatctgaactgtgtggtgcccgggcaggcccatgcccaggtcacgtggtacaagcgcgggggcagcctccccgcccggcaccaggtacaggggccaggatggggaggattccaggtcaggcaaggttagacctgcagttgctttctgtacccaaacctcatgcaaacaccagcctgcttggggaccccaggggataaaatacgtttgcgggacgagttcaccagcctgcaaatcaggagacctgggtttttctcttggctctgcagctgaatcctttcctgggcctcagtttcctccactgtaaagtgagtgggttggacctctaggattctgtgaatgaagcttccaccagccctaccagctgagaccctgagcttccgagagaactcttgggtaccggcacagttgggcttggggacattccttgtcctggggactttgccctgataactgtcccctcgctgctctgacagacccatggctcccagctgcggctccacctcgtctcccctgccgactcaggcgagtatgtgtgtcgtgcagccagcggcccaggccctgagcaagaagcctccttcacagtcaccgtcccgcccagtgaggggtcttcctaccgtgagtatggcagatgccatgggcaaggggggaagggagggccctgaagctaagcccacccctgctgagcccagccctctgcccctttggccccaggccttaggagcccggtcatctccatcgacccgcccagcagcaccgtgcagcagggccaggatgccagcttcaagtgcctcatccatgacggggcagcccccatcagcctcgagtggaagacccggaaccaggagctggagggtgagccaggctggtgggcaggtgggcaagctgggggcaggcatgggggtgccgtcatccccactgtgcaagggtggggcagaagtctggacgccccacattcatggtgtggccctgagtaaggcccttcccgtctctgtatggcaagagcgctggacccaggagtttccaaggcctttgttactttctgctatctgcgactccatgagctagacac

SEQ ID NO: 6063 - DNA, 1410 bp, Homo sapiens
taatgtgcttagagcgtgcctggcatgccagaagtgctttataagtgttaactattattatcatttttttttttttgagagggagtctcgctctgtcacccaggctggagtgcagtggcgcgatctcaactcactgcaacttccgccttccaggttcaagcgattctcctgtctcagcttcccgagtagctgagactacaggcacatgccaccgtgcccggctaatttttgtatttttagtagagacaggatttcaccatattggtcaggctagtctcaaactcctgacctcaggtcatccacccacctcagcctcccaaagtgctgggattacaggcatgagccaccatgcccggccaagtgttaactattagtgttactctggggggtgagattttctatggcagagggtcccaccaaccctgttcccaaatctgacaacggctgtgccgactcactgatctctgttcccccagcccctggcagctccatgcccatcagaattgagtcatcctcctcacacgtggccgaaggggagaccctggatctgaactgcgtggtccccgggcaggcccatgcccaggtcacttggcacaagcgtgggggcagcctccccagtcaccatcaggtatgcagctggcaggaaatggtgggagagccgctggatgtgggggccctggctagctttgccaagagggagacctaggagcccccgtggggtgcagtacccccctgtgtcagaggttagaccctggccccaggccttcaacagttccagactggcacctgactctgttcctctgtcctgtcccctattcagacccgcggctcacggctgcggctgcaccatgtgtccccggccgactcgggtgaatacgtgtgccgggtgatgggcagctctggccccctggaggcctcagtcctggtcaccatcgaagcctctggctcaagtgctgtccacgtccccggtgagggtccctgcagtgggacgggaaggccgggggagggaggaagggacagagaccagggggcagaactggcagaaggaaacactttctggcactcggcgagaactgccgctctgattccagacttcacctcccgccacccacacggtcccaggaccaaggagccggctcaggtggagtggttcctgtccctctccacggcttgcgagcataggctttggactatgctcatctgtgcatgagtcccagttcctctggccacacttggagatgttgcacaagggacctcagctttccacctgtcactgtcccttatctgtaaagaaggggtagtagtactcttgtactctactatctaattatagagttcccaaaagcctgggactgcacctctgcgagtattggagggtgatttacacatctttattagagccggtgtggt

SEQ ID NO: 6064 - DNA, 1100 bp, Homo sapiens
atcaagaagtcatgggtgggtcaatgggcctccagcttgtggttagaggctggggagggaagaagccatattcggctggccatgtggaggcagaagggtgtggccctagtcccagaaaggccacctgtcggccgtccccactagggcctggtcacagcccagagccttctgccccagggctacaggttacagcccaagagttcaggcctctgagcagccgctctgtgtccagtgcccggcagcacccggcccatccgcatcgagccctcctcctcacacgtggcggaagggcagaccctggatctgaactgcgtggtgcccgggcaggcccacgcccaggtcacgtggcacaagcgtgggggcagcctccctgcccggcaccaggtatggcagccccccgggaccaccttgctggaggggctggatgggactgttccagccccctcccaacccaccccatttgcacacagacccacggctcgctgctgcggctgcaccaggtgaccccggccgactcaggcgagtatgtgtgccatgtggtgggcacctccggccccctagaggcctcagtcctggtcaccatcgaagcctctgtcatccctggtgagtgactcccagtgacatggaaagctggaggaggcagagaggcctccggggtggtgagatccaagggacccctcttgctgacagggcagaaggcccacaccggagctggctgcagggccctgcccaggccgactccacctgtcagagtaaccaccgccttcccgtcacactttgctttggccacatgactcctcaggcgtcccctcccacctcctcttcctctctccaactcatctctgccctcatctctctcacttcctcactcccctctgcaaggcgtggcccatgccctggtcctcccatcagggttgctgagctgagggcatcaagtccaggcccccagatgcctgaaaagctggatctggccttgaaaccctgggctgagctagctgcagggtgggcaacccctgccctctcatctcaggagcatctacaactctcactcccatccccactgctgcaggacccatcccacctgtcaggatcgagtcttc

SEQ ID NO: 6065 - DNA, 1161 bp, Homo sapiens
aagtgatgcctagaggttatggagaaagacaaagtggccacaggaccggggcctagccagcaccggctcacaggggggcttcccgtccctgcagaggctccaagcaagcccatcacagtgactgtggaggagcagcggagccagagcgtgcgccccggagctgacgtcaccttcatctgcacagccaaaagcaaggtgtgcaggtcagggagtggggatggaggaagtctgtcttctggggtctctgagccccacccatgaccccctttcgccttgccctgcagtccccagcctataccctggtgtggacccgcctgcacaacgggaaactgcccacccgagccatggatttcaatggcatcctgaccattcgcaacgtccagctgagtgatgcaggcacctacgtgtgcaccggctccaacatgtttgccatggaccagggcacagccactctacatgtgcagggtacacctcccatctatacctgattctcccctcctgtctctcccccattcccaccagaattagcacagcatttcttcattctgctgatcatttctgagcacctgctgcatgcctggtcctggtctaggctctgcagaagcaggggagagaagcatgtacagtatctcggtcctcctgaagtacacgtcctaggcagggagaccataagcatgggaataaatgaacaagcaagataactacacatggcgatgagtgccaggctaggaatgatgagaaagcaagaaacaaggtgggagaaggccaggagcggtggctcacacctgtaagcccagcactttgggaggctgaggcaggtggatcacttgaggtcaggagttccagaccagcctggccaacaggtgaaaccctgtctctactaaaaatacaaaaactagctgggtgtggtggcaggtgcctataatcccagctactcaggaggctgaggcaggagaatcgcttgaacccgggaggcttaggttgcagtgagccgagatcgcgccactgcactccagcctgggtgacagagcaagaatccatctcagaaaaataaataaaataaaacaaggtgggagaggcaagggctactctagatagggcagtcagggagggcctctctgaggaggtgacacctaagctgagacctgaaggaaaggtagg

SEQ ID NO: 6066 - DNA, 1124 bp, Homo sapiens
tttttgagatggagtctcgctctgttgcccaggctggagtgcagtggtgcaatctcggctcactccaacctccacctcctggattcaagcaactctcctgcctcagcctcctgagtagctgggactacagacgcacaccaccatacccagctaatttttgtatttgttagtagagatggggtttcaccgtgtcagccagttggccttgaactcctgacctcaggtgatccacccgcctcggcctcccagagtgctgggattacaggcatgagtcactgtgcccagcccattttgctttttataaacaccacggagatgagtgtccttgtaatgaaatctttgtgcccttccatgattctttctttaagatgagttcacaaacttggaatttctagatcaagggattgcaaccctgaaaggcttctggtaaatttggcctaatggctggtgcctgccctccttgtgccctgcagcaatgccagcacaacgccgcaggggagttctgcgagctttgtgcccctggctactacggagatgccacagccgggacgcctgaggactgccagccctgtgcctgcccactgaccaacccagagaacatgtgggtaccctagctcaaggcccaaggacacacttccactggggaatgagtggaaggcgttgcactggcttttggggcagaagtgaagggagcaagatggagattgggcttcccatgacctgacctttgcctccccgatcccaggttttcccgcacctgtgagagcctgggagccggcgggtaccgctgcacggcctgcgaacccggctacactggccagtactgtgagcagtaagtttgtaaacagaagtagggggagggtggaggacaaatggtggactcccaagtgagagccttaaagggtgttgctcagaaaagtctcttctaggattatgctccttccctgcctcaaacacttctaagacacctcattgctcttgggacaagcccaccctccttaggcagctttactgtagcagtctcatcccacttctgacacccaactctgtactttagctgggcttaactttttaaatgctttttctttctttttttttttttaaactgagacagggtctcactg

SEQ ID NO: 6067 - DNA, 1112 bp, Homo sapiens
gacactacccaagcagaggatcctgctgctgggagaagggggcagtgggcatgtgcctgactcctttgggcgcatgagcttgggagagcagagaggtgggaggctgggggttacagagaatctaggactggtggaggacaccctggcaccccagggacccctcggctccccttccaatcctgctggtgtctttccagggcaacaacatcatgctagtggcctcccagccagcgctgcagggccctgagaggaggagctacgagatcatgttccgagaggtaaggggcacctggccatgctgtgtctaaccccaccccaccctccaccctgactcagagcctggctttgatacccaccctgtctctcgctccccaaccttcacctggcagccctcagtcagtgcctgtaaggcaggatttggggggtggtaactgtaggagcagcccacaaagcccactgcccccgcccacgttgccacccccaacccaggaattctggcgccggcccgatgggcagccggccacacgcgagcacctcctgatggcactggccgacctggatgagctcctgatccgggccacgttctcctccgtgccgctggcggccagcatcagcgcagtcagcctggaggtcgcccagccggggccctcaaacagaccccgcgccctcgaggtggaggagtgccgctgcccgccaggctacatcggtctgtcctgccaggtgagtgtgtggccagctccaccacctctgcacaggcacagaggcatcagcaagcaaatcagccggcgtcgccgcagccttgattaccatcataactataatgacccctgcatctgggccctgcatgtattcctcccgacagccctgagttacatatcattatcccctttaacaggtaaaaaaatagaggtgctgaggggtgagtgtgtcccaagggcacacggctaatgtgtggcagaaactaatttgaacctgggtctgattgactccaaagcctagcatgtcctaaccactgggcagtgcagcctcacgtttgggccacactctccgggggttaaaacccagttcatgcccttgagggggcccaccagagacagggagccaattcagaa

SEQ ID NO: 6068 - DNA, 1190 bp, Homo sapiens
ttgccatgttggccaggctggtcttgaactcctgacctgaggtgatccacccgccttggcctcccaaagtgctgggattacaggcgtgagccaccgcgcccagccacatgtgctctttcagtggctcccctgggtcttgggttcttatctggactgagggtggattcggccagagctccaggcagcctctcccatgggctgtccttcagctccaactctgtgcctgcagaacaatgtggtggggcgcttgtgcaatgaatgtgctgacggctctttccacctgagtacccgaaaccccgatggctgcctcaagtgcttctgcatgggtgtcagtcgccactgcaccagctcttcatggagccgtgcccaggtacctctgcaaggtgggcgggcaggaccgccaagccctgggccggatggaccaagcgccagtcccaggccacggcccccatcccagccctttctcctcctcccagttgcatggggcctctgaggagcctggtcacttcagcctgaccaacgccgcaagcacccacaccaccaacgagggcatcttctcccccacgcccggggaactgggattctcctccttccacagactcttatctggaccctacttctggagcctcccttcacgcttcctgggggacaaggtgggtagtgggtggaaaggcaaaggaaactccaggcagcaggaacagcgcaggcaaaggcttggaggcgggagggtcgtggtgccttgggagaatagtgagatacactgcatggaaaaggtggctggagcagtgacagggcccgaattcaggcctccgcaagctcctgtctaaccctggtcccaggtgacctcctatggaggagagctgcgcttcacagtgacccagaggtcccagccgggctccacacccctgcacgggcagccgttggtggtgctgcaaggtaacaacatcatcctagagcaccatgtggcccaggagcccagccccggccagcccagcaccttcattgtgcctttccgggaggtgagcaatactgtcccctgggggtaggggtgcgggcaggcccttgctcctgcctctccggcattcaatactccaggacgtcaggggctgagcacatgtgtcctctccttggcagcaagcatggcagcggcccgatgggcagccagccacacgggagcacctgctgatggc

SEQ ID NO: 6069 - DNA, 1135 bp, Homo sapiens
tggaggatgcaggctccagagagttccgagaggtgtccgaggctgtggtagacacggtgaggtgaagggggtttgggaagctcgcgggtgtggcggggcaggaccgaggatggggtgaaggcctctggggctgatggcactgtgtccctccccagctggagtcggagtacttgaaaattcccggagaccaggttgtcagtgtggtgttcatcaagtgagaaggggctccctgggggctgctgggggacttgagcgggtaacctggagggggctgatgaggatgggaaggaagcctggcaccgcggaaaggcctatgggatgagtcgctgtgggtggaaattcaggaattggtcgggggatcattgggacctttagttgcccttctttgggtacaggctgtcccggaacagggcctgagcgtcggggcgggagcctcatggaggagctgagaacacaggtgtctcgctgaccctcctctcctgcctgtctccatccccagggagctggatggctgggtttttgtggagctggatgtgggctcggaagggaatgcggatggggctcagattcaggagatgctgctcagggtcatctccagcggctctgtggcctcctacgtcacctctccccagggattccagttccgacgcctgggcacaggtgagcctatcctggtgtctgggatcgcctcctccagactcgtggggtcccctttcagtgtctctgccataggctcccaacttgggcttgcacaccactagaaacagggagctcactactcctgagtctgccccatcgatctttacacaatcttggcttggtagagcacagactgtttcctctagcacatacccgttagacccgagttctgctccttccttctagacctctgcacattgacaataggtaatcaggcctttatttatcctgtacttccaagtccaaaacacattagtacttaataataatgagcaactgtttactgagcactgactgcctttatttccagcctccgggtcagtcttcacagcaattcctatgaaggagatgttattcctcctgtttcagagacgagggaactgaggcccagaaaggaaaatctaaatttgtccagaatcagatgggcagatagtga

SEQ ID NO: 6070 - DNA, 1201 bp, Homo sapiens
tagtaaattcattgctgttctgagtgcttgaagtttgtagaattagctgattgagaatattgcccacatattatattacaaagccatacattttattagataagtaagttgctttttgagtaatgaccagcatgcttttaacactttgaggacaccaagattcagttgctgaattctctccaatatttttcttttttctagggcaagaggattatgacagattacgaccgctgagttatccacaaacagatgtatttctagtctgtttttcagtggtctctccatcttcatttgaaaacgtgaaagaaaaggtaagctgatcagatactcttgccctaagaagatcatctcagaatttctactgacctgttataaatagcattagaggcttgttgattaacaaaggtgtattttaaaatacctttttttagtgggtgcctgagataactcaccactgtccaaagactcctttcttgcttgttgggactcaaattgatctcagagatgacccctctactattgagaaacttgccaagaacaaacagaagcctatcactccagagactgctgaaaagctggcccgtgacctgaaggctgtcaagtatgtggagtgttctgcacttacacaggtaagaatggcatgaaaccccatgtgtatttatggtcgagtcatttattagagcattaggatacaggagttatttctaacagtgatcagcagtgctcaaagatgcccagcaagaatatgaacagcttcatattgtatgttcttttgttagaggcctctgtgttttttggagaatattattagttcctaaaccccttgtgttggtaagctctcgtattgtactgaatgattcgtagtggtcagggttgtgttaaaacaaaaaccttacaggaaaggttcagataagcataaacttgcaagagacgatgtgaatgattttttttttttctaaacacttaaattttcatctgaatatgtctgatcttttcttgccaattctgacaattgatactatactgtttcttgggcaattcaaccaggatagggaattagtcataataattgagactttaatgtcaaagaaggcagccatggctatttctgccacagttctcaagcgtgctttatatagtgtccctattcctatatttttggaagtattccttcctcatgcattccggccgtttttgagtg

SEQ ID NO: 6071 - DNA, 2149 bp, Homo sapiens
ttggtgaagtgagattattgtgttgagattcagggttgtttttaatgtttctttctttgccaactcttgggggtttgaatgttttaaatttgaactccaactttattatactgaaaatcagaccgcccattttttctttctaccccttttcagaaaggcctaaagaatgtatttgacgaagcaatattggctgccctggagcctccagaaccgaagaagagccgcaggtgtgtgctgctatgaacatctctccagagccctttctgcacagctggtgtcggcatcatactaaaagcaatgtttaaatcaaactaaagattaaaaattaaaattcgtttttgcaataatgacaaatgccctgcacctacccacatgcactcgtgtgagacaaggcccataggtatggccccccccttccccctcccagtactagttaattttgagtaattgtattgtcagaaaagtgattagtactatttttttttgttgtttcaaaaaaaaaatttttgtgtgtgtgtgttttttttttttttttttttgttgtttaaaagcaaggcatgcttgtggatgactctgtaacagactaattggaattgttgaagctgctccctggttccactctggagagtaatctgggacatcttagtgttttgttttgtttttttccctcctcttttttttgggggggagtgtgtgtggggtttgttttttagtcttgtttttttaattcattaaccagtggttagcccttaaggggaggaggacggattgattccacattccacttcctagatctagtttagaaaacatgttccccatctggtgctcttaggaaggagtatagtaaatgcctcatttaataacatactcctttttgaaagttgccttttctctccacccttgagtagatccagtatttgatgaaactcatgaaagtgggtggagcccatcttgcccctcctcttttctaggacgcactatatgtgactgtgactttcaaggacatttgtttgccatttgctgatttttttgggaagttaatttctaacttctttcactgataaatgaagaaaagtattgcacctttgaaatgcaccaaatgaattgagtttgtaattaaaaaaatttttttccctttcagtcattgtcttatatgcttagcatagatttgcagctcagtagtatatggtgttcctagaatgcagctgaagacctgttatgtagaggaaatacgaggggtggtgctagaagacagacatctgtggaatgattcacatcctctcaagttaggaggatggaggcctgcttcattaagaagctgggggtagggtgggggtggggagaacacttaacaacatggggaccagtcaggggaatccccttatttctgttttgcatatgaggaaccctagagcagccaggtgaggctctctagtttaataaaaatcatggaaagactcttaatgcagactcttcttaagtgttaatagggattttttcagcttattttggttgcagtttccaatttttaaaaatgttgaggtaatctttcccaccttcccaaacctaattcttgtagatgcattagtgttgaaccaatgctttctcatgtctcaattctttgtatatgcattcttttcagatgtattaaacaaacaaaaacccttcacaagccagcctgagggttgttattttccctccgtctcttacttttcagatattgaggagtgggaatttgactcttgataacatcaatttctaacaaactttgggataaaattttaaagctttattatttttattttctggcattttagtttgagataatatttagccctctatatgttcaggtttgtgctttctcctctaagtttgacccttcccttaaataccaagtaggtccataataattcttagtgaagcagtgttcaggaagctcactgctcatggtggaaggaaatgtcagtgtacctttaatccatagatcattgaaaagcagctcattttcccccaagttttctgcatcagtggttctccaactggagtgcagcttgaacaatgtgatttttaagttttccaggcatttctaaaatgtagccaagtttgggaatcaccacacctagttggttatctcaaactactactatca

SEQ ID NO: 6072 - DNA, 1260 bp, Homo sapiens
aggttcttgagctatcaagggacctggccagattcatgcttggaaagatcactgacttgcaatgtgtggtgacgttcagatgagccagatctggtcctggacagtcacagtaaagccagcttgtcggttcccggctagactgtgagctccctgaagacagagacccatctggctcatctttgtgtccacagttctggtctgaagagctctgttcaaattccacctccccagaggccttccctgattctctcttctaaaacagacccagttctgcttctttccatcccacctgctttgttgtgcttcatgaaacccatcgccacctgaagaagcatcaaagacttgtttggcatctgccttgcccactagactgtaaactccaggacttcatctgccatgtttgctgtgacatctccagtgcctagaactgtgcccagccatgcgggtgctcagtaacggaatgacattgtcagctgaggaacatggaatgaattgaatgttgagtgaatgaacagatgaatatatgatactgtgttatgtgataagtattgggagaatgatatggagatggagggaagtccatctggcagaggaaatcaaggaggtcttcctggagggagataccaaggggatggcttgagtagagatgcaagaaagtgctggggataacgaatagaccagttcagagggagcagagcattcagatgggccagcagccactgtgtgctaggtagacaagtccacttctgatggggggtgggggaagcctgcctccctccctcccccagctcaactctcccaccccaacctctaccctactgggcccacctctggggcattacctgtctaagacccagcgaccttccatgggattaatttggaattggttttccttttatgtctgtttcttttgcttctcatttttaaaggaggctgctttcatgtatttgtcttagccaggaaatcagggcttagatttaaaacctaaatgttgtagaatcagaaagccagttgacttattcactcattcatttctccatccatccatatatttttaaagagtcaccaggcacctagttcatgtcaggggctggttgggagaagggattctgcctgtggtggggaacggggccagctgacttcacaggcagtgtgtggtagagaaaatgcatagccttcaggcgcaaacagacgtgagttcaaatcccagctgtgtgctctggggcgaggagcgcagactccctgcacttcagtttcccc

SEQ ID NO: 6073 - DNA, 1458 bp, Homo sapiens
gaatggaggagtccagagtataagtcaaataacatttttccttattcaggttttctccctaaaaaacaaaaccatttttaattgcacttccattttgtaatggctcataggattgctgtaaggtctcaattactaggggcttccagggcatttctgagaaataaccctgggtccttgtctagacccttatgccagaccccactccaaagagcggtaagaattccttagtgtcatagcccagacctgctgagctgcgaggcttaagtgtccctgatcaccaaatgtcctgtgcttcagggtagcgaggctccctcccagaaggtagttatacatgagggaaggacgctttacaactgggtatctaaactgatgagaacacatgttaagcatcactttaggactgagcctaggtagagttttattgtctcatttctacttgtcaattctgggaaagtgcctactgataagggagactcttcgatagaatgatgaatagtaattgggggggtcagcctttaaaaaggtcaacagcaatttaagtacttagcaatttaagtacaagaataaaggtatatgtgcagcctgccaattttctctttttcccctaaaatagccgattccacgactcttctttgcgggagaacatacgatccgtaactacccagccacagtgcatggtgctctgctgagtgggctgcgagaagcgggaagaattgcagaccagtttttgggggccatgtatacgctgcctcgccaggccacaccaggtgttcctgcacagcagtccccaagcatgtgagacagatgcattctaagggaagaggcccatgtgcctgtttctgccatgtaaggaaggctcttctagcaatactagatcccactgagaaaatccaccctggcatctgggctcctgatcagctgatggagctcctgatttgacaaaggagcttgcctcctttgaatgacctagagcacagggaggaacttgtccattagtttggaattgtgttcttcgtaaagactgaggcaagcaagtgctgtgaaataacatcatcttagtcccttggtgtgtggggtttttgttttttttttatattttgagaataaaacttcatataaaattggccctctcttttgttcctttgagttggagttacatacaagatgggggcattactcctttggaaatgccaagtttatcctatggcaatagtaatacatgttttctccatgtttaaataaggaagaagatgttcatataaaagagaaaaatggtttgatcaggtcagaagataaggtaggggggccggtcctgtagaagcagtggacttcctggtcagtcggactaggcttcctcacttgggtgggggtggagtgtggtggtgtgccaagaacatggttattaggaaactttggatgcactttcaagatagaacacaaaagagctgaaacaaagtc

SEQ ID NO: 6074 - DNA, 1312 bp, Homo sapiens
tgttgaagagggacagctgtgatgcccttttgctggggctgccatcttgaaatctgagtgcaataggatttgcttgtaacagttatttcaggatattttgtttctttaatctgcacactttctagatagattttatttttaagtgtcctcagcattgcagaaaataacattgtaatagcaagtaaaggctggaggctgtttctctgggcttcaaatggctggcaaggctggctctcaaatcccaaagttgggaggcatgtttctgaaaagcaactgaggtgtgactgtttggacccaggcctcatcatcaggggtcctggaggaagcctccaagtagaggggagacctggtagttgaatagttgtttaatcaagccaaatagtcccactgcccccggtcaacaaacccacttttatgacagttttcttccgcagcttggctcttaaattttactggcaggtgtatggttgttggagggttcctagtgagttgggggacctggcaatagagctgcttggttggaggaagtgaagctggcttagtaccagcagctgatctcttccacgtgctgctgctttttttgccactctgatactaaaccagagaaagctgcaggtggataaagaagctgtggctgttttttgcttttgggtggcaatgagaaagagtcacagtgtgggttaaagggatctgcagtggggccaaggatgccaccccaccctcagctgtaggcaagcttgcacataaataacccccgtcagtggagtgttcgggatgcagggggcactatagtgttcttggacttgtcgtcctggggcagttttagttctttatatttagtgggtcagtgccaagtgctaccacttcccaataaaggaatggggacccagaggctgggtccctggctaccttgttatgaggttttgttatttctctgacaagattgctttggaaagagctgcttttagggattattttttgaataccccgagtggggagcagggttctcctcaaagcctcacaaccataggatcataggaaaggggccctattttcctgctgcttcccagctcagaacatatactgaatggaatgtatttttaagagaataaagtctatttttttgtattttaaagattgagagggctaagaaagtagccctcaaataaactgttattgcattataggcccctttgttgggggcagcctgttggtccacacctacttgctcaggcaggtgctctggtctctctcacccctgccccttagagtctaggtgcagcagctccaagcatgggaccaaggaggccag

SEQ ID NO: 6075 - DNA, 1057 bp, Homo sapiens
tatgaagtagacactattgccctcagaatgagagaacattaaactaccagtctggtaagctggatttttttccccatggctttacttccttgctgtgtgaccttgggtgagtcattgtcttcttggagcctcagtttccctgtctgtaaaatgagttctttgaaatggatgatctctaagggcaccaaatctggtattctaaggttctcctgttttcaccatctataatagtatgggatgatttttgcttgtggaaggtatcatccgtgtgggttcttccctcctgccctcaattgtttttctgggccttgttttttagtttctgtatgttttaatctcatggggatgagctcagagaagctccgtgggcctgtttcccaatctgcaaagtgtgaagggattagatgggatggtctctgaggctctttgtggcatcagccttgcccagtgccacacagtatctcctggcgttctaggagtctaggtattatggaaagtacccaagtctgtgtatctcctgttcctgtgcatctcctatgaatttcctggcaagaggaagactcaagacttcctccagaggaatttgtcttctctgccttcactcagcatgggaaccagtgttcatcctgaccttgtctgtatcagatttggcagtgaggaggcttggggagcacctaccttactttcagggacaggaatctattgctcatacttctgcttcccagagttttgccaatctaaaggcattgtcatgtggcctgcctttcctgtccacatccccacctctgatgctcaagatgctatttccaagatctcttactgctgcttctcctggcttactggccagaaactagctcactcaaggctgccatccttcacttgcagcctccctgccattctccttcactggttggcaaccttgagagttcaaagaaaatcaacctctgtggtggtcaactaaaggtattaggaaactaagtctgtggctcttctctgctgatggaaacagaagggcgccaagccatgcctaaaaagatctcgccaataattcttgtct

SEQ ID NO: 6076 - DNA, 1102 bp, Homo sapiens
cctgaagctttggacatttaagaggagagataaaggatgagagacgggaatgtgagctttttggtagtttgtatgtgggaaggaggaagagagctgtccggacctctcttcagctccccatcaaggatgtggacctcatccccagaatcatgcggcctgcatgcatgtgcagaactcggagactgctggcccctcctcaggggtgctagtcccatgcccccattccaggctctatcctctgtaaggctcctgttgagttgtgagcctcctcctagcctaccctgattgttcccagcagcttggagttcccagtctgccgatttccaaggaatttacatattggcccatactcaggcaaaagcatatctttgcagttaacttatggcctgtctgggctatatctgcctctgctgggttggaaaggacccactatggtagcaggtgagggtgtctcggtcctcactttactgacctccacagctcacttttgttatttattggcacaggaggaagaaggggaagactgtacactcagtgtctacaggcaactgcacaactccctggatccgtctgaactgcctgggaagcaggggctgccagagtctgggcgagtacgggccgaggaacgattacggccaaccaggccctgtgctgaggagaactgagcccgctgggtgtctgttgtctgccctctgctcctgcttctcagctcttccaccgtcctgccccacgaaggatccaaggccagttaaccaggcaagacacaagccttggctggaaaactgtggtagagccgggctgtggctcaggtaatttttgccatttggccagagggaatcagagactacaagctggacagtcacccaggcccaaccttccccaatgcacgagtcctctctctctccttgtccctgtccaccaagtagttggaccattctggcccccaaacaagggaagataaagtccccagcacacagcaggagtcaaaaattcttctcggctccttggtgggttgtttctggatcctagggcagcctctgtctgtgtggttaatgttctggtttctcagtctcctcactatatccacttcactcctcatttg

SEQ ID NO: 6077 - DNA, 1695 bp, Homo sapiens
ctgacaaggcttctgacacctcctctgagactgtctttggcaagaggggacacgtgcttggcaacggaagtcaagtaactcaggctgcaaactctggctgttctaaggccattggagccctggcctcatctcgaagatcctcctcagaagggctctctaaaggcaaaaaggctgccaatggccttgaggctgataacagttgcccgaattccaaggctcctgttctatcgaagtatccttatagctgtagaagccaagagaacatccttcagggattttcaacctcacataaagaaggggttaatcaacctgcagcagttgtgatggaagacagcagtccgcatgaagccttgaggtgtcgagtcatcaaatccagtggcagagagaagccagactcagatgatgacttggacatagcatctcttgttactgccaagttggtaaatacaaccatcactccagagccagagcccaaaccacagcctaactctagagaaaaggctaaaacccgaggggcacctagaacctccctatttgagaatgataaagatgctggaatggagaatgaatctgtgaaatctgtcagagcctccaccaataccatggagctcccagataccaatggtgctggggtaaaaagccaaaggccctttagccccagagaggcgttgcggtctagagccatcatcaaacctgttattgttgataaggatgtgaaaaaaatcatgggaggatctggaacagagactacgttggagaaacagaaacccgtctccaaaccagggccaaacaaagtgacaagtagcattactatatatccatctgacagcagcagccccagagctgctccgggtgaggccctgagggagaggcacacatccactagcaatatccaggtggggctggcagagctcacatcagttagcaaccatgtcagctccccttttgagctctccattcacaaacatgacatcaccctgcagcttgcagaagcggagagaatggcagatgggcccctgaaggacaggccagaaacagtggtctctcggagcagcattataatcaagccatcggatcctgtggagaggaatagccatgcacctccagcggagacaatcaggtggaaaagccatagtgccccttcagaagtgggcttctcagatgccagacatgttactgtgcggaatgcctggaagagtaggcgagacttgaaatctttagaagaccccccaactcgaataggtaaaaacgtggaatctaccaatagcaatgcctacacccagaggtcttccacagacttctcagaactcgaacagcccaggtcctgcctttttgagcagggcactcgaagggtaggaccaagttcaggggatgcccctgagccctcctccagaaggacccaaagtagcctcactgtgtcagaggtgcttacccgtcggaatcgggtaggagacaccatcactgtcgcagcctggaaccactcagcaagcatggtgagttccagcctctctcccctctctcttttctccctcccttttccttctttgccttttcctttttcccctctgctctggcctgtgtgacccaggatcttgagaactgagtagaactgggttccttagagaactgttgaaaaatcaggggggtttgacctttctcctaaagaaggtttttggcagcatcactttccaaaat

SEQ ID NO: 6078 - DNA, 1102 bp, Homo sapiens
gattccctcatctcagccttccgagtagctgggattacaggcacccgccaccacgcctggcccatttaagtttataattcagatattttgaagaattcttagtcattgaggactaatgatgaaaccagttgctgacttctatatgacagctacagtacttaagtaccttttatgtgtttatttaatctcttttcagcaacccattagggtagatattaatgaggataactattattatcctcattttgcagaggaaaaaactaagtccctaagatgtgagatcggtttgacccaaggtcagtgccaagctaggatttgaccttgagtttactcttgaacattacattgttttaacacataatgattttatgaactgtgtactgccctgtaagtaaatgaggtcaacattgtcttatgtttcctaggattgaaagaaagccatttttagatcttgatggacttaaagattcattaaatggaagactttacagaagtatacagaaactagttaaatatagaagattcttatagagatatttagaaaatgtagttagggtgtgtaaacaaagtaatggtccctggtagatttaaatcaggaataccagtttttatgcttcttgccacagctgtaatggagtataatatgatatattcttagtgtaatttgataaaattagacattttccaacatatgcgaaaatattttctgtaggaacttgaggacttatcattatgttagaattttgttttgagactagatcctagggcagttttaaagtgactaccagaatcttaaagacatgtgatggaaaaatagatgggaggacagttaatggagcagggagaattaatacggaaataataaggtaacttagagggagagaaaaggaaaataaaggaaagaatcccagcactttgggaggctgaggcgggcggatcacgaggccaggagatcgagaccaccctggctaacacagtgaaaccccgtctctactaaaaatacaaaaaaaaaaaaaaaaaattagccaggtgtggtggcaggcgcctgtaatcccagctactcaggaggctgaggcaggagaatggcgtgaacccaggaggc

SEQ ID NO: 6079 - DNA, 1425 bp, Homo sapiens
ggccgtggttcccgtggatctcggggcaatcgtgggggcaatgtaggaggcaagagaaaggcagatgggtacaaccagcctgattccaagcgtcgtcagaccaacaaccaacagaactggggttcccaacccatcgctcagcagccgcttcagcaaggtggtgactattctggtaactatggttacaataatgacaaccaggaattttatcaggatacttatgggcaacagtggaagtagacaagtaagggcttgaaaatgatactggcaagatacgattggctctagatctacattcttcaaaaaaaaaaattggcttaactgtttcatctttaagtagcattttgctgccatttgtattgggctgaagaaatcactattgtgtatatactcaagtctttttatttttcctcttttcataaatgctcttggacattattgggcttgcagagttcccttattctggggattacaatgcttttatcgtttcaggcttcattttagcttcaaaacaagctgggcacactgttaaatcatgattttgcagaacctttggttttggacagtttcatttttttggatttgggatagattacataggagtatggagtatgctgtaaataaaaatacaagctagtgctttgtcttagtagttttaagaaattaaagcaaacaaatttaagttttcttgtattgaaaataacctatgattgtatgttttgcattcctagaagtaggttaactgtgtttttaaattgttataacttcacacctttttgaaatctgccctacaaaatttgtttggcttaaacgtcaaaagccgtgacaatttgttctttgatgtgattgtatttccaatttcttgttcatgtaagatttcaataaaactaaaaaatctattcaaaacattacctatttcaaattcaattgtgtcctaaaacattattttattcgtaatccttgcaaggaatattgttttcaaagtataactgcctatgtgagtgatcaaattcatgcaaaatttcttgtttattccaacatgtgttgtggatattagactgaggattagtctaaattcaagtatttattccaattagcactttcattgattggtgttctctcatagtctcttctaattttgaaattttatcttttattaaaaaaaaaaaaacaggttcatagacttttgagcattcttgcaggcattggataatttgcattaaaacaaataaaatgtggctgggaaagcagactgcaatttattttgacccacattctttataagggataatttgtgactgaagaccttatttgctggataagtgaatgtacatacagggaaaattgttagtactgtggcgtcaattgcactgcggactttagttttagtgaaaatgatcgtgactaccatttcagttactggtt

SEQ ID NO: 6080 - DNA, 1178 bp, Homo sapiens
ttttccacattctccgcagtctctttattgtatatggctcttcccagcaacagctttgtcttcctgatcttctttggctcaggagaccaagaaaatgaggctgtgttccccgagctcctccagagggtggagggagtgggaggctcggaagcctgcctaggatgcagtgtttggacagaaactctgtggttggtggccagggatgacttcctgccgggtgagtggagagagttaccgtcaggaggggtctggcttccagccctgtctctgccgggaatttgcctggtggccttgagcaaggtcctacaccctttctaagccccagcttcctcatctgttaatgggagaagtaactctgaccagcaattcccagcgtgggttccatgggatggtaacaggtcttgtaggggaaaggacagaggggaaggggactctataatcaaatttattgggaacaccagattaaacaaagctcagtggtttcttttttgcaatacttcgtagagccttaaacatgtggctcttaatcttttcctctgacagctggactcacaacctccaggggcccttccaaactagaagttatccgcatccttgtcatcatcttagcagcccatacatgttgagcatttgatatatcccagacaccacactagtgcatcacgtggcttagctcacagaatccttgtattttataaataaggaaactcaggcgtgtagaggttgtgtgactcacctgaggtcacacaagaggctcagacaaacccagggtcctggtgtccctgacactatagtgcttgctatgatctgatcttaccccagaagctattttctttctctgctacttggctgaccacaaatgcccaagagacatcaccacttggagagtcagaggtcacaaaagaggggcccaactcctgtagaagtccgaggagaggaagaaagggttctggagctctcaggcgtcagggccaggcctgcacccttctgtgcccctccatgaatggctggccggcccttgactgtgtcacatatctaccaagagctcaagagcacggacatgaagtaccggaaccgcgtgcgcagccgcataagcaacctcaaggaccccaggaaccccggcctgcggcggaacgtgctcagtggggccatctccgcagggcttatagccaagatga

SEQ ID NO: 6081 - DNA, 1548 bp, Homo sapiens
gaaagaaatggcacacccaaaggtgtggaagtgggagtgagcacgatgctctgggaactgtagctggagtaccaggaagcagaccacggaggataccatgttgacaggggagaaagttgactgttctcagttgtccttttacctggctatcagaatgatttgccatttgcagagcatgctcgctgatgcagtaactgaaatgccctcgaggtggcgcacagaagcagcgggcccggcctccagatgcctctactcagacctggggcaggaggattttctaaggactggtgcggtgcgggcacatccggggagcagaaggaagctgttgataaatccaacctcccaccccggccgatgatgccctctctgcagtttggctcagttcccaggcgtgtgcattgaaagcaaaatgagtgtggctgcctgaaatgctgcccagacacgaattccagccagccagccagctcctaaccggggaggcgggaccagggctgggtgtgccctgccaggaaggtgggaagaaatgctccaaacagcctagtcttgctcaggtaggaggactctggaaacctctcttttaaagacacagttgatgtgttgaaaagaatttggaagggcgacaggcaggttcgtggtctgactataccctttgctagttggatggataacttggggcagtaacttggatggataattcagttcagctctctgagcttcagtctactgatctgtaaaatggagacaattatgaacccctttcaaggtcattgtgaggattaaatgaggtaatgaaatacccagcactgttcccaaaccatgtaaatgctcaataaatacataatactttgtaataatactcatatgaaacctggttatctatgtaaactgcctaatactttgtcacttagttgctttcatctgccccataagatgggtactattattattccgattttacgtgtgaaaaaaactgaggcacctaggggttaaggaactcacccaaggtcacatagctacaaagtgttggtctcaggctgtgaacctgggagtttggctccagagactaggttcttaataagtaaaccaactcagtgcagtcgtttcaaaaacgaccaccattattactgtcattcgttggggctccttcaaagcagcatgctgcaggctcccctgacagttttcctgtggtgagtcatagctgttgagaatgtgcaatggcacgcacaggtcagcgagacaccatcccagctgcaggagatggcgttgcctgggtcctgggagttgacagaggctggctttgagagagatccctctcgtactcccagagagagagatccctctcttaggcccagagagtggggccactgtccttccaaagaggaccttcctctttccacatttcagccctgggggaccctctgggtgtgcctttcatctctctgtggtcagttcctcaattcatcatgtattcattcatttattcatttatccatccatttagcaatgatgtatcaagtgtccacctagagcactgttacaggagctgga

SEQ ID NO: 6082 - DNA, 1205 bp, Homo sapiens
taatcccaacactttgggaggccaaggcggttggatcatttgtggccaggagttcgagaccatcctggccaacatggtgaaacaccatctctactaaaaaaagataaaaattagccgggcttggtggcgggctcctgtagtcccagctactcgggaagctgaggcacgacaattgctagaacctgggaggtagaggttgcagtgagctgatattgtgccactgcactccagcttaggccacagagtgagactcttgtctcaaaaaaaaaaaagaaaaaggatgcttgggagtcatttcatgcctctgctttctctgggtttttctctgctctttggaagctgggagaggtcatactgggtagttggggtgtgaatctatagtcgaggtatagtgaggaagtcaggttgtgttctcagccaagtttcattgacttctgtttgctctggggtgcatgttgcaggctgagctattaatagttacttgggggtgggagggagttgaagatgacaaggaatgttattgctgcatttttctccacaggtgcgggagtatgagttaagaaaaaacaacttctcagatactggaaactttggttttgggatccaggaacacatcgatctgggtatcaaatatgacccaagcattggtatctacggcctggacttctatgtggtatgaatatttaatcttttcccgctcctggtctgtgaggagaggggaatctttatttcatatgtggtatgttggtgttcacatgttgagttgcagctttgaatattgtctgcctttgtgttctcctcccccttggggaaatgtgcctcatttgtggcaaatgtaggggtgcagctctgaacaaggtggacaagatccctgctgttggggaacttgcagtcgaggatctgtaaagcacccacatggcttaaaggtggatgaaggaaactgttccctccagccagtgatttgaaactttggagagaggcagtattggtgccacatttggcctatgggttggttggctgcactgaggctgttctccccctggttcttcctatagaaacagctttgggtgatgcagtggtttgctcaggaagggggttttaacatagaaatgaccttttgtgttactgccgtgttttggtccaacaataaaactgaatagcctaaatcagaagtcctgactagtgtggaacctgaaagatggtgg

SEQ ID NO: 6083 - DNA, 1365 bp, Homo sapiens
ccagtctcctgccccagctcagctctgtgtggactctggtccagacagaggactgggcatctccagagcctgcacagtacctgctgcacgtagggcaaggaatgagcactagaccgcctgtccccaagggagcctcagtggggcgacagggtgctcggcggactccacctcaggccctccccactgttgctgtgcattcctgtgcaggtgcatctctttcttactaactggtatttattaagggaggtgctctgtaggtctggagcctttccctcatcctttttgcgagtccccacctttttgtttttttttttttctttgaggctcactagaggacgcagaaccttgggagattgatttgcacagaactccccacctcccacttttacaatttccagtttctgattgaaaattttagggtttctccccactgcccttccctatctttccttcccctcaacaccatgaaggaaaaacacacacggcagggctttttgtagccctgaaggcaactttagacatttaaaatccagcactttaatctcttgttctctgtgaatcactatgagaagtgaatggttttaaaggctgtaatgctatgttggaaattggtttgttttgccttttattgaaaaggtaagatcatgtgattggaagaacacaactgttggcttgggaagaggactttgctgctgaagtgttttctaccttctgagtgtgtttaaggcaggatttggagggaaggaccagcttagggagagtgtctgagccacagcgtcaggatgggggaaaccacatgggatccatcaagttccagttgaacaggagcaagatcagaacttaggagggcagtgtcagctcccttgttggctgtcaaggaacaccgatctagtagaaacccacttggttgtgacccaggtagaggtagatgccatacatttgagatatgcgtccttaaggaacctgacaagcagactgaagggatggtaagtgtgacagcctgataagttttctcaaagcccaggatacagagccagtgttttctgtaactggagacctcagttaggccaacttcgaattccagagcaacgtaggaagtctattcagcagaaactcgacattgttcagtgtgtattgctgtgcagggtgcctattgtgacaggacacaaatgttactatgttttaatttgctatatttttgaatgggtaaagcattactttacttctcttggttacttgtaccaccattccacccctatccctagcctgccccacaaatctaatattaggaagcctcttaactgaaaccaaatgaacatttgggtcaggtgccagatgtctgctgcctagaatagctttttctag

SEQ ID NO: 6084 - DNA, 1139 bp, Homo sapiens
ctaccaccttgaatttatctcttaactgtgtgttcaagtctttgtcattgaaactagtttttcatatcttagattcagttgtgtatgatttaatgtcccttattaggagtctttaggcagggagggaagaaaaaacagatttgttcatagcaatgtcagtatccattttggcacataaagatttttgatgagccctgtttgcatagagccagatgttttcccctcccccaagagtatctacatcagggatgtgacttggtgcgaagagtcaggggaaagaggaaaaacccaatttctaaatgacctccttgcccagcttactaaaatggctgcagagcagacacaggatgaatttgaacctgacacaggatgaatttgaacctttggtctcatttatggaaaaacttgtgcaattttttttctgtgctacactacatacaaatcaccaaattacaaattacccttttgtgatccttggtgtactgagcagtttctttggggctttttctttctgggaagcgggagggaaaggagcaaggtgtcatcctgctcttcatttgtattttggtcccaaaatgtaaatacaattttctatgttacttttttgtggtaactaccgagatgaatattttaattagataagttatatgaaaaggaaaattccatgtctaaataaaaaacaaactccatatactgtgtcttccttacttatagcatcagtggaaagaagttagaaaatgcctgattcttggactgtttaaggcagagtttttttttttgtttttttttttgagatggaggaggcaatctcagctcaccgcaccctcctaaggcagagatcttaatcagcatccttgggctgggccttaaacgatgccgaatttagtagtaagaggaatttcagacggaaagaattctgtgagcaaagggcgggaactcagcatttgtggggaacaggcactgtcccttattatacttggaaccctggtaaccccatcttaaaattagaaactggttcaaaggggtgaaatggggccgggcatggtggttcatatctgtaatcccaacactgaagggcggaggcaggattgcttgagcccaagagttcaagaccagcctgagcaacatattgagaccct

SEQ ID NO: 6085 - DNA, 1493 bp, Homo sapiens
cccgtctctactaaaaatacaaaaattatccgggcatggtggcacatgcctgtaatctcagctactcaggaggctgaggcaagagaatcgcttgaacctgggaggtagaagttgcagtgagccaaaatcacgccactgcactccagcctgggcaacagagtgagactccgtctcaaaaaaaaaaaaaaaccggatgtctaggccaatgataattatttttgatgcagtgtggattagttcttttgttaaccccactgtcttggggaatgatgccagctgggaaattgagtttttgactgaaacatggagccttcactgctttttttctggttcctatgaagatttggaacatagaaaacacaaaaactcaccttaaaatttgagcaggtcgttgatggcaaaaataattttaaggaaaaaggaatattcttatgtagttattctaaagtttaaggagcgttgttgaccataatattgcttagttttcttactgctgttaagtaagtaaattgtttcaaagtaggttttgtgtgtgtgtgcctagtgtaaaagaactgaaattttgatgcttacagcacttggctcgtgcatttgtatcaaaatttgcctgcctctttatgagggaggcctgcttttcacacctcagtttatttaatacgaggcaagttgtaagacaacactcattctaggtgattctgtggtgccatgaaatttaaggtaatttggggaaaaggattagtcagttttaagcaagagtcacatcttttgagctttcgattatcagtgtagtacctgactaaaaatgaagtaatacccttaaaccatttataatttctagtatttctctgaaagatcgttttggggacaaaagtgacttgacatgtccaatttcatttcagaataaaaagctagcatctttaaaaatctcagattgcttgcttacagatacaagtacgaattatggacaaacgattccttttagaggattacttttttcaatttcggttttagtaatctaggctttgcctgtaaagaatacaacgatggattttaaatactgtttgtggaatgtgtttaaaggattgattctagaacctttgtatatttgatagtatttctaactttcatttctttactgtttgcagttaatgttcatgttctgctatgcaatcgtttatatgcacgtttctttaatttttttagattttcctggatgtatagtttaaacaacaaaaagtctatttaaaactgtagcagtagtttacagttctagcaaagaggaaagttgtggggttaaactttgtattttctttcttatagaggcttctaaaaaggtatttttatatgttctttttaacaaatattgtgtacaacctttaaaacatcaatgtttggatcaaaacaagacccagcttattttctgcttgctgtaaattaagcaaacatgctataataaaaacaaaatgaaggaaataatgattaactggaattat

SEQ ID NO: 6086 - DNA, 1213 bp, Homo sapiens
gaggtgcctaaaatgtggcaggtacccactgggtatgacccatcactcatcctggtcactcagaaggcctgaaaacagggcgcctgctgtgttccaaccacatcccctcttccattccagaatcttagtcaacatggacaacaacatcattcagcattacagcaaccacgtcgccttcctgctggacatgggggagctggacggcaaaattcagatcatccttaaggagctgtaaggcctctcgagcatccaaaccctcacgacctgcaaggggccagcagggacgtggccccacgccacacacaacctctccacatgcctcagcgctgttacttgaatgccttccctgagggaagaggcccttgagtcacagacccacagacgtcagggccagggagagacctagggggtcccctggcctggatccccatggtatgcttgaatctgctccctgaacttcctgccagtgcctccccgtaccccaaaacaatgtcaccatggttaccacctacccagaagactgttccctcctcccaagacccttgtctgcagtggtgctcctgcaggctgcccgttaagatggtggcggcacacgctccctcccgcagcaccacgccagctggtgcggcccccactctctgtcttccttcaacttcagacaaaggatttctcaacctttggtcagttaacttgaaaactcttgattttcagtgcaaatgacttttaaaagacactatattggagtctctttctcagacttcctcagcgcaggatgtaaatagcactaacgatcgactggaacaaagtgaccgctgtgtaaaactactgccttgccactcactgttgtatacatttcttatttacgattttcatttgttatatatatatataaatatactgtatatatatgcaacattttatatttttcatggatatgtttttatcatttcaaaaaatgtgtatttcacatttcttggactttttttagctgttattcagtgatgcattttgtatactcacgtggtatttagtaataaaaatctatctatgtattacgtcacattacttcacatgctgctctcgttccttttgggagagtctgctggaaagagatggctacattggtcggggcctcgctcctctttctcccttcgctctggctctgtgcggagaacgggttgccctggacttgaaggatgctgggacgtgcagg

SEQ ID NO: 6087 - DNA, 1241 bp, Homo sapiens
ggcgggaggatctcttgaggccagaagtttgaaaccagcctgggcaacatagtgataccccgcctgtacaaaacaattgaaaattagccaggtgtggtggcatgtgcctgtagtcctaactactcaggaggctgagacgggaggattgcttgagcctaagagtagtttgagggtgctgtgagctatgattgcaccactgcactctagcctgggtgacagagcaagaccctgatgccaaaaaaaaagtatatatatatataggtatgtatgtatatcacctactccattacttggagataattttcattcggatttcagtatatctccttgtttttttctagtattataaatttggggtcacattgcacataaagttttgtatcttggttgtttaacttgaccttacttgtggaatatttccccatgtcatcaagtagtgactgaaagcatacttttcgaatgattgcccaataatccgttgagctgctgtgtcaaaatttgctcaacagatcctcattgctggatattcaggctgtctctaatctggagtggctgtaaaccatgaacatcctggagtgtaaatctctgtgctgatctctgatcctttccttagatatagtcatataggtacaacgaataggtcaaagggaatgcaccttttttaacaaggggattttaatgacaaatttaagtgttcctaaatacctatcagtgcagcatctgattactgggatttattgaaaattatttttttaaagatcagagaggccaggtgtggtggttcatgcctgtaacttcaacactttgggaagccaagacgggtggatggcttgacctctggagttcaagaccagcccgggcaaacatgatgaaaccctgtctctaccaaaaatacaaaaaattagccaggtgtggtagggcacctaccacacaaaaaatacaaaaaattagccaggtgtggtaggaccacctgtggtcccagctacttgggaagatcatttgagccagggaggaagagattgcagtgagccaagattgcaccactgcactccagcctgggtgagagagtgagaccccacctcaaaaaaaaagaaagaaaaaaagatcagtgactgctaataccgtagagctaaaggagactttagagatcatctcatcaaacctctcatttgatggactggaacagtgaggctgggaggtgagaagcgacattcttaagatcctatagcaagttgagagga

SEQ ID NO: 6088 - DNA, 2100 bp, Homo sapiens
cctgccagtcatgcaagaagagcacggctccagaagtgcctctggggtcccctaccgagtcctagagcacaccaagaaggaatgagactcgcctccctctatttataactgtcccctccaggctgacagtggttcaaccctgaatcctaaaacttgcctttcaagtctcattttgtttctaactgagaactctatggatgatgatctcaaaaagcctttgtctctgggaaaggatgcgttatcttggtcttggaaatttcaaatgatgagggttgggggatggaagcattattccaggtggacgggatagaatccagcctctgcctggattagcccagggggatttggaaagcctttctaccatccttgaggatggtaactgagcttcctctgacagtgaccaaaggatgctgtatccttcagagctaaggcaagacagagagtctgctgttaattctcaaatccagcgaaaggctggacatctctaaatctcgtcttcctccacctcatgtgcatgcctgatctcaccctgacactcctgatgccgcatctgtgatagcactcgtgttgccttcacatggcaggctgggccaaccctgggtggaaggttctgacatttgtgttttcagaaatgtacatctgccttccagtcatctgtgcccttctagggaagatgtgcttgatatgttcaaattggatctactctgaaaacgaaacttggttttggtcctgtgaggactacttgtttgtccacctcctccaccaaaggaattaggaagttaagagaaggggaagaatatggaggataggagagggtgatgatgctttagcccattaaggaagaaaagttccccttactcttacaaaaggtgattgcaccacttaaaaaaggataggtagaaaatctggccattttatgtgttatttttttcctgcataccagtgccccctggaaagatggggatgctcatttcagagacagcctcttcacctgtcctccgtctctccattacagagccacaagccaagcttgagttactggttaatttccttgaagtcaatagagactctctgggtcctcatccccatgcatatatgtctgggagaagcaagcattctccaaaacagggctgttgctttcttcctggccgcatatgtgactgtcttcccctagactgatggtatacttttgagaggggcggataaaggtttgcaaactttaatgggcataaggatcccctagaagcatatgtaaaatgcagattcctgcaccccaactgcagacactgttaagtgggactggagtggggcccacgggtctgcattcttaactggtaccaccagtgattctgatgcgatgcttcaatcccgagatttcacatctggaaagcctaagaatttacaaagatgttctgctaaaacccccagggccccatgcagtcttgctagaaaatttcctccctagggttcctttggaaggttaaatactccccataggatctgtggcatttctccatccaatgaatactacttagagctacactcaccacttccctagacagcctttaataggcatgataacagtgttaatagaccagtgtgatagatcacttatctttatggattgtgcttaatactgatttagtatcttgactccaaaaactgacatctgttgtctgtgataaccacttctgtattgcgtcttaaccacttctgtattgtgtggtcttaactgcctaaggcggcaatgggcagtgggcccctttcccttaggatgggtatcaattcaacaatatttataaggcatttactgtgtgctaagcatttggaagacccaggctacaaaataagacatagttcctgccctccaggccagcagagggaggcacaaatacccaggaatctctgatgggtgtgaagtgcggtcgtgggccacagaaaatgaccgtcatggagaccctgctaaaggtcggaccctgagcccaaaggggtattcagaagtggagatgattttggccccactcatagatgggtggcaaatctaagatttgtataaagcatataaaatagggtgatcacccccgaggcagaggggccagc

SEQ ID NO: 6089 - DNA, 1169 bp, Homo sapiens
agaaagttaaatggtagtttcctgactggaagccacacgtaggtcacttgagtagtcaggaagcacagtgggtgtggagccatcatctgtcttgggctggttcctcccaatctttgtccagtggtataaatggactgtctgctgatggccatacgcagcactggctgttaagatggggaaggggtacatcaggattccactcatagccctggttcgttattgttactcatggctctgacgtccccaagccctcttgaatgttgcaagcaatgttaaatatcacacctcggtctccttttgagcagcccaggtacctaaagcaaggtcaccaaacttgggtttaaacttcagttgccatcacagcagggttcaggttatgcagtttttgcagtgtggagttgaacgctgggtaaagaagggagagctgactctccattgcttttctagtggaaaccagccagtttgacggcacggtgcggatacaggactccatcaggctagtgttggggaaccagcccggcagccttccatgtgaattccaaagctgtttcaacactggctgataggcagacaaaaggttacttgtgtgtttctctgagaagcggtgtaaatgaagtcaccttagaatatattctgtgcggatgcttatattttgttaacttcacgacttatggcatgtcttatttaaaaaaaaaaaagtactaggtgcaaataacattatgaagtggtatttaattaaaaatccatgcagtgacagctgagttcgtgtcttatgtttggctaatacttcctagaattatctagaacagtactgtctagtagaactttctgcgatgatggaagtgttctatgtctatgctgcccaacatggtagccactctccacaggtggctgttgaacactttaaatgtggctagtgcaaccaaggaactgaatgtttaatttcatctaattacatttccatatagttcgtatattaacagtacagatctagagatgcccattattgcagctgaggctcacttgagcttcccctgcaaccttcaccgtggttaaaagcacagactcttggccaggcacggtggctcatgcctgtaatcccaacactttgggaggctgaggcaggcagaccacctgaggtcaggagtttgagaccatcctgaccaaca

SEQ ID NO: 6090 - DNA, 1193 bp, Homo sapiens
acaaggcagatttcatgtctgctgccaggctcgaccgctttacagacaatcctctctcgtctggtaaacgcgtaaaacctacacaatcacaactttcacaacgagagggaagccgcaggcctctcgtcggcgcacgggccgcctcgcccgcgtcactctgaggtaacagcctttctcttcaatcgcttcatggaactccaggacgccaagcctcttccactacgggtcgaaggatgggtcacgtcacattgcgcgaacaaggatggtcacgcgccacaaaaggacttgcagggcggggcgactcgacggccttcccttttgctcccattggctgcggtcgtcaggttcgcctcctccactacctaccggggagtttagggcctgacagaagcccgcccccgctggcgctcgtgcgcacgcgtggcgggctctcggcgcactgagcaggcgcggcctcgtgtcggccggagggggcgggcgcaacgacgcgcgctgcgtcccggcgctcggctttccctccgccggtcccgccctccgtcgcggcggcgcggtgtaccctgggatagggagcgatctccgagcgaggcggcaagatggacgcgggatttttccgcgtaagtagaagcgccgggcgccggggtgaggccagggacttctcggtaaggcctggtaggagaccttagcttggcacagggtggccagcgaggggagcttcggagatcttaaggattcctcctagagccggcgcaccccccccccccccgtgcgctgcggcggagaccggtgcgcccctgcgcagtctcctcctccggaatggtcccccctacgcggcggcgacggtggccggaaaatggcggcgggaatgggccgggatggtacctcgctgcccgcctgcctggcggggcctgcaggccgagcgccgtgcgtgccgccgggtcctggggcctagcggagccggaggaggaagtcccgagtgggaggccaaaggaaagccctaaggtcactggtggcggcagggcagggagaatatggtttgggggtacatcttgggagagcaccttaggggagggagaacaggaagaagcattcagcggctttttttgaaaaagcgccctccccgccccccaacgtcctccctccaggtcctaagccttcgtggaggcgccaggtcagggttcgcgggagctcccgcc

SEQ ID NO: 6091 - DNA, 1037 bp, Homo sapiens
ctcattccaagttcctaaaagttgtagaagactaacagcacagtcctgggatgttcttttttcctttcaccctgtttgtatgcattgccacagtagttttgcaagcatgcaactggctttcaaaaaagaatgaaatttcaaatacttcaatgtgttctcatttaaacagaaaagccctacgtatctattagcataggaaaaggtgtgaaaggatacaaatcaaatctaacattggatatgaggaggtgttggctttatgctgtatactgttgttttaggtttgacttatgatgaacatatacttgataatttaaaaatccagtcaagttttccaagtatcagctacattggggaaggagtatgcatttctcatctatgaaaactagtttggtattgtgtttacttggttaccctattttggctataaaggtcgtaggtgataaaaagtaaggatttaactttgaacccttagttaagatgtggttctcttcctgcagggaacaagtgcagaacaggataatcggttcagcaacaaacagaagaaactactgaagcagctgaaatttgcagaatgcctagaaaaaaaggtattcttctggatgagactgttgtgcatctttatagcacacttacttgactcaagttctggggttgttttggagatgcattgtaacttgaatgctaagaaaaacataattgaacattaaccaccttttagccaccacacgtggcacagccatataagaattagcagattgtggctgggcgaggtggctcacgcctgtaatcccagcactttgggaggccgaggcgggcaaatcacaatgtcaggagattgagaccatcctggctaacacggtgaaaccctgtctctactaaaaatacaaaaaattagccgggcgtggtggcgggtgcctgtaatcccagctaattgggaggctgaggcaggagaatggcacgaacctgggaggcggagcttgcagtgagctgagcaccactgcactccagcctgggcaagagtgcaagactctgtctca

SEQ ID NO: 6092 - DNA, 2851 bp, Homo sapiens
tcaggtggacatgagcaaagtaaatttggaggttataaagccttggataacaaaaagagtaacggaaatccttgggtttgaagatgatgttgtgattgagtttatattcaaccagctggaagtgaaggtactaatatacaaatggctcttgtttctgaatatgtgatataatttgtgaatctttggaaactgaattttttctatggagtgcaaatatagaagggttattttacaatgtttgttgtgaaaagaattcactttgtaaacaactattaaggctggaagtttagtgaaggtgcatagttttgaaagctacacaggtgaaaaatcaaacttattgtttgtaattttgctgttacatgttaagttactttgacagcaattttctaatgataatgtgatttatgatttaaaaggcctgaaccaaaatggaagttattccttgcgtctgaagtatagcaccatcaccttattaggtcacagcagagtgagtgtcccaatgtcgctctgacccaactcccttgatgatgcagtgtgtgtttggaggtgagttgtgtaaagtggccaaacatcaacaacaacaacaaaaaacacaaacaggaaagagcaattgggtaaagctgtacactgctcttttaaaatactattatgagatggacatttatgtgaagcatgaggggcaattctgatttgattggatattgtttttaaaggaactaaggtctttgtagctgcatgtcagctagtcatcagttacattttagagacaggatttttgtttatacttaaacttcagacaaattggcagcatataattgttcctttatacatgagataatatgatgatataactgatgtttaagaacattcttattgtaagacagtttctgttttgccacagcaacccaaaggacagttaagatatgtaccatatgacctttttgcatatataccaatgtgaatttacttttacattaatcatttcccccaaagagttcaccctatgttttgacagaacagttggcatttcaactgataaggtatttctagttttaaaataatttggtgtttgtattttgttttgaatatttttaaagactaattttaagaatgcactttctataaagtatatgcatcttagaaaaccaggaacaggggagaaagttttttaaatgatgattgaagatagattttattggagaaatgctttactgatgtgtattttagtgcattttaaaaacctaagtatctggtagtattccccttgtagtgagcatgagattaaagtttagaactttttaagacaattctttttttgtggttgtgtactcattattgcttgttcgtcttttgcaatttagataaatgatataacattaaactcaaggtggttgagttgcagtagggagtcggaagcaagccaagggaacatctttctctacaggggacttggcgattccaaacccccaaggttccaagaagaaactgaagacacctggaatctgtacttgctttgtgctattgagctgtgcttgttatacagaccttgttgcttgaccaacggatttagcatttaaaaacccaattatttttgagaaatcttgacctcttagcactttgtggacagttgagaatttgaggcattgttataatagattttccttatataaaactcaggcctttagcttagccctcagaagttacagactgcatgcataacttgttagttttcataactggacaatagatattttatgcaaagctatctgtagtgttagggagcagtttatgtactttttccgtttctcattgggggaaaatttccaggcaagcaaatacttttcttgttagtaaatactagaatttgtggatgtttcatgatggtttttaaagttaataaatgtaaggcccactaacagccacagagtctaaaaatacttacgaaatccacaaaggattaacaggctgctctgatgcttttggtagagtgagagagaatttggtaatctgttagagattatattgctgagaagctactagggaagactatttgtaaaatagtaaggactatatatatgtctaagcccctatggtagacttaaaaaatactaatttaaatgagttttaggttggttgatttgttggttggttggttttgaagtaacctgtttttcttcctgtcgtgtctttttgcagaatccagactccaaaatgatgcaaatcaacctgactggatttttgaatggaaaaaatgctcgagaatttatgggagaactgtggcccctgctgctaagtgcacaagaaaacatcgcgggaatcccttctgctttcctagaactgaagaaagaagaaataaaacaaagacaggtaataaccttttcttttctgtaatgtcgatttgagagtattggccaggctgccgagacaccttaggtagtatatgactcagctaggatcttcatgtagttttgctttgctgtactgtatttaaacattcagttttggttcactgctcctccctccaaccaaacattgagtttagaatgtcattttcccagtctagtgatttgctagatttttacaaattcttaatatgtgagtgcatgtagcttaaaagaaatttgaatttaacactgaaaggtaagcataaggatttttggtttgttgtttttttgagacacagtttcagtctgtcacccaggctagagtgcagtggtgtggtctctgctcactgcagctttcacctcctgagttcaagcgattctcatgcctcagtctcctgagtagctgggattacaggcgcacaccaccacatccaactcatttttgtatttttagtacagacgggatt

SEQ ID NO: 6093 - DNA, 1606 bp, Homo sapiens
aaccgtgtaaattctgttttttttaggagactgaaagtgaagctgaagataaccttgatgatttagaaaagcacctgcgtgaaaaggccctgagatcaatgaggaaggcccaagtgtccccacagtcttagggggaaatgtttgttatgatgtaaattttatttggtttgtacgcagttcaatttcaaaattgctaaaatgtgtttgagctttagactataacatttgttgtaataattgctaggttgaagttcaacatgtaaaaaaagggggcatggatttacattgcaaaaggtgtccacagtgtattagtgacattctttcattgacagctgacataattcattgagtgaaatattttaagccaaaaaaaaattccctttttaaaaaagggggtttaaatactgttggcatttttatggttcctttaaatgccctagctattcccagaggggtttttttgtttgtttttttggttttgattttctttttgtttttctttcttcttcttatttttttcatttgagtcttagctcccatttaagttatgcttctgaccttgtatggtctgtaagcttgcccagaaataagaccactgttttgaactaccacaaaagtataaatgaatattttaatgccacaatctttcctgttgcctgtggagtctctgctgaaatgaatcaggattcgagctctaggatgagacagaaaatgaaagcatgttgtttgccaggacactgtgggtttatattgatgtgtaacaagttgatttggaacactggactctcattctgttattctggttttgttttttttgttttgttttttttcttttgtaaaggcaatgagctagtcccagaaaggatccttcagttacatacaatttgtttaatgaaatgtcatggctctgttcatatttttgtcttgttcttccaattggtatatacaactttcagagcctcttgtatttggaaggctggaagggcccagactttggaatagtgtcttggtttcactgtttttgttttgattttttttttgttttgattttttttaaactaaagctatataaagcttgtggattaaacagaataaatttctaaatttaaaaattttgccactcttacttagtagtgcttatgtaaaccttttggtgtgttgggagttgggcaggggaaagaaaaggtgatgaaattaaggttttaccatctttatttcaataattactgtggtgagtgctataaagggaatcagcatgtgattggaacatttagaatactggtgggagaagtccaccaggcaaagagaacaggattgcagtcagacaaacagtgtctgtgtcttccctgaggcagaaggagcctgctggcatgttaggaagtgaacaaaggctaaggaatgactggaacaccctctgtcaggggcggggtgggggggggggggttgtgtgtgtgtatgtgcgtgtgtgtgtgcgtgcgcacgtaatatttggctatctacaaccaagtctgttttgcatttaaaactaagtggaacgaaaatttggggaaacttggagttgttaacatagtgtgaggtaaaacagcaacattcgtatgaaagaagt

SEQ ID NO: 6094 - DNA, 1181 bp, Homo sapiens
ttttgcacgaacatgcagttattgaagattaggatcaaggatagacaaggtatagtagttatcttaaaatatacactcctaagcagtattattttaaaatcctttaccctggctacctcccctacccgggttcccctctctttaatttggagacactccaccacaaacttttcactttagaggtagcttgccatctctcaggagccctcaccattgtgtccattcactgtgtatagatggcagaacttttgaggtgcaatgtttaattgttaaaaatagtagccacgactttatcaggcagccccaaactggtgcataatgcatggtacaagaaatatttatgtattttttggaattttgtaatatttagtaagagtatatgaaaggattgctactgtatcagaaatattgtttcaatttagtctatcctggatatgtactaacgaatattaccaccagagaagagagctttctacaaaagtcactacagattttgctatattgctttgtagatagatttttacttttgcctaaaagcatttatccttcataccaattgtaacatctgacaccatgtagaagctaaaagtttagagggagtgagggttttctcaagaccttcctcaagcattttatctttagaagagaaactgatgggcacctgatactctgtctaaatacgtttgttatatgtgttttgccctgtgccattcatttggaactttattgcattctttattttaaaaagcttgtttttacgtaatcatagagcttgctatttgtacatctgttgagcaacactacataactgatttttagttgacttagctatagcagtacaatgattagtaatgtaaaaattaacacagaaattaacctaaggaatgaagggtgggtttgtcaaaatatcaagtaaatttttgtttctaaagtacatttaatgtagatgacctaaagaatgcgttatccatcctatataaaagaaagataaaacacaggtcaccaattttctcatttcaccccatttaccttgtatagaggattgttcattcctttgggactaagttatagttatggtgagtgtgtatttactgtagttttgcctgatctcactcattgcacttcctggagttaaattttccaacagccatgttgaggaatagcactctgcatgtttttgt

SEQ ID NO: 6095 - DNA, 1704 bp, Homo sapiens
tatcattaattagcttagtatgaaagataagaaaatctccatgttgtatccatttggctcaggaagattctttgccttacctttcttagaactctttattgcttatcaaaagtttgagtacccgcttggtttttttttggtaattaaatattgtatgatttatctggttcaaggaagatgcactattcagttatctattgagaaattattttgcagtggttttagtgggtgaaaatgtcccatctgcaccagtacacaggcaggcattatcattcttcacctactttttaaatagtggcaacttgggattcattctggtgattctgaaccttgcctcatagcttaaagtataaaaaagattcaagagcagtgaggtttgttctttccagtgaatggtggactgagtggtgcgaggtggagggctaacaagaggaaagaactacattcttcagaatacagtgatgaaaattcattttgaaactcaaatattttcattttggatattctcctgtttttattaaaccagtgattacacctggccatccctctaaatgttctaggaaggcatgtctattgtgattttgatgaagacagaattatttttctctgtagaaacacagataccactttatcagggaagttagtcaaatgaaatggaaattggtaaatggacaaaagctagctagtaaaaaggacgacccagcaacatgctttaaccccattgtatgtttgtggaaagagcatagtttaacatcttgagaaatttgggacataaagttttcatggtagacagttcatgcagtatatgaattgccataatggaaataatctgattttatttttacaactaacatccattccccttcatttaaacaccttttgtgttttacttcagtgaggagattggagtctgaatggatctgttttccaagagattctgagaaatttttgtattcagcagttggaaagctctctattctagttgataaaacttcccttttttgatgtagatgcagatattctatacagttctgttgtcttttactaggactgtaaacttttgtgataaaattcaaataagattttatttcttggtaattttggctttcacaatttatctttaaatccttgagcaatctgtatacaattaagagatttctgacatttattcttacactaaatggatcaactctaggatttaggcatgttaacttctgttgtgttttgaatctctccagagttgcatgtagatagcatttatttctgtgcccttaaacccatttagaaaataactacaaagtaaaaatgtagaggaaatagaaatgtattttttcatgaacattttgatacaaatttcatcatttaatgattcaccaatttcttgcattaatttgaatttaagcatttaattcaaagagaggggagcatccattattgatacatgtgggcttttaaaaactccatcctttataaatagtcaaggtttgggccacacaaagtatatttttatcatggaaaaatttcaactcctcaagccgtaatgttgaacagaattggagtattttctttataatttcttgaacaggcaaatgaaagcttattatagaatgcatgtattttcttttatctttggaacatcagcaccagtatattgctggcagctattgtattaaaaaataaagtatattttcactatcataaagg

SEQ ID NO: 6096 - DNA, 1274 bp, Homo sapiens
cctgtagtcccaactacttgggaggctgaagtgggaggactgtttgaggccaggaggttgaggcagcagtgagccataatcatgccactgcactccagcctgggcaacagagagagggcctgacttttaaaaaataatagtaaaaaataaaataaaaaaaaacctgggttaaaatcctgattccccttgtatgaccttgggcaagtcaccctgcctctatcctcagtttcctcatttgcaaaaccagagctacaccgtgcaccaccaaggctagctagagattcaacaggaggacgcagataaggaacggattgccccaggcgcgcagtgaacactggcctcctctctctgcttatttttactcagcttaaatttatctgtacatccccaaccaccacctgtgtcactaactcgctgtggtgacctgacatcagacctttctctctctggtcttcatagcatttggaagttgaggagacttcaagtttcaagtcttgagcccacaccctcatgcaatgacaaactaagacttccaaggtcagcgccgaagcagggctttggtctcgaggtgatccagccagagactcatccctgggtcctggctctccccatcgccccactaggagagcttgagcaagtcccgttccctctctgggcctcagttgcccatcagaataatgagggttggggtcaggtattttctgaggactcttcttattctgttatttgtcaagtaagggattctgagttggatcggcagggctgcagctctggccacctgggtgacttatctaagaagtcagctgatggctcccctcgtcccaggctgggtcacacctccctgcctgtgaccgtgtgactctctcctcctccactggtgagtcccttcgttcacaccacaggtattgatctcacgccactgtcacctctgataggaagtgttttctgacctctagccgccaggtaaaacaaacctctctcttcttcatgcctcccaggccccaagcacactctcagtgtcaaacacggagcactctattgtctttgcgtgtttgtttgtgtgtcctgggagcttcttgaggactgtgtctgggcctgatccaggcctgtatccagcattgggcctggggcacagttggcagagtaagaatctattgaggaagaaaggaggaaaggagggaaggagggaaggatagaaggaaggaaggaaggaaggaaggaaggaaggaaggaaggaaggaaggaaggaaggaagtcaggcaggctaagctcca

SEQ ID NO: 6097 - DNA, 1221 bp, Homo sapiens
tggctcacgcctgtaatcccagcactttgggaggccgaggtaggcggatcacgaggtcaggagatcgagaccatcttggctaccatggtgaaaccccatctctactaaaaatacaaaaaattagccgggtatggtggcgggtgcctgtagtcccagctactcaggaggcagaggcaggagaatggcatgaacccgggaggcagagcttgcagtgagccgagatcacgccactgcactccagcctgggcgacagagcaagactctgtctcaaaaaaaaaaaaaaaaatcagacatataatggttacatagtaaacactggtaactttttaaaagtcacatgtgtattcagtacttgaaagttaaggttgttgggaatatggtggttaatagcacagttgaacataatggaagaattcactaccttagaatgatcagtttctgttttgatacatttcgtaccaaaatttcttctacaactcatcaattattcttcgttgtttgtttcacaccattctcgaaatctcacatactcttttctcaaattcagggagtcatgtgatatttcttgttttattcacagagggctggtttttaagtttggccgcactgaagacttatggcagtgaacacatctgatttcccacagcacaacagccctgcatgggtttgtttgtttttttactgctcactcccaaccttttgtaatgccattttctaaacttatttctgagtgtagtctcagcttaaagttgtgtaatactaaaatcacgagaacacctaaacaacaaccaaaaatctattgtggtatgcacttgattaacttataaaatgttagaggaaactttcacatgaataatttttgtcaaattttatcatggtataatttgtaaaaataaaaagaaattacaaaagaaattatggatttgtcaatgtaagtatttgtcatatctgaggtccaaaaccacaatgaaagtgctctgaagatttaatgtgtttattcaaatgtggtctcttctgtgtcaaatgttaaatgaaatataaacattttttagtttttaaaatattccgtggtcaaaattcttcctcactataattggtatttacttttaccaaaaattctgtgaacatgtaatgtaactggcttttgagggtctcccaaggggtgagtggacgtgttggaagagagaagcaccatggtccagccaccaggctccctgtgtc

SEQ ID NO: 6098 - DNA, 1197 bp, Homo sapiens
taaactatgaggatttgcttcttgattagcgtataatgagtgtgcaaactaatgtgaatttcttaagtgtagataatagtttgttgaattaatctgtgttgttaaacaactaaatattccggtgggggctttttgtttgttggtttgtttttggtattgtagcagccaaaggattacctgatatggattcttcgatccttatacaccacaatggaggtatcccagccaacaaaaaactctccacaactttgccagagatagaataccgagaaaaagggaaagaaaaggacaaggatgccaaaaaacacaaccttggaataaataacaacaatattctacaacctgtagactctaaaatacaagagattgagtatatggaaaaccatatcaatagtaaaagattaaataatgatcttgtgggaagtacagaaaatctcttgaaagaggactcatgcactgcttcctcaaaaaattacaaaaatgccagtggagttgtgaactcttcacctcgaagtcatagcgccacaaatgggagcattccttcctcatctagtaaaaatgagaagaagcagaaatgcactagcaagagcccaagtacacacaaggacttaatggaaaactgtattcctaataaccagctaagcaaaccagacgcactggtcaggtaagtgcacatgctgcatccttactaacactttccagtaaacttgacatactcttgacatactcccatatgggcctgtagggattgtttgtaatcagatattgtgactagtgacgtgtggtgttttacatgagtttgttggccaccttgtgttattgtgttgaagcattgatttcagctctttgcagtgttctgaataatgagtgacactgattacttcccacatgtgacaaattgacctgtaacttgattcttctagtcgtgttgtaaggcacttctttggtccttgtccttttctgtttgcatgtccagagttctcttggcgtaaacacaaaaagaagagtttgtgcttgttcacgcaaatctctgtcaaacagatatacattgcaggagaggggtgagaaagttgtccttactactttgtgcttgttttgtttttctgtttgtttttctgcacttagaatatgaattatcctagataactctgggaaagttagatttgaaaagcaatctctttcacaaaaatccatgga

SEQ ID NO: 6099 - DNA, 1935 bp, Homo sapiens
tggcagtcaagataaaaaaacagtttctattgtattttgtggaactgtatctgttgtcatttttaaaaaggggggaaaagataacatccaagtctgattagaactgcccatcagtttttcttgtaaatttttagaagacctcacagaactttacagtttatttttctcggccaacacattaaaaccattcttggatttcaagtagccaactttgccttttatgtattcttacatagtttcctcttgaagaaaaaaaaagcagagtttttgtttttcaaccctttatgtttgttttgttttattcttaaataagcaagcaaaacctgcacattggattcacgtgagatgataatgaaaacttttagtttaagagtgaagggttaagtaacctaacagagctttgatgttatagctgcattaaagaaggtgattgtcaatattacagaaaacaaaaatggattgcccctccaaggaccaaacagattcaaggagcatcatttaagctaagaagagacctaagtgatgaaactagctgtaagaatgtaacaggggttgtgtttgaaatatttatattcccatcggtgtgtttagtcctagaaaattgctagcagcagtcttcttcacagtgccttgggaaaagacatttcaagaggaaacttgataattttaaactcttttccccctttaccgtcatctatcctctatctgtatcaagctcactgcggatcctgctgtaaaactggtgggtagctgggctgtccgttaccaccacagctacatcttctgtttctttgaatagaaagcaccacagtgttttgcacttgcctccagtaaagtgccctgggaagggagctgggcagtgtttgtggacgagagactgtaacgatggctaataaaagctgcgggtctaggtttttttttttttgttttgttttttcatttcatttaactgtgctttctccacttttcatcattttgtgtttgatgatttaaaagaagcttgactattcctcagctcttgtgccaaggagggttttttttttttaagactcttaaactcaaaactctgcacaaagatttcagtttcaaatgtgtattatacatgggtagaaaagtgtttgcacaggcaacttttggaagtgtttaagaatcagggtgggggtggcgggagggaccgggtgggggcaatgcaaaattgtatttggaaactaggaaaaattaagaaaccaaataaattggttttgcttccttgccatggattctggaaggacatagttcttctaaaatttcctgttaattggcatgtacgtctcatttaaagcaaattaagtaggacaagcaagtcagtaaaatagaagtattaaaaagaatcatcctttaaatcacagatcttattttgagattaaaaaaaatacttctagctttagccaggtgtgcatgttgctgccattttgcatttttgaatcatcttgtgtaattgtcaccatgaaagtgttactcagaattgtcatagattttctcttctttgtgcaaaaacatggaaaattgtcactgactttgttttgaggtttcccccattttgctgccttttgggacacttcgttaaatactggtcttggctgcattcttttttttttttcctgtggggttcaaaagaataaacattttcttacagataaaactagttttctgcctttttaactttcaggagagcacagcaaggtagattgttctgagtggggcttagccggttgctatcttgttctcatctcggcctgcatcaggtgggggtccccccacacagccgatccctgggtagggggcagacccaggatttgggggagacccatcaggatctcaagttggtttggtttctgtgcataagacatgtccattctcatttgttttctcccttctctggcatctgattagagc

SEQ ID NO: 6100 - DNA, 1088 bp, Homo sapiens
tcccttctctctttctaaggacccaaatttccctgggggcatcctgcttcctgaaagctgttggatttcagtgatttttccccccaccccccagcacaggagagcacccacagccgcagaaggggaatgtgtcctcctgctctgcttcctcagggcccagcaggcgggggtttgagccctggaccccaggctcttagagactaaggggcagctcctgaccaaagacgatacagcttggcactttaaagcattaacagcaggtgtgaccctgagggctcctccatggtgctgcattgagtccagctttccttctgcccttcctccaggagaaggggcccaaggtccccgtggatggtctccacctgtgcttggaaccagtgtaactggctgctccctgctcccagggactgacacggggatcatctctgtgaccgccctccgtcgggcccctgcctgccttctcccctccacgcaaggctgtgctcttcctctggtttctgtgtgtccgtttgagtgtctgcgccccgcctccccatacttcctgggatgatgtgtgaaacctgacacctagatttatttggaaatattctatgaccactttacagatgaggaaacaggcctcaagcgtggaggggtagagtgaagagtagaacccaggtctgatgccaaagctgctttcttctctgcctcctcctcacgcaactcacacctccttttcttctagctttgttgtcctcccaggaaccaaaaaaccccagctattttctgaccaaaatgtgtttcataacaaaccatctggtgcctttccacacagaactggcaggagcctcgtgtcctgctagctgtctctcttgttgatttccgtgaaaatgcaagtgtttgaagtctgctcattccgagggtgaaacaaaatccaaccctgtcagaatcatgctgttctctttgctgacactgtgaccctgggtcgggacagaccagcagcaatctgtctttagaatcgctttccttcctccccttttgcccccgtggggctcccggcatcctgaaagccagcaaagcctccagcatcttttccatcctgaggtgcc

SEQ ID NO: 6101 - DNA, 1249 bp, Homo sapiens
ctctccgtgcagatcaaggcaaaccccaaccgacctggtgtgccctgctctgcctcgccagcagccccagctaccacggaagacactggaagctgctggccagtgggtgtctccacaggcagaggctgacttcctagctagacaccagagcagatcccacctcttccccagtggctgccctttggggccacttctctggacatgcctagtttagaactccacaggggtatgtctcattgcattgagaccctgctttgtccccagtggcactgctcagcctgccagtggggcccacagtgagcattggtgcccctcagagaaggaagccttcctctgggaggtgaatgccagcctcggaagggcaggaaggagggtgcacatcttgaacaccagcagcatccacacgtaccagctagtttaagctgctgcacggcccctgtgcttgcacgtattgttagcccattttagagatgatgataccaaggcctgtggcggttacatgatcagccagcctcacacagctattaggaggcaggcctgggactcagagccagtgtgttccccactgtgctgggtggccctgcctctgcaggtcacttgggacattggcaaatcaggatgaccttgcttgcttaggaacttctgaacccagcccagagtaaccttagccaagtgtccagcacagaggtactggatcagatggtgcgtttgtggccaggacagatgtgggctgtgtcatgaatccttgttgccagacagcaattctgactgcacctgctgagccccagcacggcctgtctcagggtgactgaggcacagctgctcttgaccccctcgcagtccaggggttatagttcatggtgccctggaaagtccccgggcatgagctgggcttgcagtaggccagcgggacattggaagtcagagctgaggtatggcagctggggaagccaggtcaggctcttagaagaggggcatattcctgctgggcatcaaaggaagggtagaatggttggcgactgcatgtgctagcctgggagctccctgaggacatgcctgtctgatttgccccatggcctcagtgcccagcctagcacctggcacagagtggccatcagtgagtcagttcatcaggaggggagaacagcctggctcccatgagagctgtgagaaagggcagccctggctcagcaggcagcgctggagtccctgcagcctgggagtccactttgccggctgtcagaccctt

SEQ ID NO: 6102 - DNA, 1440 bp, Homo sapiens
cgtgtgagccaccatgcccagcctcagtcattttaatatattcacaaattgtgaataatcaccacaatcaattgtagaaaaatttcattactctgaaaagaccccatgcccatgaacagtcactccccatttctcccttcccctagtccctggcgaccactaatctgctttctgctcggatggatttgcttatgctggacatttcctataaatggaatcatactccaggtagcatttgtgcatctggcatctttcactaatcgtagtatctcaagtttcatccatgctgtagcctgcaacagtgcttcattcctttttccatctgaataatattccattgcatggtataccacattctgttgatccattcaatcaatggacatttgggctgtttccactttttggttattacagatagtgccactgtgaacatctgtatccaagtttttgtgtggctgtatgttgttatctttctggggtatgtgtcaggggttcccaagacaccacccctaggttcagtgatgcactaggaagactcataggactcagcccatagttcttgtcatggcgatgatttattacagtgaaaggtttcagagcagatgagcacggtggctcatgcctgtaatcccagcactttgggaagcgaggcgtgcagatcacctgaggtcaggagtttgagaccagcctgaccaacatggagaaaccccttctctactaaaaataaaaaaaaaatctactaaaaaagaaaaaaagcatacctgtaatcccagctactcaagaggctgaggcaggagaatcgcttgaacccggcaggtggaggttgcggtgaactgagatcgcaccattgcactccagcctgggcaacaagagcaatactccgtctcaaaaaaaaaaaaaagaaaagaaaagaaaaagtaaaaaagaaaggttacagagcaaaattagcaaaggaaacagtggatggggacaacccggaggaaaccaggtgcaggcttccaagagttctctcccagtgaagatgtgtaaggtgttatcgaccagggaagctctttagagactcggtgcccaaggtaggcacccccttcctaacaagtaccagcattccacactccagaaggaaagtagctgtttagcataagccacattgtacaaatggtccagacacaggacaccacctttatcagttagagactgataggagcactcgcaaaacccaggttcctagacaccagctgaggacccacctcgcaagcaggcctttctgaggacagacgtctaagacctgctgcattaacttttctgcacaggtccgtacctagaattagaattgttaggtcatatggtaactccatatttaactttttttgccaaactgttctccaaagtggccgcaccgttttcattccaaccagccatgtatgagggttctgatttcag

SEQ ID NO: 6103 - DNA, 1156 bp, Homo sapiens
aggcttttctctgcagccacagcctccttccccaggactagcacccccaccctgctgcccacagttttggggttgcaaggctccagaccttgaccataggcctatcacaaaggccctgagacttgttcccaggcccacccttcttccccaggccactgacagactgtgtcttgcttccctgccctgcgtggggcacaggtatctctatcttctgttctctgaagatgacttgctctccctggaagactgggtgttcaacaccgaggcccacccactcccggtgaaccactcagacagctccggcagagcctggggcagacactgaccccatctcctgccgccgccctggggccgccgcagggatgccttgccttttcaggatttgagactgttctcaaagggattgggaacgaaggccccatctcgggcagacccccagcagatgtgtcggacaagcaacttcttttcctctgtgaggagacaagacttggagactcagcgatgtcaggccagggccatggccacactggcccacacattcctttctacagagaatttctatgaagcccactcacttgccattccagggccaaaggaccggaggtttgcatatccgccccttgtatttgatttgcttccttttggtttcttggtttttgtttttgcttgattttgtcttttctctacagtttagttttgtcacaattacacatatagttttcaaaatcatgcactttctaaaatggtgtcatcctgaaaaacaaaacccagtgtttgcacacacacaaaatcttgaccccgttatctatattttaaatgctttttgcccaacactgaccctatgttcaactttgtgtcatttaccttataatttgaggaggggtttccctttgggcctcagtgttacaaattactagtgctattttcattattattgtaatggaaaaatctgtggactagaataaaagagtttattgaataagaaatatgattgggctcattgcacatcagtgactcctagaaaaaccattgcaatgttaccatcagaaataataatcagccagcagttgatttaaggtataatttagtaaacgattccaacttctattacctcccctgaaatcggtcctgatatattcgagaagcatgaggccag

SEQ ID NO: 6104 - DNA, 4208 bp, Homo sapiens
ttgcccaggctggagtgcagtggcttaattatagctcattgcagccttgacttctggagctcaagtgggctcaagcgattctcccacctcagcctccatagcatctgggactatcgacatgggccaccacacccacctaatcaaaaaaaattttttttgtagagatgggctttccctttgttgcccaggctggtctcaaacttcagggctcaagggatcttcccatgttggcctcccacggtgctgggattataggcatgagccatggtacctggccttgggaaatggtatttagataataatatcttgcctgcaaatacatcttcccctagtgtcagtagactgataggaataaaaaggggaaaaaaaacacaactttcctcatcagccctagtttaatacattaaattgatttgggttttagaaaattatagtacagtttattagaacaggagaatcctggttttctgaattataaatataatcaattctagatatccaggtgaaagaactggagaagcgtgcctcaggccaggcttttgagctgattctcagccctcggtcaaaagaatctgttccagaattccccctttcccctccaaagaagaaggatctttccctggaggaaattcagaagaaattagaagctgcagaagaaagacgcaaggtaaacgaagcaattcacagaaagcaggatattaatttatgtaatgggcagatcaattttatttctataacaggaagaaaacagaattgtagctacactgtgattattacatatgccagtgactggaaggaaataccagtcctcatttattgaactcctgttacatgcccgctcctttgtttatatttttctcctttaatacatggtgttgcctcaaataatggaaattagaaacagtttcaggaatgttaagtcgtttttctgcagtcatacaactagtaagtgttggggtcagaattcaagccctggtctatcttaaaccaaagctcatgcttctctcatgcttcctctttgaaaagatttgttgccagatgattctttggcactttggttttgttttttgagagctgtacaataacattttaaattgctagtgtgattgtgttgctcagctggtatcatggtagcttttctcttatctaaacaattctattataaagtaactatctttaaaagctaatcagaagaatcaataaatattaatatgctagttgtagaaaatttgggaaatacagaaatttataaatggaaattaaaagtattcattatcccgcttccgagaagcaaccagtgttaacattttggtgtgtttctttccattcaatgttactcattaacaactgtacataacttttcatttaactccctttctcaacaaccctgataggattgattttaaagctggggcaagtgaggcacaaaaggtaaggtaataaccttccccagaccagcatagtgatttgtagtatacacacacacccgcccgaagagcctcagtgcttacactaaggagtcgtcttctatgcaatagtgtgagttcatggagtaggaggaagcaatacaaccaaaggttggacagtggaaagctttttagacatcaaccctggccctgtagtcattagcctgtgctttacatagtaactggctaaatataatgaaactcccatcatgactaggatttggcagaagagaatcaatagaaccagtgtcagatgctctgtggttatcctgcaagtcagtggttccaatgtgttttgagaacaagctgttctgttgaaggggtcataccaaggtatggtctggtaattaatgcagtttcctgagacaaaagctaataagccttttccttgaaacaaatttttctgtcttaaatagtaatctacagacttagtcttgaatttcctatcattgttttatcagttatggttaaaatttttacaatgagctagttttctttgggtagcttttgaagttaaatagtgaaattctttacaataaaagtgccactcgcaagtacatattcctcaagtcatccagataccattaagcagtaaatcttacaaggatttccttaaggactaattgggtaagatttctgaacagataagcacttttccaaagttaaatacaaatactagaaaaagaatatcattttcacagtattttatgatagggataattcaggtcctaattttggtgttatttaaagggaccttattttctgccccttttcaatccccttagtaaattatttttattgtaattttaacttatgctgaatacattttattttttgaggcagagtctctgtcacccagggtggagtgcagtggcacgatctcagttcactgcaacctccacctcccgggttcaagcaattcttctgcctcagcctcccaagtaacttagactacaggcacccgccaccacgcccggctaatttttgtatttttagtataggtaggatttcaccatgttggccaggctggtcttgaactcctgacctcaaatgatccacccaccttggcctcccaaagtgctgggattacaggcgtgagccaccacacccagcctgaatacattttagagtgcctagcctattaaacttttttttccagtcccatgaagctgaggtcttgaagcagctggctgagaaacgagagcacgagaaagaagtgcttcagaaggcaatagaagagaacaacaacttcagtaaaatggcagaagagaaactgacccacaaaatggaagctaataaagagaaccgagaggcacaaatggctgccaaactggaacgtttgcgagagaaggttggtttcttactttgtaaaagggttgagcttggagtttgatgcaccaatgagttggcttgaactaagtgctttgataaaaggtgtttggtgtctttttgtcatccattttggggcttaacatattaaatgaaaggtatattttaagatggaatattcagtaattcccagcataattgcacagtccttggaagtccagtaggcagcttgttaggttctacaagggacccaggagatttgatgatgatgtctcagaacttaaattgtgtggttcccacaggctgtaatatatgcactgaggttgtgttgggcctctttgaggtgggggctgggggtcgtgacttgacaggcttttttttttttttttttttttgactgatgacaccttacccttcctttacaggataagcacattgaagaagtgcggaagaacaaagaatccaaagaccctgctgacgagactgaagctgactaatttgttctgagaactgactttctccccatccccttcctaaatatccaaagactgtactggccagtgtcattttattttttccctcctgacaaatattttagaagctaatgtaggactgtataggtagatccagatccagactgtaagatgttgttttaggggctaaaggggagaaactgaaagtgttttactctttttctaaagtgttggtctttctaatgtagctatttttcttgttgcatcttttctacttcagtacacttggtgtactgggttaatggctagtactgtattggctctgtgaaaacatatttgtgaaaagagtatgtagtggcttcttttgaactgttagatgctgaatatctgttcacttttcaatcccaattctgtcccaatcttaccagatgctactggacttgaatggttaataaaactgcacagtgctgttggtggcagtgacttcttttgagttaggttaataaatcaagccatagagcccctcctggttgatacttgttccagatggggcctttggggctggtagaaatacccaacgcacaaatgaccgcacgttctctgccccgtttcttgccccagtgtggtttgcattgtctccttccacaatgactgctttgtttggatgcctcagcccaggtcagctgttactttctttcagatgtttatttgcaaacaaccattttttgttctgtgtcccttttaaaaggcagattaaaagcacaagcgtgtttctagagaacagttgagagagaatctcaagattctacttggtggtttgcttgctctacgttacaggtggggcatgtcctcatcctttcctgccataaaagctatgacacgagaatcagaatattaataaaactttatgtactgctgtagcaactcctgtgaaatgact

SEQ ID NO: 6105 - DNA, 1112 bp, Homo sapiens
gcccaggctggagtgcaatggcacaatctcagctcactgcaaccttcgcctccagggtgcaagtgattctcctgcctcagcctcctgagtagctgggattataggagcccgccaccacgcccagctaatttttgtatttttagtagagacggggtttcacttggccaggctggtctcttgacctcgtgatccgccctccttggcctgccaaagtgctgggaatacaggcgtgagccactgcgcctggcttagcttcccattttctgttgtgttcactcttcctagggaagaaagggagaagaaataggtgattaactgccctgagctgctcaggggccgatggtggttctccagaggggagaaacacatgtccccacccatacctatactcaggctgcccttgggataacagctttggggcagccagatattctatagcccatgtctctgctaggatcttgtcgcctgcctgttagctggaatggcccctttaagacaaaggactctggataccccttgatcatcttctcccatggcctaggagccttcaggtaagagcttctttcccccagaccttgccatactccttgcctggtgacagctgctgagtcttagcttattctcaaagggcaaaaaaaagacatttccatctgctagctgtcttatctcccatctgcttcgtcccatagcattgggttcaccttccccagaaggcctttttcaagtccttttcaccttgtggagcctttcagcagcctttatatgctttacttctcatggtccagcatttatataaataaacacttttagctttcctcctatgtgatagcccagaaatgctagaaggagcatgagctttgtgatcagagcatcatttatttatctattttatttttatttttttcagacagggtctcattctgttgcccaggctggagtgcagtggtgtgatcacagctcactgcagcctcaacctcttgggctcaagcagtgctcctgcctcagccaccaagtagctggcacgtaccaccacgcctggctatttttaaattttttttttttttttcagggacgagatctcactgtgttgcccatgctgatcttgaattcct

SEQ ID NO: 6106 - DNA, 1234 bp, Homo sapiens
tcttccagctcctgggccagctctggaagggctgtatttgggcctaatcctcagcaaatgttctaccactcgcaggggcaaaggtggtgagccacgggacgtccaaggggaggctggccccagcgcgcccatactgcctgcctcatgccccattctcagcctggctggcctttgcctttatgaatctgagcccctccatctgcctatagcaataggcacgggggtgaggaccctcacactctcatttgagcctccctgaggcagggagccaggaggcacctgaggcctatctgtgccttagtcacttcagctatgagccaaatgttccctttcctggaggggagaggcttcttactaggtaagagacaggtttcctctttccttatttcctcagctgtgccaacacaaaaaacaactttggcacaggtggtgggcagggggtagagagatttcagcttgggttctgcactaacagcctccaagccccctggcacttctgttgccctgagagtgtcccaggggattcagagtctccagaaagatatggctgggccaactctgttgcctacctggcctgacccagtcggagcctgacatggtggagggaaagggagacaagtggggctgcactcggtccagaggccagctaggagggaaaccgcagcttcctggggcttgtgtgtgaagattcctgacttaggggtggcttttgtttacaagatgcaagaggggaaacctgtccccgactcatcgagacaacatgcccagttatcagggagtcctgtgtcacaaggtctgtctctgccattgtaagcaagtgccttgggcgagctggcctctgccccacagtctcatctgtacaccgacagggttgatgcctccctcacagggttgagaacaagagccagttggccaagtacctgtggttgttgaagattggttacttttaccatcctggggacagggaactctgtggcccgaggctgcctcactgaggagtcaggtgggcttcccagcctccccaggggcagtgctgagtttgtcttgactgttctggcccaaggtgggaggaggtgggtttggtcacttgcctcccactttaaatctctgtctttccatctgtgaaatgacctctttgtgccttcccagcactgtcatcctgatcgcctgtgttctaggtaggtgggtccttcagcccctccaggtctgtgaaaagtctgtggaaagcactggc

SEQ ID NO: 6107 - DNA, 1182 bp, Homo sapiens
gtccacctttcttctccatccaatgggatggatccatgttcattcccacttcacaccttggtcctgctgattagagagctcatcagaggggcctggaaaggctgagcaagtaccagtgacaatggccatttaagaattctcaggccccatgtgccagccttcttgggaactgagctggctttctgggttttctcatgcctggtcttactgcttcttcctcagggctcttgttctcccagaagcctcagggtaatgtgttggttagcacgtaactactaggattggggccctagggattatagccaggactctaatctgcctaccatgccatttaacaagagatcccactctccagctgccttgtgtccctagggtcctggccatgtgtttagtgtgctaaactttctcctttgttctcaggccttccaggtagtccccttcctggacttaagagtgcaaactcttctctgtggttctagccttgggcagaattatatcccagagaccacagagcaactgtcaagctgcttaccccctcacccagggctacagcctgtgcccagccctctaatttgtgcctctcttgtgttgggggtggtgggggttattcctttccctttcctgctctggcctccttgaaagttcagagtacccagtacaagtcagctttaaagtacagcttttagtgtttcctgggttgtttctctggggctttagtgagggacctttgccctctggtttttcttgcctcctggtttagggagcatctcacacttgttagtatctggttgttgggccagccgtgcctcctctagatctggagccaggccaggcaggggccacgtgtgggccagtcagccactacaagatttttgctaagctttgggctgttggcagcatcttggacctcatgcctgggcctgaatgaggctctttcttaagtgtttttacaagtttgtgttttatttatggagtgacttatcccttccattcagagcagccccacccagccagcccttcagcctctgggctcctgctgcttaaaggcagagccgcctggttggtctccaccctgtgcattgggagcccagccaccatgctgacgggtatttttcctcataaagtttataaccagttatttatatgaatctttgttatgtccatttgtttgtattgcgtatt

SEQ ID NO: 6108 - DNA, 1235 bp, Homo sapiens
tatccactaacccctacccaccctctgtccccagatcaagtcccagcagagcgaggtgacccgaatcctggatgggaagcgcatccaataccagctagtggacatctcccaggacaacgccctgagggatgagatgcgagccttggcaggcaaccccaaggccaccccaccccagattgtcaacggggaccagtactgtggggtatgggctgggggacgggggggtggggggagtgttggaagaggactctagccagggtcatatctgccacaaagcacttgggccccctgcattcaggtgaccacccctcgcctccccttctccaggactatgagctcttcgtggaggctgtggaacaaaacacgctgcaggagttcctgaagctggcttgagtcaagcctgtccagagttcccctgctggactccatcaccacactccccccagccttcacctggccatgaaggaccttttgaccaactccctgtcattcctaacctaaccttagagtccctcccccaatgcaggccacttctcctccctcctctctaaatgtagtcccctctcctccatctaaaggcaacattccttacccattagtctcagaaattgtcttaagcaacagccccaaatgctggctgcccccagccaagcattggggccgccatcctgcctggcactggctgatgggcacctctgttggttccatcagccagagctctgccaaaggccccgcagtccctctcccaggaggaccctagaggcaattaaatgatgtcctgttccattggcactgtgtctggttggttgtggcctgggcctcctgggtccctgccctgggcaaggttggtagttgtgactgtgctgagactgctctgtgggaagggtggctgagctgttctcttgtgactgtcacctctgtgtttgttagtgcatgtgtttggatatgtctgacacacaaatacctgtatggaccagtggtttctggagatgtctgggtgggccaccctccagttcacatgcatgtgtccatatcatgcttgtgccttggtgtgtagtgcacatctccatgcctgtcagtgagtgtggccatcccatgcgcctgtgttggagcacaatggctaagaatgagtgtatcatgggaggtgggtacccagctgcagttctgctaatttgggggcatgggtctagtggcaaaatggctttgtgcggtgttgaagtgtccccacgagttgg

SEQ ID NO: 6109 - DNA, 1339 bp, Homo sapiens
aggtctagatcatcatgccaaggaatgcaagctgccaccccagcccaagaagtgccacttctgccagagcatcagccatatggtagcctcatgtccgctgaaggcccagcagggccctagtgcacagggaaagccaacctactttcgagaggaagaagaagaaatccacagccctaccctgctcccggaggcacagaattgagccacaatgggtgggggctattcttttgctatcaggaagttttgaggagcaggcagagtggagaaagtgggaatagggtgcattggggctagttggcactgccatgtatctcaggcttgggttcacaccatcaccctttcttccctctaggtggggggaaagggtgagtcaaaggaactccaaccatgctctgtccaaatgcaagtgagggttctgggggcaaccaggaggggggaatcaccctacaacctgcatactttgagtctccatccccagaatttccagcttttgaaagtggcctggatagggaagttgttttccttttaaagaaggatatataataattcccatgccagagtgaaatgattaagtataagaccagattcatggagccaagccactacattctgtggaaggagatctctcaggagtaagcattgtttttttttcacatcttgtatcctcatacccacttttgggatagggtgctggcagctgtcccaagcaatgggtaatgatgatggcaaaaagggtgtttgggggaacagctgcagacctgctgctctatgctcacccccgccccattctgggccaatgtgattttatttatttgctcccttggatactgcaccttgggtcccactttctccaggatgccaactgcactagctgtgtgcgaatgacgtatcttgtgcattttaactttttttccttaatataaatattctggttttgtatttttgtatattttaatctaaggccctcatttcctgcactgtgttctcaggtacatgagcaatctcagggatagccagcagcagctccaggtctgcgcagcaggaattactttttgttgtttttgccaccgtggagagcaactatttggagtgcacagcctattgaactacctcatttttgccaataagagctggcttttctgccatagtgtcctcttgaaaccccctctgccttgaaaatgttttatgggagactaggttttaactgggtggccccatgacttgattgccttctactggaagattgggaattagtctaaacaggaaatggtggtacacagaggctaggagaggctgggcccggtgaaaaggccagagagcaagccaagattaggtgagg

SEQ ID NO: 6110 - DNA, 1154 bp, Homo sapiens
caaagtgctgggattacaggcatgagccaccatgctgggccaaccatttcttggtgtattcatgccaaacacttaagacactgctgtagcccaggcgcggtggctcacacctgtaatcccagcactttggaaggctgaggcgggcggatcacaaggtcacgagttcaaaactatcctggccaacacagtgaaaccccgtctctactaaaatacaaaaaaattagccgggtgtggtggtgcatgcctttagtcctagctattcaggaggctgaggcaggggaatcgcttgaacccgagaggcagaggttgcagtgagctgagatcgcaccactgcactccagcctggttacagagcaagactctgtctcaaacaaaacaaaacaaaacaaaaacacactactgtattttggatggatcaaacctccttaattttaatttctaatcctaaagtaaagagatgcaattgggggccttccatgtagaaagtggggtcaggaggccaagaaagggaatatgaatgtatatccaagtcactcaggaacttttatgcaggtgctagaaactttatgtcaaagtggccacaagattgtttaataggagacgaacgaatgtaactccatgtttactgctaaaaaccaaagctttgtgtaaaatcttgaatttatggggcgggagggtaggaaagcctgtacctgtctgtttttttcctgatccttttccctcattcctgaactgcaggagactgagcccctttgggctttggtgaccccatcactggggtgtgtttatttgatggttgattttgctgtactgggtacttcctttcccattttctaatcattttttaacacaagctgactcttcccttcccttctcctttccctgggaaaatacaatgaataaataaagacttattggtacgcaaactgtcatccccttgtcagatgtttttgcccttccgataactcccactttcttggattgggactcagaagtttttctgttcagccagtttgttaggaatgaatcttgaaagttcagtcctcttagcacctcattacagtggatttttgtttctagttaaggcctcttgtcctttccttggaagcttccacattcaagaggggattaggggcttggcatgcataagaatg

SEQ ID NO: 6111 - DNA, 1219 bp, Homo sapiens
gagcccttagaccttgtgaagatgattcctggcagggcgtggggggaccttggtgcctgcctcccttcttatgccccttccggtaggaagggctgggcccttggggagtttggcttctgccagcccagactccccagacaacccagctccttctctctcagaagcagctcctgacctcccttgagggctctgtggctccagtccctaagcgtgcagaaggccacctcttcctgtgccttttgaccccagggtcaaggtcaagcccctgaatgagctggtggaaaacttcctccttaacctcttgctgggaaggaagcaggtgatattctccttcccaggtggttgttgggggtatgcagggagggaatggagacctcatttgagcccaggagctgagatgactttctcccagcttgggcctggagcccctgtctcagtcccctcctctgccctctcttacctagggcagccaccaagtgtcctgcctctcaggaccacaggcttagatcagggtgagcacccagggtccccagcccccagggtgtgctgcccctttaaagggatggccgacactggctattggagggtgggcgcggcaggattaggtaaccaacctgaaggagcaatttggagtaaattgctctgggattcctgccatggggattttacaggcactgctaggctgctcagaggttctctcgctgactcaccctctgaggtgaggaacactgccctctgcagcccctgtactgccaccccgctactaggaccggggcgcaaggtcctgggggtggtgctcagaggtggattcctttgcccaggcacgcccctgggaccaggcctccaaaggagaaggtagggctgggagaggctggggagtgactttatgctgatagggagggtggacacccaggagctcgatcctggggcaccacttcctgcttctctttagggaatcctgaggcaggggccagcttcaccagggagccaggtttaactgggaaactcatctcagttttgagttctgtaacatctcaggtctgtgagaggggaagaccagcggacttcctgggattggtggggcagggggacgcaatttcctcaggagcttcgctccagaaacgatgtgtgatcctcagtcagtcctcagcctgtctgggcctctgcttctccagtggcaagtgctaggttctagcctccacttcctgggcctgagagg

SEQ ID NO: 6112 - DNA, 1223 bp, Homo sapiens
aggcctaagctgagtcaaagaacctgctgagaatcagaactgcccaataacttgtattatttaaaaaaataaataaataatatgaagggtgcccacccagacccatagatcgggattttaggcccagggatccagctcaccaggtagccgttcttaccagccccgagaccagaatttgggaatttttatgccagatggaaagcagagctggtgaaggcatgccagggggaggtgcagaggcaaagtctgaggatctgacaaagcagagaaccctgggggagcaggttgctcagactggctgattaacaggtcttgatggggtctggtgggaaaagggaccagagagatgggcagggtgccaaggccccagctgtgggcactgctgtgaggggtggggacaaggagccagccaaggagccagaaacagactggcaaggaggaaacctgaggattgagtgtccccaaagccctgggtgagggggctttgggagctcaggcctggaggaacaagtggaaaagagatcccttagcgggggcttgggagtggctgtgttgagtgtctaggctactggtgacttcctttctcgtctggccagtacgtgaccgcgtccggaccaagatggagagagacatcctggctgatgtaaatcacccattcgtggtgaagctgcactatggtaaagcttctggccctgcctgagctcctaccccacccatccttcgcccttgcctgtggtctgtacactgtcccaccgcctgcctggcaggccaagggagccagggccggagaagcagatcataaggccgcgccgactctaccattgcctttctccctcttcccagccttccagaccgagggcaagctctatctcattctggacttcctgcgtggtggggacctcttcacccggctctcaaaagaggtgagctgacatctactgccagagggccccgggatggagctgagggacgacaagtcctcccatcccagggccctgtacagaatgtgtttggtatggcttgaacctggaaccacccaggcctgcctagcagcccctggcccaggaaataccacgcaccctggaatggaggccatacgctggcaaggtctctgagagtttctcccaaggaaactccagggagctaagggttcctctcacctctgcacctgccttcttccagggctgctctgggcagaggtgtgaagataggggagaagccca

SEQ ID NO: 6113 - DNA, 1560 bp, Homo sapiens
agaccagcctgaccaagatggtgaaaccccatctctactaaaaatacaaaaattagccaggtgtggtggcaagcgcctgtaatcccagccatttgggaggctgagacaggagaatcgcttgaaccctgggggcagaggttgcagtgagccaagattgtgccattgcgttccagcctgggtgacagagtgagactgtatctcaaaaaaaaaaaaacaacaaaaacaaaaccaaaaaaagtgggctgtggaacactgagaggggctggcctacccttggggcatggatcccctccccgctacatctcccaccattgtgacctgacctccccacttctctttcagggagccatggctgccacgtactccgcactcaacagctccaagcccaccccccagctgaagcccatcgagtcatccatcctggcccagcggcgagtgaggaagttgccatccaccaccctgtgaggcaccagggcattcgggccacagggcggtgctagcttgacacagtcagcatgcttcccagagggagcaggccggaaccacagggccagagggagctggaacccgaggggccggggaagctgccagcccagaacacccctaatgagggtgtgagaagtgccttctccttccccaggatggactcttctcggctcaggctctgctggtggaaagcgattcactgtataaacttttttttatgaaaaaaatggcatcaaccaccatggatttttacaagatccatttgcctttctgggagcagaaacagccattgcggccccaggaggggaactgagtcacgctggggctctctgagactctttagagcagctttgggatcccaccctggggacccccacgattggccacctgtagccatctgcacacacctccgagacagtccagtgtcacctctctcagagcatctggctgtttagcagaactcattctatccccaatcagctccttttccgttctgttctgctgggagttctagaaccacttcctgctacaggaggggtctcatgtcctgctggcttccagcttcaggcaccagcatccaccttggctctgccagtggatcccctgcggtcaggctgggcagccccagagagaggatgtggaaagcactttttggctgacttcatctggggttggcaacaggacagagttcacaggaggccagtgggcgggccatgagggacagggtcttttttcatttcttcctcagctggttactcagggttcatctgtccatggcctttctaataaactgttgagttgaagcacgctctcctgcactcttcatccctgaatttaccctctctctgctatcggatgttgaagacattggcagtgacagaaaatgggccagggccagttagcccagctgcttggaaccaggtcatctggggagtgtgtgggaatcccgctggcctggcccacgtgttcctgccaggggattccattatggtattgataacagtattattagccaatggtgaccaagtgccaggcactatgcctgggcctcacatgaatatctcatttaatctt

SEQ ID NO: 6114 - DNA, 1144 bp, Homo sapiens
aaggtctaatatatattccacctggtccttaacagagtttgccatatgtaagttatagtatgatgactagggccgggcgcggtggctcacgcctataatcccagcactttgggaggccaaggagggtggatcacctgaggtcgggagttcaagaccagcctgaccaacatggagaaaacccgtctctactaaaaatacaaaaatttagccgggcgtggtggtgcttgcctgtaatcccagccactcgggaggctgaggcaggagaattgcttgaacccaggagtcagaggttgcgatgagccgagacgtgccattgcactccagcctgggcaacgagtgaaacactgtctcaaaaaaaaaaatttttttttttaataaaaatagtatcatgactaaagaacgtgtgtgatgtatttgctcttggttgtttaaggaaaatgctaagcaagtagtaggattattgaaagtagaatctttctgcctaatattactaatccatgttcttatatatatgttctaggatctatctggttcaatagatgacctccccatggggacagaaggagctctgagtcctggagtgagcacatcagggatttccagcagccaaggagagcagagtaatccagctcagtctcctttctctcctcatacctcccctcacctgcctggcatccgaggcccttccccgtcccctgttggctctcccgccagtgttgctcagtctcgctcaggaccactctcgcctgctgcagtgccaggtaccctcaagtgctgggctttagggagagggaaaggtgactgcccccagtaatattaaggagccctagtcttccactggcagagaaagcatctctggctcatgcctgcatagtttccccttagcatttggagaaggagattggaacctgttggctggatctctttgtgtgtgatactgggaggtacttggcctcttcatgagccatttctagctctgaattaacttcctagttagaattcccaggcttagccatgatatgcttatgttgttctttgtctggagcaggcaaccagatgccacctcggccacccagtggccagtcggacagcatcatgcatccttccatgaaccaatcaagcattgcccaagatcgaggtgaga

SEQ ID NO: 6115 - DNA, 1144 bp, Homo sapiens
gaaccaatttccattccagtttggccgagaccgtgtctctgcaccccctggcaccaatgcccagcaaaacatgccaccacaaatgatgggcggccccatacaggcatcagctgaggttgctcagcaaggcaccatgtggcaggggcgtaatgacatgacctataattatgccaacaggcagagcacgggctctgccccccagggccccgcctatcatggcgtgaaccgaacagatgaaatgctgcacacagatcagagggccaaccacgaaggctcgtggccttcccatggcacacgccagcccccatatggtccctctgcccctgtgccccccatgacaaggccccctccatctaactaccagcccccaccaagcatgcagaatcacattcctcaggtatccagccctgctcccctgccccggccaatggagaaccgcacctctcctagcaagtctccattcctgcactctgggatgaaaatgcagaaggcaggtcccccagtacctgcctcgcacatagcacctgcccctgtgcagccccccatgattcggcgggatatcaccttcccacctggctctgttgaagccacacagcctgtgttgaagcagaggaggcggctcacaatgaaagacattggtaaggagatcttcctcattcggttgcctaatctgcccctttccatcttgtccattgttccctccaccttactattctggatgaggttgaatctggtccagtgttgactaaaatagaaccaaagaactttggaaaaggaagaaataagctaactaaaggttctccttcattgccatgcaatgaagtcctagacagacagcttagaagccatgaggggctggtgtgtttcatctcccagacagaaactgccttccaccttgtgttatcttcagagtagcttcactgatggggcagccctaggggtgcctccagccaacctgggcttggtggatagacgacatggaggtttatttcaggaaccccggaggcatggcgggtaatgatgtccctcaagtctggtctcctggcagagagcacatgggcattagataccatcaacatcctgctgtatgatgacaacagcatcatgaccttcaacctcagtcaggtgagtatcagtgcctggg

SEQ ID NO: 6116 - DNA, 1623 bp, Homo sapiens
cgtgaaggtaggttgggcagaagaaagaactttgtgttgggcatagaagagattaagatgaacaatttgctctgtggagaacctttgggaaaggagcaactctgcctctcccaactgatacagaagacttggggaggtctctcaagtcaataattctgttcttaggccacttttctcccttaatttatttcctgttctttctctttttagctcccagggttgctagagctccttgtagaatatttccgacgatgcctgattgagatctttggcattttaaaggagtatgaggtgggtgacccaggacagagaacgctactggatcctgggaggttcagcaaggtgtctagtccagctcccatggagggtggggaagaagaagaagaacttctaggtcctaaactagaagaggaagaagaagaggaagtagttgaaaatgatgaggagatagccttttcaggcaaggacaagccagcttcagagaatagtgaggagaagctgatcagtaagtttgacaagcttccagtaaagatcgtacagaagaatgatccatttgtggtggactgctcagataagcttgggcgtgtgcaggagtttgacagtggcctgctgcactggcggattggtgggggggacaccactgagcatatccagacccacttcgagagcaagacagagctgctgccttcccggcctcacgcaccctgcccaccagcccctcggaagcatgtgacaacagcagagggtacaccagggacaacagaccaggaggggcccccacctgatggacctccagaaaaacggatcacagccactatggatgacatgttgtctactcggtctagcaccttgaccgaggatggagctaagagttcagaggccatcaaggagagcagcaagtttccatttggcattagcccagcacagagccaccggaacatcaagatcctagaggacgaaccccacagtaaggatgagaccccactgtgtacccttctggactggcaggattctcttgccaagcgctgcgtctgtgtgtccaataccattcgaagcctgtcatttgtgccaggcaatgactttgagatgtccaaacacccagggctgctgctcatcctgggcaagctgatcctgctgcaccacaagcacccagaacggaagcaggcaccactaacttatgaaaaggaggaggaacaggaccaaggggtgagctgcaacaaagtggagtggtggtgggactgcttggagatgctccgggaaaacaccttggttacactcgccaacatctcggggcagttggacctatctccataccccgagagcatttgcctgcctgtcctggacggactcctacactgggcagtttgcccttcagctgaagcccaggaccccttttccaccctgggccccaatgccgtcctttccccgcagagactggtcttggaaaccctcagcaaactcagcatccaggacaacaatgtggacctgattctggccacaccccccttcagccgcctggagaagttgtatagcactatggtgcgcttcctcagtgaccgaaagaacccggtgtgccgggagatggctgtggtactgctggccaacctggctcagggggacagc

SEQ ID NO: 6117 - DNA, 1463 bp, Homo sapiens
cggtatcaccgttgatgaactcattggtttcacaagtcatttgtgatgtactgtttttgattggccagtcatgacagccgtgggacacctcccccccccgtgtgtgtgtgcgtgtgtggagaacttagaaactgactgttgccctttatttatgcaaaaccacctcagaatccagtttaccctgtgctgtccagcttctcccttgggaaaaagtctctcctgtttctctctcctccttccacctcccctccctccatcacctcacgcctttctgttccttgtcctcaccttactcccctcaggaccctaccccaccctctttgaaaagacaaagctctgcctacatagaagactttttttattttaaccaaagttactgttgtttacagtgagtttggggaaaaaaaataaaataaaaatggctttcccagtccttgcatcaacgggatgccacatttcataactgtttttaatggtaaaaaaaaaaaaaaaaaatacaaaaaaaaattctgaaggacaaaaaaggtgactgctgaactgtgtgtggtttattgttgtacattcacaatcttgcaggagccaagaagttcgcagttgtgaacagaccctgttcactggagaggcctgtgcagtagagtgtagaccctttcatgtactgtactgtacacctgatactgtaaacatactgtaataataatgtctcacatggaaacagaaaacgctgggtcagcagcaagctgtagtttttaaaaatgtttttagttaaacgttgaggagaaaaaaaaaaaaggcttttcccccaaagtatcatgtgtgaacctacaacaccctgacctctttctctcctccttgattgtatgaataaccctgagatcacctcttagaactggttttaacctttagctgcagcggctacgctgccacgtgtgtatatatatgacgttgtacattgcacatacccttggatccccacagtttggtcctcctcccagctacccctttatagtatgacgagttaacaagttggtgacctgcacaaagcgagacacagctatttaatctcttgccagatatcgcccctcttggtgcgatgctgtacaggtctctgtaaaaagtccttgctgtctcagcagccaatcaacttatagtttatttttttctgggtttttgttttgttttgttttctttctaatcgaggtgtgaaaaagttctaggttcagttgaagttctgatgaagaaacacaattgagattttttcagtgataaaatctgcatatttgtatttcaacaatgtagctaaaacttgatgtaaattcctcctttttttccttttttggcttaatgaatatcatttattcagtatgaaatctttatactatatgttccacgtgttaagaataaatgtacattaaatcttggtaagacttttgtgaagctttttattgttttcaaactaaaacttg

SEQ ID NO: 6118 - DNA, 1144 bp, Homo sapiens
gcaattccctgtttacatgtcttgttttccccactagaccataagccacaagggggagggactcttgtcttatccgtcgtcattattcctgctgcttattgaaggtgttgcctgccacagagaagacctcagtaaatatttgtggactgagtgagtgaatgaatgagtgaatgaacactgcaggatggtttgtctcaggtgacagtccactagtgtctgcctgaagctctgtgtgtagagggattctctggatgcagaggttaggagtgctgggatctattggacacatctgccatgtgctctggaggaaagtatatcacaaggatcaattagtgatgtctgttcccggtacttattggggagtggctgcactcatcaaggagctgtgcctctgcctcagagcgaggctgtattcaagattttggtggtggttgttggaatgacagcgcctgccacgtgctgtagccctgtgccgcagggagcccttggggtgtctgctgatctctctccatctctcgttctagctgtccctacctggctcgcaagctgacccttgccatccccatcatcgctgccatcctcttcttcttcgtcatgagctgcctgctgcagacaagcttcaccgaccctgggatcctgccccgggccactgtctgtgaagcagccgccctggagaaacagatcggtgaggtttctactcccagctgaagctgggtctccatagctccacattccctgacttgggaggaggcctggttttctcttccaaaactatactaggaactggggatgcagtcgtgagcaaggcaggctggagctgacactggcacagagggagacagatgatcaacaagtgagcaaataagtaagcaagaaatgctggccagccagcaaaggccccgatggcagccagcgtggagctgagtagttcctgggggctaggcactgttttaagctctttatatgcatgatcttatttaatcccccagtaatcctatgaggtaggtactgttgtcattctccttttactgattaattaaatcaaggcaaaagagggtccaagatcacaaagtaagtagaagagctgagatgagacctcagtctagagcacctgctcttaaacattcatatacacttattcatt

SEQ ID NO: 6119 - DNA, 2490 bp, Homo sapiens
cttgggcccccagatgggcagcagctctcctttcctcagcctttctcagcctgggcctttccttggctgagatagactctgccgtccaacccctggcctagagcctcagtgttgggcagagccctcatgtgtctcccttgtgttttggaagcctaattgaccggaggggatttgtgcagtccgacaccgtgttgccctcacccatcagaagcgatgagccagcctgcagagccaagcctgatgccagcatggtaggaggccacccctgaccacggctcagtacttgccacctgctggcctgtctgaccctccgcactcacctgccgggaccctccctattccatccaagggaagcagaactgccaaagactcaagtcttttcatatttatttcccatcctgcgtggctttccctgaactgttccgtggctgtgccctctgctccccaaacccaggttcccacagccttgggccctaggtaccccagctgatcagtgccaggagagaccagagcctctggaggctacccaggggaccacaccaagtccttgcctgtgccgggcgagccctgtgtgagtgaggctgtgaactgagcgtgaggcctcccaggtgggggaactgcttgggccttgctgagccagggtcctcagggtgaagcaggactgaggagtggccagctctggatagctggctgtggagaggaagcctccatgggctgctttggtctgtgggctccttcattcccttggtgataatttccctttattctgtgggatttttggtggggttttccccccttttttatggagttggccaataggattgagttggggctccagtagagaaggcagggttggtggtgggtgggggcagcctgtatcagacaaaggtaaatcagccagccaggcacccacagcctcagctcctgtgcagttcctgggcagcacagtggaagtgggagcctggtccttcccctgcccatggagagctctttaagggatcccagcctgcccctccacttctctcccaagccaggtcccggcatgggtgggttatgctcatgctggcaatacttgaaacgggtttattaatgctgggtattttgcacaattttatagacctcttttctacatagtcttttttaaatggaaggagaaaatgtcagccacattactgtctgtgtagtgccaggtgaagggttatcagaaggctggttggttttaataagtttattccaagagaccttctggctggaatgagtgagagtgtgtgtgcatgtgtgtgtgtgttcatgtgtgccctgtatgaatgtggctggctcccatatcccctgggctgccccctgccccatcccctttgagtgtcagaagcactctgagccaaggggacagggggcacgtgcactggtcacgagaaaaccctgggctcccactggggctcagcccagcctcctatctttccttcttctatggacttcagacagccagtgtctggggactctgccactctacccccagccctacccaccagcccccaggtgaggcttccagctgggacctgcccagacaggctgagcctgggcgtggtgggtggggtgatggctctggggagcggctgccatcctacaagccacaccccctcctctgagctctgaatatgggacccagtgccaggagctggaagacaaggtgtttctgccaaacggggacctccatccagagaaaaggaagaaggtgcagggtgggccaagaggcaagtgaaggttggcctgagtctgggccggaaactcagaggatgtttctcctctgctgggagctgtagtttcttatcaaaatagatattgttccaccatccccctccttggcccttcaagtgggctgaagcccttggaaagtgacataggaagtccccagatcttgcccttctcactccagaggctagtggtcacagacagctgggaatggcagccacagagggtcccctctgggagaaacagcttcaccccagcctcagggccctgggccatcactgcagtggccctgggaggtgaggaagaagctggctagaggagggggctcccacctaccttttatttaagccagtattctttgttcctgcttgtaataaaacttcagtttataagagttgctttgctttggtttggtttttgtttgcttttcctttgctgaggccccaactgggagccctctgttctttcagacaaatttggttctttcctggggagactgtgagaaggcaggcagcccagtgatctggctacattttccctcacctggctggagctctgtccgctggaggaagagcagagagggctgcggctgagcccccatgggcacgtgaaaagaggccatcctgtcccctctttgtcccctccaccttcccctgcctcaggggcttggagacccccaaattcttcttccctactgcctttccactccgatccccaatgagtgcccagctaagaaaatgt

SEQ ID NO: 6120 - DNA, 1398 bp, Homo sapiens
ctcatcctcctcctcattcagaccaatcttagtttctaaccaaagagtctctggctcagctgtggtcccacccaggaagggagggagctgaggcctcccttgagtaggccctgctttatcaggggacaaaccaggggtaccaggcacatggctgggggagggactgctgacccaccaaggtctcacactcctcctgccagctctgtcaccctggccaccacccaacctgtccttactcagagctgcgggctgagggcatctctgagtgtctctgcctggagcaggggtggtttctacggtgacagtgacgtgactcagagcttttcgaactgtgctcccacggggaccactgggcccctcaggggaagctgctaggggaaggactggccgtggctccagaatgtgctgcctttttaagttttgtttgttcacactcctatatatgattgtttgcacagagggcgctcctgtttttaaaacattttgaaaacccctggctgaacagtgctctgcctctaactccctcctcacactccagaattacccttcctcatctgtgcctgtctgtccaacccctcccccacgtctctctgcctgctgggctcttaactgttgctcgaagactgtgacatcagaagtaactcccactcctaatcaagagtctctccagcctcacagatgctggcctcttggcacctgcctagctcttgggcctgacctccagtcctgctggcctgctcttacttcccccaccctgggtttggcccctggaacctttcccttgtgtgtaccacaccctgcctgctgtggagcccattgtggaggcggtgggggggagaaggcctcccctgaggatcccctgtcccctggggctggtggattgggcagaatcctgggcccccagagacctttgcccacacacactccttccccttgtccctggggcactcccccaggattgtgcaatagtcagagtgtccctttttgcaggggactgggccatgggtcctcggcccatctgtccatcctcctctccatgcaagtgctgtttgggcaggagtcaccatgcaagggtgacatcgacaaccacgtaccaagccaccgcagctgctgccactctgctgcctgtacagaagaaactgaatctttttcatattctaataaatcaatgtgagtttttaatagagtcaagggctgctttctggggacgagggtctttaggagggagggtggcctgagggcgtgaagtacttagttcaaaggctggcacagaaacacttcatggctgtcagctgctggggtggttgttcccacatgccaggcactgagataccacaatgagctaagcaggacgtgccctgccccgcgggggagagcggcactaaccagtgcccagtg

SEQ ID NO: 6121 - DNA, 1396 bp, Homo sapiens
tgcaacttctacctcctgtgttcaagcaattctcctgtctcagcctcccaagtagctgggaatacaagcacccaccaccacgcctggccaatttttatatttttagtagagacagggtttcaccatattggtcaggctggtcttgaattcctgacctcaggtgatccacccacctcggcctcccaaagtgctgggattacaggcgtgagctaccgtgcccagccagcagtgtgaactttgacttgtcaccgtactagcactgcccagattcctacctgagagtaggaagggctttgggcatggagagggaagttcctcctctgtcccaaggatctcaagagtaagtaatgagagcagaggcctggccaggcatgcaggttatcggaaatcttgggtgatgtcccagccctgtgtattttcaagtcagctgatatttgttgagcacttcttgtgtcctagccctgggtgtataatgataagcagttatgggatctgcctgcacagagcttgcaagatagggaaggggaggagagagagctttgctttcttctttcttttttttttttgaggctgggctcaagtgatcttcctgcctcggccctcctaactagctgagactacaggtgcataccatgcccagctattttttttaagtggagatgaggtctcctatgttgtacaagctggtgtcaaattattggcctcaagtgttcctcccacctcagcctcctaaaatgctgggatacaggcatgagccaccatgccaggccagagagagctttcctcttgagcaaagggacaaaccctcttggctatgccaaccctgggagcatagtacccaacatacaactagatgctcagatttttttccacctactttcccaccccaaaacaaaacaaacaagtaaaccactcacaggagctcagggttctctggccatacctgatattgagagaggccctctcaacggggatttttgctactcctcagctctgggtttgaagccttaaggtggactacagcagagcggcctgttgctggccaggacacggcctggggagatggctggtgggtcccaggcagaggggtgtgtgaggaggccttgatgggagggaaggataggagagcttgaattacagaactgtgcagtttgatgggaactggggcatcagacctgtgttctattctagttctgctccccacttgctgtgtgactttgggcaagtcccttcccttttctgagccttagttgccccatctttaaagtgggtggcattgagctagaagcgggatagcaaatagattttatctcacctgccaaagctggttgccactgacatccttgagccgtgtcttgagcagctgcctggactcagtaggaaagcctactgtttt

SEQ ID NO: 6122 - DNA, 1205 bp, Homo sapiens
aggagtttaactgagctcgctgggagcgacactcacagaatgatgccttaggcgccagccagtgtttaagtggtgctgccttggccacctccctcggcttggctctaatggagggtctgcaagggcatcttctctgggccgggtggggtctctctgggaagatctggatctgtttggtctgccctcaatttgtgtaagtaaaagtaagataccagagcttccttggggagctgccgagagccctaattgaattaagcttttcctgggaagattcctcaagccgtaaactgcactgtgactgtgaattaatgagaccagtggctttaaaccatacaagaaggcaatcttgttaatttatagttgtacctggacagatttacttatggcttctctttgctttaatgtgtgttgggaatgggtgggctgggccagaatctcctttctatggcagatttatttttataatatgaataaataaaacatgtcaatggtaaaaacaaaacaacaaaaataaaacccaacagtacagagggtattgaggtgaaagggaaaagtccccctcattacttctctgaccacccccactgtcatacattccagaggttaccactgttaactgtcttgtccatcttttttagaaattctccatgtatatattgagtatgtgagtgtgtgtgcatgcaaggcaaatttagttttcataaagccattgcataaaggaaacgagctctaggctggtaactggggacctgggtcttagtcctagctcgcctctttcctgcatattgacctttgctaagctatgtttgccttcctgggccttagtttccctatctgtcgatttcatcttgaagggctctctggggctgtcctgtgggaaaggcggtcattccagggaagcctctgttccgttgaggcctaagcagactgtgaggccctcagatggggaattccacagctctatcctttgggagtgggccagtgctgtcattgagccctggcttcaaagcacagggctttgtacaagtacagatcacggtcatctctaagtccagctgagggttacaaggttgaagaaatgagcccacagggagtcagctttcttgctggggaagtgagacaacatacaagggagaaagcacaggtgggaaattgtgtggttcaggctggatgcttgggggaatcagaggagaggagagatgagg

SEQ ID NO: 6123 - DNA, 1559 bp, Homo sapiens
ttttttttgccagtctttgtcagaaaatatatttattattgatagtgagtgaagtaaagatgtgagtattcactatagaggttatatcagccaaggttgccttcatattgataaaaataccttatctcacttgtaatcataaacattattccagtagaagaggtacattttctctcctttttgtcttcttgcctgtataatcaccataataagttacaatgaaatagcttttatataatcaaaggagaaaagaaagagagacaaaaccaacatgccacagcctagacaattccatccagcactgctgcctccagatctgttttctggctttctccacccagcactgctgcctccagatctatgttttgtggctctctcctcaccctactccaattaatttagcccccgaccccatctactttgttagggtggaggttcaccaaatgatggggcttgttcagaagagaaacattttatggtcagtggaagttgagtagaaagtaccaaaatgtggagagggctgcccttctcttttaatcatcataagagggtttgctaatactgaagagtgtcctttaatgactgatccctgatcaaggctttggcccttcaaattgctgctgttcaaaatgtgaaatgattctgctgaatccattcttggtgtctctctttagtggtcttctcattagtggtcttctcttcaaatgggttgttttctcactaggaaaaacaatgttccatctctggaattaacgttgatggtgttttgctcattctgaaagtttttatcctcccttctcaagcatggccactctgggtggccagagtggagcatttgaaggtctggtgggtgttctcacggtaacactgaagaattttggcctgcagatcagcacagactggatgagactcataccgcttgaactttgcttccacctcttcagcagctttctgatattgttcagtggtgactctgaagaactctgagttcctcttctccagtctagccagctgttcgttgtagaatgcatcctgcttctttagcactcggtctttctcttccagctgcctagccaggtgctttgccttagcgcgttcctcctcgctagatatcctctcccgaaggatggctctggttaactgctcattggcagcaaccctctctcggtccagctctttggctgctttagtcgtttctcatcttcagattctttcttggcttgctccaatgccagctcctcagctactcttcttttcaattcttcatcagaaactgaggcaccataagcaccagaataccgctgagacttcgaaccagatggagaggattccttcattcgatcaatcacattttctgaaagccggatgcccttcaccacggtaatgttctcattctcgtccgcctcgaaggtgacccggcgggtgctggtggtcccacccatggctccggttcctgccccagcggagacctagcgcggaaccacgagcacttcggggcccccgcgcccacacgcgcatggaagggcctggattcttttcccgcacggcgggagcaaggc

SEQ ID NO: 6124 - DNA, 1208 bp, Homo sapiens
ctacgaggatgttaaagaaggatttctttattaggttgggtcttggacacggtcaccattacatttcctttacactgtttaattctgtgaatctactggagacttgagagttctgtctgtgatactgatttggtttcggggagagccaagctgaggatcagagatttgaagcataactaaaagttcagacgagctgccacagatgcctactgagcaagtgaaacttgatgtctttctagctttgccttgttctaactttaaggatatgctaccattatccttcatacttatacacaacctgccattttccgatgaagcataacatatttcttccgtgtttgttccaatgcttgttgggatgtgctactgttctccccacccacttcacccattccagaggtttttcaacactatggagcagggccagcccaccatgccacaaatgacaggcaagggccacttcactgggtgggctgttttaggggtggaattaggtcttgggagtcactttattatccatcctccaaagtttgatgatttttttcccccaggtaattaaatgtgtattttgtggacctgggcttggctggaatgctcaggggtcctgaagatcctattatagcttccttctgttgaaccattaagaaaagatggcgaaagtcaacataactagagacctcatccgtaggcagatcaaggtaagcagcccagacttctgcaccagatcatgagatcttttctttcccacagattgattttacagatgaaaaaactgaaatctatagtctgtgacttgcctaaagtcacgtagctagttagtggcagacccaggactagaatcaaggtctctttctctccatcttgtattgtctaagaacatggatttcatggagactctgtccacatacttgtgcctgggctgctgagattaatgcaggctggcaagggaggggagctgtcaatgtgttgtgcagatacatacacatccttgtgttgggcaggtggtgcacaagagcaaatataacttcttcatgttgctccagctgccaagttgtatatgtaagagatcctgggagagtattagtcccagttcagcttgtattctctttgaggctctcctgtgctaaagcctgtcctctgcagtttgtatgtagaagacactctgatacctgtgagataaatggatgactgggcagtcaagttcagtt

SEQ ID NO: 6125 - DNA, 2967 bp, Homo sapiens
acaaaagtcaagtggtatgtctgattcccaagataatttgctgtgacttttaaagagaggacccctataggcttccccattgagaggagaggagaaagaaagatgaagcaagagttgtggcaacaaaacagaatggggtggggaagttgtatctgccccttgtcccaggtatcccagtatgtgtgtccaacatatcctggtgtgtactgtcccccacgtatatcccagcatgttatgacctgcctgtatatcctgaggtggcgtatctcccatatatattccagcgtgagcacccccaacaatatgtagccaaggttgtgtgttcccctccaccatatacacctcctggcatgtatgtgtacctccccctatagatagtttagtctgtgtatttccctccccctcccctatacgtgtaccctggtgcctctccctccctgagccccacgtgtgtcacccctttctccaccacagagtgaagacctcacaggccgagtcgtggaagatatggagggtgcttcacaggccaaccagcggcgcatgaatgcagacccgttggaggtgatgctgctcaacatgggctaccggatcacgggcctgagcagtgggggtgccggggcctctgatgatgaggacagctctgagggccaggtgcagtgccggcccagctagaccctccagccctggtccccagcccctgctactggctggaccctctgccctgggcaggaggtcaggggattctgttttggtttgtcttccccaccacccttttttttcatttcccctgttttgtttgttagtttggcgttaggggtggaggttgctacaacttgctggctttcggactctgggctgattgtcccctgactatccccagccctgaaaaaaagagcaggaggggacacccctccatatgcccccccccatctcctgctttcatgtccctggagggctctggcctgcctcaaaaccccttctgcctcaggtggggaggaacaagctgaactgtcttcagggactgtcctgccctttagctggcagcagcaggaggagtgggattcccaattggtaagggctcgccttggcctgttgccactcttgctccctagcctgcaaggctagctcccctgtggtcttcaggaaaggttttgaaaaaggatgggtcccaccctccctccagagccaccagtgttagagcggagcccaaaggaaggatgggagccctggagtgggcaagaccaggccacctgctgaggtcgctgtggagcaccctcgctcctctcctggctactagctctggccctgcacctactctcactggccacctctggaggctctgcctttcccaagggccctggcagagggtggggcactgcaccttaccccacccatccatgccagcacttctgcactacggccattctcctcttgggcgctcctcagcctcactgtgacctttctgccagagctcccagccaggcctactctgctgaggtggcgcttcctgctaagggcccttctctgccctttctgccctccttcccatcccacatgctgagccgccacaaagaccaaagaagtgatggcttttctctgtcccctgctgctctgaggggagaggggtgggtctcctgagccactcagatgggaaagtcccttactcggcccctccctccccagcagccccaagctttacactggatgcagcgatcaacccaccactcaccaggcctctcctcccctctgcccccggctcttagctccagctgctccaggtagttggttcatccttccccctctctccctccctgcttccccttcagtgcttacttggctccagccctccagctgcagcccctggggaaaagcagcctcccttctcctctccctccactccctcgctccctccctcagcccctgtctctgccaggtgcctcctctcagtcaggcttcagagcagccctggagacaggagggccatgttaaaagctttttcacagttttaagaagacaagtggagggtgaggatagtggtggggggtctggcaccatctcattgctttaatcccagcaacacaggtggcagcttctcccccttccttcccaccccagtccctcttcccacccctctcttctagcttggtaatgaagtatatttattggtgaaggaaacagctgctgctgcttctcctgctgctgggacctgctcccctgtctcttctccgtgacctttctctagccagggagaagggagagcaggagtattggggctgggccctggggcccaaggaccagctgggtcccctttgctttcttgtgttccagccacctgccatttcctccctgcctcccaccctccctccctgccccctgtcctgcttcccaccccctgcctgcccagcctgggccctgcagtgtggagagacacataagccttactgtcctctgggggcaggagccgagcctttttgttgctccgctcccaggagagtgagggtgacgcaattgattaaaaccattttgttctaggtgtggctggtggcatttgtggggtgcagatgggtcttggaaccaaagtgagggcacctggtccctcacctctgtagctctatgacttagtaaccacacctctactggacagaatgaggcctgccttgaagggtcaccgtgagcagcggccacccagcccagcagggctgagtgcagagcccagctctcatggctgtgatttgtaatcatcagctttcactctctggctgttttctcatcagtaaaataagggacttggaatcttagtggtttttcaaaccattttacattgtgacccaatatacacatgattacttgtagatatgtgtgtgtgtatatatatataaaaaaaatgaacaaaagttttacacaataatatttacccttgctacatgcagtgtactctgcttacccttctgttttattagggaaaaa

SEQ ID NO: 6126 - DNA, 2577 bp, Homo sapiens
tcagaaaaaaactggtcagctctagccaacagtgaggtttcttttcttctgccctaactattgtgtagcctcttatgctgaaatcggcttctgctggcttctccggctttcagagccctgaaacaaagagaaacaggatctgtccctacccagcacagcaaatggttgtagtaattgccaaagccctcataaagccctccggcttgaggagagagtgtatagtcatgggttctgcctctgtgcccttgctggccgcttctcctctgccttctttcctggaactcagggtgtggggactgagcctgtaggggacagcatgccgtcttgctgtggccactcccaagtgtgccctcttccctctttacacatcaggtgtctctggcacaggacttggcactaagctccatgctgagacaccaggctatgtgggcccccaccttgtttcccagcctgcaccttagaagccgaaggtgctttcatcagaaccctaaaatggtcgttgaaggcgcctgggccgcagcccagcagtagttggagaggcaggcagagggcagtggttctcccaaataggagacctggggcctggccaggccagggtttgggcctaatggctttgactaaattacccccatcctccttgcccggaaaagggagagctagagccactcactgtcattctgctctgaccttgaagggggcggtgttggcctggcttctggaatggactgagtccatcgtggaaagggctgggggcaggaggaggtggggaggggcactgcctgcggaaggtaggattagatcattagctcagtgacctcctagggtttcgatgtgctatgttctcatcctacagttggtttggtaatgatctgcaagtcccggagagcaacagcacagctctgcctgacgctctcattaaaatctatgcagccaagctcggcactttgtagcagccggccttgcgaagcctcctcagctcggggggccggggacccagtgagccgagaggccctctgggctccacttatgcatatgcaccaaaaaaaaaaaaaaaaaaaaaaggcttctttagacccagagccctttaagatgataaaggacccaatgcaggtaatcctgtttttggactcacgtaatgtagaatgcaaagtttagtgattatttaatctgggcctaagctagtgagagtatggaacaatggcccataaggactcctaagcgccgaagccaaggagcctcctcccttcctggttcaccccgcccaagggacctgcccccattcctgtggccctggggcccagcttccaatagtgtcagaagcaacttgtggctttgccttggttgtgagatgggtacattccaaaggagcagcctgggggagggggcaggctcagccagcccttggaggctcagagcagctggcccaggctccagctcgcctccagtggaagcccgagcgccctcagaaacgaccctggccaatgtcaacgcagagccgaggcggtgttgtcacggctaatgtgaaatctcttcccgtggcgcccatcctctgactctgcagtgccagcttggacagattgaggtctctgtggctttggtgaccctgcttaagcattcccaccgtgtcccagctctgctctaggactgcctcccactgcggcccctcacctgacttcagggtatggggagggagggagccagtgctccaaggccagggggctttgctcatgagagatgtcaggcttcctggaggcatcaggctttgagccctgctggggtccaactgacctgggaccaggtgtcgcgcagagatgtgcctcattctgtgcctccttctgtgcctcctaccatgttccctttaactgtgcctcagtgtgggttagggaacaattttgttattgtattaagtttattcagttaattcacttgaggaactaaccagtttttactttctgtctagaatgatgtacatgtagtagagtaagccataatgctcccaaagtgccttgttttctctgatacaaacatatttataaggacatattcctgtgggttcttgggtgtgtttgccacatcaagattttagggaaggggggtatatgtgtagtagggatgccgtttgaaaacaggcactcttcccctgaggatgggaaaggagctcttcagttggagatctaggcagtgggttaagccagacccctaaagtgaccctttcctcttctgccctattcttctcagaccctcagaaagacatccaatttttttaaatccctgtagctccaagcctggtctcatttgcttccctgccaggctcatcgtgtgtataccacatttgtgccccactgacctgaaggttccatgtaactgtatacacatgaatacttaaatgccaacatttaaaataatttgataaagtctttgtagccactcagccacctctggtgtttgtggtattgttttaatgggacaagagattagaaggaaatgacactaacagccacaggtggtggccagagctcaggaggggctccagtgtgggtgggcctaaagggcaggaggcttttgggtgtggaaagt

SEQ ID NO: 6127 - DNA, 1121 bp, Homo sapiens
gctttgaaatcacacaagcctgagtgctggaaagaacctttttagctccaccacacccccatgcactcctttctcccattcccccaattccttctttctcaaatttcccctccctcaatcgtattttgctaccataaaagtacttggaagattcattcctcctaaggagaggcctgctagatctggccacatagtaaacctttgtgttgcctcattttgttcagtcgtgaaacgactgggctgctgacagccttgtggggcttccccagagggggagggaaaaaaaaagcctggctgcggacagccacagccaagaagtgcagcagctgaggcctctccgactggtgtgactcagtgtttgctcaaatagcctgtcgtccattttctaacgccttccatcttctctcagtgtcactgcaaggaatcaacacccgaaaagccttcagaagttccaccattcaagaccagaagctttttgacagaaactctctcccagtgcctgtcttagaaacatacaatacctgtgatactcctccccctctcaacaatcttaccccttacaggtaatggctggctagttcctccctttttcaacctatggtttaataacgctagatttttttttgtctgaagcggttgtttccatcagaggattgtatctaaaagcttactgcctaccccaaagttgtggtagtttctgtggcagcagaaactaaaatttacaccataaaaattgtcacttattattgtttggtttctgaaattcatagtgaatataatacatattgaaagtttactgtaaccattgcatgctacagaatttaatttcatataagccaggtccatcttggattccatccaaggaatttagttattatagaaccaaaaggactttgttacaaggcggtcctacagcatggatcatggatcccaggggcaacattctagcaaggctcccacttacttggaaaccactagattaccagatgtttgggtgtgttagtggggccagcctcttggcctggctgctctgggcccaaaggggtctttccaaagcttaaggagtaattcgcattcttccaaatgagcatcgttcactttgttttgaacatcctttggac

SEQ ID NO: 6128 - DNA, 1123 bp, Homo sapiens
gcgagggcctgggcgctgcgggggctgcctggcccggactcaggcaccaagcgggcacggcagctgggagcgcaggtgctgccctggaaatggggtggttgtcctgggagggggcgggacaggggaaataaagggggaatttaacccttccttcccccaggcttggctggggaggggagaggccttgaccaagccctgcgccatctgcctccagcgtctctccagtcctggttgtggctgcactgagggtccccatccctcaggacgtgctcctcatcactccaggccctaaagtgactggtgaagttaggggtgtgtgaagtgccccaggactaggtggagggggtggtggcacgtgaagggttaatacgtcctcataccttgattccagtcccggagctgccctgaccccctaccccctcagtcccgctgtgttaattggcgcggaggggtgaggcctatcctggcgtggggggagccagcagagggtttgcaggtagaggcagtgggagggggcctaatggaggggggagccaggcggttgcctagcaaccccacagctgtctgttgacctagaagaagctgcgccgtcttgacacagctggtgtttacatgtaaccgaggctctggcttagcgcttgcttggaggaaagctgaggtagggccctcgtggcagcctggccccggcccccggctgtcgtgggctccctgcctgcctgccctctttgcttcagctcccacctgaagtccaacggagaaagagtgggagagcagatctcagggttgcaggctgtggggctggggaaagttgctgaacacacacacacatacacacacacacacacacacacacacacacacacaatgcctgaggccttccacacagaaatggtgggagattaggaaaagcagaggcagattccaacccacatggaaaacaccaacatacagagggacacgtggccctacagacctgcaaaatcaaactgacctaggcacgcaacacaggcacggaggtaccgcagacataatgacaaccaggaagacagacacacagacacacagaaacatggtaattgaaacactgacacacagatgcacctacatacacctccatacacag

SEQ ID NO: 6129 - DNA, 1135 bp, Homo sapiens
gcaggtcacatcccaatgtggattagaagataaaagctcagaggagacagaatggggaatgtggagcctgactgatctgagagctgtggctgatgggacggggaacagaacgggtcaagcaaggagggggccttggccctgtgcagacatcttctctgggcctctagatggaaagtagagccagacagactggctccacgttgggccctgtgggctaaagatcgaccctatcagaccctggggacaggggtgggagggtatgaagggccctccaaggtgttcaggattctcgagtccctctcccctccctactccctctcaggcctgacctgaggccaagagaaatgtcacaggtcctccaaggttacgcggctagggcctgactgaagcaggaagcagtttccaaggccaccatccagccggggtcagcaggcatgcccgggcctggaccaggccgcagctgctctgggctttgtctcttcgtgtcttgaaacctcgagaggtcacttgatcttgcctgtgactctgagcaagaggccttacgtcagggcccagccagtcctgccctgactcttctgggcacaagttcttccccacactctctgaggccatcctccctctgatcctatctcttgccactcctgcagccatgtttaggccaggccttgttctgagccctcatttcctgaaaatgtaatctctccacgaccataccgactcacccttcttctttcttatcttcccacgtcccagagcagggccacggaactggagggtggtggctgggagcctgcctgtggacacagataggcctctatgcacaacccagttccatcccttaccagctaggtgacctggtgagtcatgtcacctgatgagtcacgtcacctctctgcatctcttgtgagaattaaatgagattacacgtgaagcccttggccaggtccctggtacacagtgagcacgtagtcagcggctggtgatgggtaggtaaatacccgacagaggctgaactccggggcctctgaccagcctgtgtgagtcacacacctccaaccctcgcctcttgtaccttcatgcaggaccatagagccggccctccctcgcctgtgctcctcctaggaaggaggttgta

SEQ ID NO: 6130 - DNA, 1593 bp, Homo sapiens
caaacggggccggggggaggtagacgctgtgactgggaagccaaagcgcaagagacggtcccggaagaatgggactctgttcccagagcaggtgcccagtggcccaggctttggggaggcaggtgctgagtgggccggggataagggtggtggctgggcccctcaccatgggcacccaggcggacaagctggccgaaactgtgggtttcaggggaccgaggcccgggcctttgcctccactgggctggagagtggagcctcaggccgtggcagctactacagcacgggtgcaccctcaggccagaccgagctcagccaggagcgccaaaacctcttcaccggctactttcgctcgctgctcgattcggatgactcctccgatctcttggactttgccctctcagcctctcgcccagagtcccggaaggcatcgggcacctatgcagggccacccaccagtgccctgcctgcccagcggggcctggccaccttccctagccggggagccaaggccagcccagtggcagtgggtagcagcggggctggggcggacccctcctttcagcctgtcctgtccgcgcgccagaccttcccaccaggacgagcagcaagctatgggctaactccagccgcttcagactgccgggcagccgagaccttccccaagctggtgcccccgccctcagccatggcccgctcacctaccacccacccgcctgccaacacctacctgccccagtacggcggctatggggccggacaaagcgtattcgccccaactaagccctttacaggccaggactgcgctaacagcaaggactgcagcttcgcctatggcagtggcaacagcctccctgcctcacccagcagcgcccacagcgccggctatgccccaccgcctaccgggggcccctgcctgccaccaagcaaggcctccttcttcagcagctctgagggggcccccttctctggttcagcccccacgcccctgcgctgtgacagccgggccagcacagtctcgcccggtggctacatggtacccaagggcaccacagcctctgccacctctgcagcctctgccgcctcctcctcctcctcctccttccagccctcgcccgagaactgtcggcagtttgcgggggcttctcagtggcctttccggcagggctatggaggcctggactgggcctcagaggcctttagtcagctctacaatcccagttttgactgccacgtcagcgagcccaacgtgatcctggacatctccaactacacaccgcagaaggtgaagcagcagacggctgtgtcggagaccttctctgagtcatcctccgacagcacccagttcaatcagccggttggtggcggggggtttcggcgtgccaacagcgaggcctcaagtagtgagggccagtcgagcctgtccagcctggagaaactgatgatggactggaacgaggcatcatctgcccccggctacaactggaaccagagtgtcctctttcagagtagctccaagccgggccgtggacggcggaagaaggtggacctgttcgaggcctcacatctgggcttcccgacatccgcctctgc

SEQ ID NO: 6131 - DNA, 1626 bp, Homo sapiens
tgagactctcttccaaaaaaaaaaaaaaaagtgaaactgggcccatgaggggctcactatacacatggtggtttgagaaaggctgggagtcagcaaggggatggggcttggggtggggaggggagcttggtaaggagatgagacctcaggagggaggggtccaggagctcatcaaggatatgggaagctgatgaggatgtaggtgttcagtaagggacctcctgctcttcctgcctggcaggtcctggtcccggcttctcgcaccctcatgtcagccccggccccgcccggcggcctgcggaggacaaggtcaggatgcgtgtgaagccccagggcctggtggtgacttccagtgccgtgtgcagctctcctgactacctccgggaacccaagtactaccccggcggcccccccaccccccggcccctgcttcccacccggccccctgccagcccacctgacaaggccttctccacccacgccttctccgagaacccacgcccacccccacgccgggaccccagcacccggcgcccaccagtccttgccaagggggacgacccgctgcccccacgggcagcccgtcctgtctcacaggcccgctgccccacaccggtcggagacggcagcagctcccgacgctgctgggacaacgggcgggtgaacctgcgaccagtggtgcagctgattgacatcatgaaggacctgacacgcctctcccaggacctgcagcacagtggtgtacacctggactgtggtgggctccgactgagccgcccgcctgcaccgccacccggcgacctacagtacagcttcttctcctcacccagtttggccaacagcatccgtagccctgaggagcgggccaccccacacgccaagtcggagcggcccagccatcccctctacgagcctgagcctgagcctagggacagtccccagcctggccaaggccatagtcccggagccacggctgcggccacgggtctgcccccagagcctgagccagacagcactgattactcagaacttgctgacgccgacatccttagtgagctggcctccctcacttgcccagaggcccagctgctagaggcccaggccctcgagccaccatcgcccgagccggagcctcagctcctggacccccagccccgcttcctggacccgcaggcactagagccgctcggggaagctctggagctgccacccctgcaacctcttgctgatcctctggggctgccgggcctggctctccaggccctggacaccctgcctgactccttggagtcgcagctgcttgacccccaggcactcgaccccctgcccaagctgcttgacgtcccaggtcgccgtctggagccccagcagcccctggggcactgcccactggccgagcccttgcgcctggacttgtgctcaccgcacggcccccccgggcctgagggtcaccccaagtacgccttgcggcgcactgataggccaaagatcctgtgtcgccggcggaaagccggacggggacgcaaggcagacgccggacccgagggccgcctactgcccctgcctatgcccacggggctggtggctgccctggccgaacccccaccaccaccgcctcctccaccc

SEQ ID NO: 6132 - DNA, 1119 bp, Homo sapiens
aatgttgaggttatccaataatccagtttgtgtctctgatttggataactcataattgtcacttttgcctcagatggtcatgactttccatttgccagtttttatataccaggtctgggggaatgcaagtgcttgagtgccctttttggcctcaaaatatgtatatatgattttaaggaagttatgtatatataaataataattttaatccagcactttcatttcacaagtaaaccgcaaaatcacacagtggcagaagaaccaggcctggaattcagggcttctgattcccagtctgggacttgttcatatatatgtttgttttacaatttatggctagttccatataatccatataagttcttacttaactcccacatcaacagtagggaagtgatgccagtattacagaggagaaaaataaggcccagaaagtttaagtgactcactcaagcatagtagctatgctagaaatagtacccaggtcggcttcctactgaaggctgtttccatttgtgactgccttttaaaattatatcctcatttcatttcaggaatgtcggattgcacaccctgttgtgaagtgcacctactgcaggactgagtaccagcaggagaggtagagttttgttgaccatgaaagatattaataggcttttttcctcttaaaatctgtaattgattgcatttcatgtacagatgctataatcagttgcattgtaaaatacagatctgtaatcaatcacattatatacagactataattgctaaatatttaggtctatgatccatcttgagttaattcatgtgtggggtgagatatacaatgaagggtatataatacatgtattgtttcctagttattatccattgattgcttaaatttttttttttttttttttttttttgagatggagtctcactctgtcacccaggctggaatgaagtggtatgatctcagctcactgcaacccttccctcccaggttcaagcgattcttatgcctcagcctcccaagtagctgagattacaggtgcctgccaccatgtccggctagtttttttgtatttttagtagacggggtttcaccatcttggccaggttggtcttgaactcctg

SEQ ID NO: 6133 - DNA, 1907 bp, Homo sapiens
ggatttcaagctcgctctctttctctcactattaggacttttctttttcttcttcctcttctctctattttggttctattctttttttttcttttttctttttttttttttttttttttttgtggtggtcactgctcagtgtaatgtgcagaatgatttgttttttgtttttttttttttttttggtccttcattgcatcctgccatacccatgagcaaacagtttggcattaattatatatcactgccaccctctgaactttgaaaactgccatcttcagacttggtataatggaagaggctttctctctccaataaaccttttgcttcagggtatactcttcggtttttttccagatgtattatgtatgaactttgtactatgtatagccagagttttatttattttttaaaaaagaaactttttcttgataaaggaataatggtggtctagctagttcttgtaaaagtgatgcctcttgaaaaaaaaacagtcctattcactagcttttagtaaaagaatcagatcttttctttcttgttaccttggagtcttaaaaactgattgctaaggtgaaacaattcaatgcataagtatggagctaagtgccttttggaggatttcttggaagagcatttatggagatacttaagggaggtagcaaagatttgaaccgtctgtctttttaagtaagggcagaaagcaaggttgtccaggttgtactggacacttctctccccacccctttcctgattgttttatgtgattgattttaaattctcacactgccacttctttaaaaaataaaatcctttatttgcttatatcagttgtcatactgggctgctgtcagagaatgtttttttacatgaatgaacagattaaaaatggaataatatggtcgggtgcggtggctcacgcctgtaataccagcaatttgggaggccaaggcgggtggatcatttgaggttaggagtttgagaccatcctggccaacatggtaaaaccccatctgtactaaaaaaatacaaaaattagccgggcctggtggcatgcacctgtaatcccagctacccaggaggctgaggcaggagaactgctcgaatcccgggaggcagaggttgcaatgagctgaaatcgcaacactgcactgcagcctgggcaatggagtgagactccgtctcaaaaaaaaaaaaaaaaggaataatatttgaactacagagcatttttggggtcagcatgagctgctctagtaaggactcttgagtctgggaaaagtggtatcactataccttctccccactcctcacccacccgagcccatacactccctgcttttcatggatatgtattgaaaacaggtgcttctcagaagcactttgcctcaaccagagttatgtatgccctgcctatcttcccttcttaaccctgtaggaatatggatttacttttccaggaaaggggatagatttacatttctaggcatactctcaggtcctctatgtgatgtttgtgaaaggaattagggtgtgtcatgtgtgccatgaaacaacaaaaccaactaccctagaatcatttatgcagggggtactagagttagaaataataatgagggcagataacatttgtacctcagtctaccaaaaaattatagtactaaatttaacttctaggcgtttcctggaagcagatgctctataatttgtgatagcattctcataaatggagtcctacacataattggacagagatgtggaaatggtggtttccttctgataagggatacagtggaccatgtcgcttatatatcaccctactaggggatataattttcccttctaagcaagggaaatggcagtgctaaatagttttgtaaagtttttgaatgagaagcttttaggtaaag

SEQ ID NO: 6134 - DNA, 1984 bp, Homo sapiens
atctcgcaagaagatgtgtatcctggtgcttgtcctgtcagtgattattctaatcttgggacttattatctggctagtttataaaacgaagtgattgcctccgatcgttctcccgctgagctgttttcaagggcaagtgcttgttgaagtcttgccagaacaaactgatcacaagaagacagcatatatcagaacgtcctgtaatcatttagttagaaactaactactaactagtctttggaattcgtgacctatggagacagtaattatcaatttattgattctattgatttctcaaattaggaattaacttatgtggattttgcttcctcttgtattctgattgcccttcatcccaagtgtttactgaaaattccattctagatattcttgttttgacaaatgacactacagtctcgtaatattgtcttttatgtatatacaaaatttacctttttactagcatctgagatagagttactttctggtacccagtatattggagtctgtcagaaactctataataggccaccagtttttattatttaacatttttatttgaatttctaagaagcctattctctatctattttgaaagattttggcactatatttaattggaaggtaaaatattgtacatgtgatccagagtaaatgagaagtctctatctgagctggtcagttactggagtacatgttactaatctgggtttaaagtttacttcattatctgctagtgtcatccacagcagttcatcctcatccacactaagccatcctgttagcttttaaaggaagttaatttaattaacattaatatactctatgggctccctctcccacctgtctgcatagaaaggcagaattagacatagcatgctttggaaaagcaaataggaattgttgggaatgatttaatcttgttgttgttgttgttgttgttcacttgtggttctacattcctggtgaatgatgaatgttgctgtcaaagggctgccccctaccttataagggttgctgggcatttgaaggcaggaagatttttaaagatagattgaggttggtttaaaattattcctgtaaaccaacaataaagcaaagaagaggttcatttttgtaaataacactggtttcaaatagtgatgttagacttaacctaatttataaacaagagattaatatctccatgcatagttttagacaaaaaaagatgtttcaataaaattactgtcttgtaatataaatgttgtccacttcccttttccacaggcctagaacagttaaagggaacataatttgtttaggctcccacataaatgtgaatctggccaacaactttggttcatcctttagtgaattagaggatttggctaccctgagtatatttatattcatttcttctgttctccttctgttattatacttaatcttctaaactaaactaatgtgaacagtagggaagcaagggcccaaatgcataagtttctttgcactgttgcacttacttaatacaaataaatgttttttaaagcttttgtagtatgtttttatgagttaacatcctaatgtggtaggtattaggtaatgtgctgtcatgagaaaaattgagacttccaagaaaactggacaccaggtgagggttggtttggagacggaataggtgtagctgcctttccttgaaaaacagtgtgtagagatggctgagtgcaatggctcacacttgtaatcccaacactttggaaggctgaggcgggaggatcagtatatcggtacgtctgagcccaagagttcaagatcagcctgggcagtatagcaagaccccatctccattttttttttaatgattttttaattaaaaaaaagaacaacaggatagagctgttggggtggcacagtggcccaaagagcagcttcagagataattccttggttctatgatccctgtttaactccaaattacagtcggacttggatacatcatttg

SEQ ID NO: 6135 - DNA, 1410 bp, Homo sapiens
aaatgaacccaagaagaagaaatatgcaaaagaggcttggccaggcaagaagcccacaccttccttgctgatttgatatttttggtcatggagaagggtgggattgggtgggaatggggtggaagggtgatggggagctaatgaactagggagaaaaactttccatgtgtgcggtatcgtctttcagaatgtctcctggcatcctaaccatgtaatatgacaattgggggtggggttgaaatagcccataaagacctgtcttcacaacacttgcattgtagagaaaggcttcttatatccttttcaatagactgccctggctctttcctaggccttccactacctcctttctttctcccactttctaggatcatttttatgtaaagtcacatatcccaggccctcaggttgaatccagagctgtagaggttacagtagcatcaccagccttgggggtccagagcctaatttatattcactatccttccaagtcccgggtagcagaagggttgccatagatctcagtttgatcaaaaagaaggcttagaattctgcagttaagctgaggtttaaactaaaaaatgtttccttgggtcagtggttttgaggtccagtagctaggcttttctcttttgtccttcctgttggaatgaaaacatttcgattttccttcatctgtgactggtgccatagacacaggtttatagttttaacttacagtattgtttgaaatttacctgtttttcttgtcaaacctgagcactcctcctgctgaagtttcttatttaattccagagtactgtcctctactctaaggcattacttttaagtgtattatgaaggcagttttcaaaggatatgaccagttggggtaattcaaattaaaaaggaaaagatttgtttggaagtaactggtgtctctaagaggaatttttagatgtcagtttggaggctctttcccccctcaattgagagctcttgttattcagagctccaagactagacctggctaacaaacataggagacaaagttaggaaacattgatacaagctttgtacagagatttgtacatttgtgtaataggccttttcatgctttatgtgtagctttttacctgtaacctttattacattgtaaattaaacgtaacttttgtcatttgggtgcaggctgtgaatttgtctctcagtcactgattgccactgccatctggaaatgtttgctaaaggcacagtcactgggcttgggaggcaatgctccatccccattatattacaaataaagatgccctaaatgagtgtggaaattctaatgagagaatgtagtccccagactgaagcctcacaaagcagcgttggttcggaagtgcttggtgcccttcatcaggagacctcatgacgggagacgggg

SEQ ID NO: 6136 - DNA, 1196 bp, Homo sapiens
agacagtggtttctactaggagattttgtgtgcaagtgtgactacagctttagatccttgttttcctgcttagactgtatttaagtgaggccctgttgtctttcctttgcacaatttgggagagggatccaagacagccctaatagccattgtctccatgaataagctctgttttgctattttactggcatttctccctgtgagagctttctatgtgcagaatacttgtgaattcttagctaaggtagaaagttgggagataagcgaagtttgcatatttggccatatccaaaaggcagtttccttctgaattggcctgaaaatgaccttttttttttcttctttctttctaggcaagctgtggattttctgagcaatgaggggcacatctattctactgtggatgatgaccattttaaatccacagatgcagaataactggatctaactgggtacctgagatattttacagctggacctagtttcacaatctgttgtctccagctctgcatatgtctggccagggggcttctaggaagtaggtttcatctatcaaatgtctcctctgacttccttttgaaacttactgctcttctgttttattttgttttgtttgaagctcagagggagatgggcaattgacagggatgcaatccagggtgggatttcttgaggaagttacaaataagcttgttacaacatcaagatagatggaattggaaggatgctaccaggagagtacttacatagtgctcaggagtttctcttcttaaaatgtttactgctgaaagatgagcaggaccagggcgttataggcagagccctagccgagaaacctgctggcctctgcctgttttcatttcccactttggttgtgtggcattactttcagaattgcactttcctgcttgtcatgactttttgacacacttgccatgacgtgtgtttctgtgaacatgaagttctgcggtagtgcctccaggggcagaggaaaagaagaagtgttactgcattttgtacaaaataaatacagtcatatgtttaataaaacagttctattgtagtaacttgtaaaaattctcgtttttctttctgagcagtgtaatgaccactttatcatctgaggcagtgtaacatagtgaaacttggatttgaattctggctttcccactttttagttagaatcttgagcaggc

SEQ ID NO: 6137 - DNA, 1114 bp, Homo sapiens
gtgggtccattcatcaagggggagaccctcttcattagagtcctcatgaaattagccaaatgatgagtccttccctagctgggcatggtgggttctctttttttttttttttttttttttgttgttgttgttgagatggagtctcgctctgtcacccaggctggagtacagtggcatgatctcggctcactgcaacctccgcctcccaggttcaagcgattctcctacctcagcctcctgattagctgagattacaggcgcccaccaccacgcctggctaatttttgtatttttagtagagatggggtttcaccatgttgaccaggctgttctcaaactcctgacctcaggtgatctgctcaccttggcctcccaaagtgctgggattacaggcatgagccaccatgcctggccaggcactgtgggttctacaggatgggtctgtaatgtcacggtgagggctctctctagtagtagatctggagtgaggtgtgtcttgggttgaggaggtggcttgactttcgaatgtaaaactgactgtgccttagcatcaccctgtccagtgcccctggggcagctggtagtgtccagaagaatggacacctgctccagatttagatgcccatctgggcttttgtttgatttgcggcgttcctgtcttctgtaaagctagtgagttgtcccaagagactgatgccacagcttgttcgcagtttacacaaactcagctttaaaattccaaatagaatctgacttgcaaactctagctgcagcatgtggagcttctagatgtttactaccttgaatggttgtcagtgtcactgaaccacaggggagaggagtatggggtagagcaatggtctgggccaaggaatggtgagcttagggtcttcctctgactccttactcctcaaggaggcagttagggtccctcttaagcaggcttctatttcttaccactaaattggtttcctttttcatccagaagttagaactccccagatattcacactataggatctgaattccgagattctaaaatatcttaaaccacaagagagaaaatctagttctgcctcagccccagtcagcaggccatctgtcccttcctctc

SEQ ID NO: 6138 - DNA, 1165 bp, Homo sapiens
atcacaaaccatggagacctagtatcccttcaccaggctttagagcttgattttctctaagaactggaatgaggagccttccccttgagctccttttcactcctgaagggagctggagactggaaccaactgagaactttctctgtctgtctctctctgtgtctctgtctctatctctctctctttctctctttctctctctccctctctccctccctcccttcctctctccctccctctctgcctctctctctctctctctctctgtctttatccatggaatgctggcgagaacacaatcagaaccaacagctgcaatttttgctaagagtgagctgcagccccgtgttcatctccatacagaagcagggacagttggatagagagaacaatggactcactgcagctacagtgcttttaatttttctgtgttttgtttttgtttttttgttttcaaaaaatgaaaaagaaaaggaaattcctggggcagagttgcactcttagtccatgaccagattgagaattactgataacttgtggtgatcagataaatgcagcagacttttatgataacatctcttgcagtcttagagtctccttagcttagaatctcacttatttccagcgaatgtgtatgttatttttataggtaagggtctgatctttgacgcaggtttcccccactttctttttctagcaagaaggggtgtttaaagtcttgaaaatagtaattgaaatatctaaaatacctccctgtggcagtagcacctctatagctgctccagtggtctgctctctaggatgatacctttcctgttcttctatctcctagctggtgaactgtggggcactggacactgagtaacttaaactttggcatttcccatctagaagccttagtcttctttccagtcccttttccctttagtcaaatggcacaaccctaaaaactccttcagcttgactgtcattcagactgtatcacaggaggcttagcttccaaactggagagaaggaactaaagtgtcttatgaatttcagcttcttggctcttgagaccgaaaggttctacctattccccctgcagagaagcacccatttcccatcagatgctcgtccctgcagcttcttccttcttggtcatcataatgctaggttcttaccc

SEQ ID NO: 6139 - DNA, 1327 bp, Homo sapiens
tccaaaacttcccactcattctccttcccagtttttctaaatctaccaaatgcacccaacacttcttacgttccttttagccaggtagggattacgcgcatttttaaagacctccttaaaagtgaaggctgtagtaccgtcaggactgcctagcgctcacccagaagctgcttgtctccgaggcactaagaggggcgtggccatgggcgtggctcgccgggccggcggagtgggcggagcctaaaagcttccccgcccggtcagactcaacacatgcgcccagaggtttctagtggaacgaggtgtggattgtgaggtgactctggccgcttacttccggttcctagcgatgcgcatccgggtcacgctaacgccgcggtttcctccgctcgattggttctactgtgggtctggactgatctccatgtcctgttgtggggcttttacagcctttgggtgagtctcagctgccaacagggtctgagcgcagccgggcgagcacagcgtgaagggggatgggtctagagttctgcctcggtccttgtgggtgggagtctcttcgcctgtcccttgtcactgcagtgcttcactcacctcagccctttccttcacgctggcctcgccttattcacctcagcttagccttctcgcgcttccgtgcctctgtcgcctcgctgtttttcctcagcctcatcagtccttttccaacctcggtttcttgccttacgcctcagcgcttctctcagccactgcctctccttttttctcctcctcccttcttttagaacctcttttcccctacccctgatctgggatctcagcgttctttcacctagcgagacggcccagcttctcattgtgctcactcttcaccacgagaaactgagcctctccctagggtcctagttccttgtcccccaactttcttcagctttgatccttcctcctgggaccagtaggtgacagtgcttctcctggggttcttctgcctgtccttagctagaggagagctttgccaaagccccgaaatgggaagacttccccagcctgggggaagttttgccttaaggcgccgggttagactgaactctggtagcttccatagttagggtacaacaaaggcgttcctagttcttcgctttacctcagttttggggctctctcaagagcagctaacaggtggcaggcacacggtactgctagcagttgggctggcgcgatcttgttaattgacaagtcatgaagaagttctgtcagttttgtgttcccatgagaatggatgtgcacagctgaggcaaaaacgccaatattttgggacgttcagctc

SEQ ID NO: 6140 - DNA, 1218 bp, Homo sapiens
tgatttgggattatatgcacccctttccagagtccaaacccgttttggctttgtgtgtcatatcctattttgtgatgatggggattctgaccatttatacctcatataaggagaagagcatctttctcgtggcccacaggaaagatcctacaggaatggatcctgatgatatttggcagctgtcctccagtcttaaagggtttgatgacaaatacaccttgaagctgaccttcatcagtgggagaacaaagcagcagcgggaagccgagttcacaaagtccattgctaagttttttgaccacagtgggacactggtcatggatgcatatgagcctgaaatatccaggctccatgacagtcttgccatagaaagaaaaataaagtagccaattctaaaagtagccctctttctcctggatcttgctgaattagtggcttggggggtgggggagataaaaagaacttaaaatgggtaaagtaagaaatgttaaaaagtccctgttttgtcctgaaattttagtctattctggataaataggattttctgacacagatatgagaagttgtagctctgatgtctagctgtagtctccttgatctgctgattgcattattttaatttgcttttctgggaaagcagttttgctaaaagctgtacagactttttcttttgtacctagcagtactttatatagtatagctttgggccatgtagcattttaagactcaattttaaaaaattattaatctgttgctgactcttaattcctatttcaatatgtgtttccttgaagaattcaggatacaacttcttgtgtatgacagctttccttcacacactatttttgtgggtgtgtatatatctgatttgggaagaatttaaaaaacacatagctttttaatttgtttgaaacagactttctgcctgttacattttgtgcttttaaccaattaaagaagccaatggcattttagttttatattgtgtttcccactagtatatccctgttgatttgtttgtgccttttattaactgccattttctaaaatttttttcaataaaaggaaggaagatgtgaaaaaaaaaaagtcagatacagagtgtaaataaactacactgtagtgaattaaacttggctgcaaattactacactgtagtgaattaaacttggctgcaaattatttgacattcttcatattacaaagtggagtctatgt

SEQ ID NO: 6141 - DNA, 1418 bp, Homo sapiens
tgaactcctgacctcaggtgatctgcccgcctcggcctcccgaagtgctgggattataggtatgagccactgtgcctggccagctctattctactcttgggttattccagaggactgaagtgggctgggctacaggagggtgagtggatggcagaccaggtttaggcctttccactcattgactggtctcctcacctcaaacttcttttgtacttaggaaagtcgagatggtcgtgtggacagctggcgaaacttccaagccaatacgaaggggaagaaagagaagaaaaatcggaccttcctgagaccaccgaaagtaaaaatggagcaacgtgagtgaccgcccaaggtcacaggcacagaacctttcccctgctatctcccttcctgcttcgaaggactcattctttcctcccacttccaccccaacatagagtagtatttgctttttagtccattttgttttcaatacgatttaatatcgatcagagtaattcttttgtacattgaaatgaggggcttggtttaaaaaaagacctttccctctccctgcccctagaacaaccagtattagaaggtgccaccattggtgctgccttctcttcccacagcctgtaactcagtgttttgtacttcactgaattgtgatggttagaaacttcgtggatagtttgtggaaatcatccaattaaacatactgcttaaaacagtgttgctgtgacttcagagacaagcctggaaggggcaccttaggaagccccttcgcttcagttgctcgcttctgggtgtgctcccttcgaaggcccagataagacagggaacacttgtgagcacacagagcagcatctgatgccctgtggtgtttggcatgtgccccctgtctactgaccaatcagtgtggcatgaggcccacgccacccaaacctttcactttccaaagagctagccgtcctccacccagtaccatgtcctagcctgtctgcatttgttagtggtaatattctttatgtataataaatttttatacccaagccattgatgtacttttccttgtactctcccttgtgggtcccttgtctggcttggctgaaccccaaaatgctttggggttggacagacctggctgaaccttagtttcttcatctatgaaatgggaatatgaattactgcagcagcttttagggcagatttgccatggcatatacaaggtaactaccatagtgctccttgggtattgccaatatcctattatttctgtgtaaaatgaagatactgattgttttgaggattaaatgaagtaatatatgaaagcgtccagctcacagtctatgcttaaatgtcctgcttgctttcagggacagaatcagccctcaggaggggcccaaagtgagaaggggaaaggtgacacttgaaatgtg

SEQ ID NO: 6142 - DNA, 1181 bp, Homo sapiens
cattcatttctataggcaaagaaagctctagacagattggaataggaaatggatatttgccttttagctacacccctttgtctgtcttcctcattttgttcctttttttttccctaaaggggagtcaagttccctgggttgttcccctcataaggtattagggacttgtgtcacatctctctggagttttctattttaaagaggaatctgaaagcaataagctctttggtcttcttaagatggctacacctcaatttaagatggggtattctttcactagttgaggagtagaagaggatgaccagctagactcccatggaattggaactcctattccttgcttagacattacaggttatgctttgagatctctttggggtgaaggattgaaattaaaccctgagccaccgtgtccttgtagagcacagagtagagaacaactggcagctttgaaaaaacaccatgaagaagaaatcgttcatcataagaaggagattgagcgtctgcagaaagaaattgagcgccataagcagaagatcaaaatgctaaaacatgatgattaagtgcacaccgtgtgccatagaatggcacatgtcattgcccacttctgtgtagacatggttctggtttaactaatatttgtctgtgtgctactaacagattataataaattgtcatcagtgaactgtgtttgatgccttcttctatctggaagagatagacagacaccaatggactgctaaaatggattagaggcgtccctgcatccaggaacccacagacaatgcacagtgtgataagtgctatgaaacaacacgagttggggggataggtgtgacacagacaaagtacccctccccgtctaattagaggtgttcagagaaagcttcctgaaggataaatcccaatctgaagcataaagatcaggaggatcctggagatccgaaggagtcattgcttcaaaagatacaattaggccaggtgcggtggctcatgcctgtaatcccagcactttggaaggccaaggtgggtggatcacctgaggtcaggagttcaagaccagcctggacaacagtaaaaccccatctctattaaaaatacaaaaattagccaggtgtggtggcacgcacctgtagtcccagctactcaggaggctgaggcaggaaaaccacttgaacctg

SEQ ID NO: 6143 - DNA, 1275 bp, Homo sapiens
ccagacccttttgtgtcccatgcccaccctccccacgctgcagtgggcttgtgtgtgatgtgcagtcccgaagccacaccctcccttttcctcactggaatggacagttcattgcactgactctgggatctcagccctgctcctgggagctggaagagcacttggagatcctaagggaccacacccttcctccttcccctgcccacagaggcagagggcacaggaaagaagccgggccaagctcggaattaatgtgccacaagtgttgtggccttcctgaactgggaagtccctggctggcccccgggggagaggggcaaatgcctccgggactgacactccaggcagctttgccttctctcccctgtcatttccagatttcattacctcctacttgccattcacccatcaatgtgaaagtcagggtcacagctggtctgtgtgtccagttccctaaaagcctgttctgttgggcagcctgaggctgttgcccgaatcctagttcagttttttgacttcctttgccctttttcccttttctccatgcttaatggtgtgaggcgtcaggagagaggccaagtacataaaaaaaaaaaaagcagattatctctagagagtttgagcctttgctggtcacattgccttctgaagaggagggagtattagattataaatcctctttattttggtcctttatgcttgaggttccaacctggagccacagtgtgtgagaggaggaggagagggagaattctgttctcccagagctgcacctgcctcgcagaggccagcaccccactctcctgcctccagtggccctgccgcagatgtctcccaaaaagttgagcctttctagatggcttaggtggcaccatggctcagcaggaggggcgggaggcaccagggttcttgtttggaccctgcccctgggccatggccaggtgaccatggctacattgccaaacctctgactgccacagctgcagactgagagggtgggtctgagtccccacaatgtctgaagctgcccctgggattctcaggccaacctgccaacagcaagcggattttcttgcaagatcagggaccccatttctgcagccagtgtctcctgggtgccttctgaggactcccacccccatcccagtatctcatctgtcccctctcctggggcttaagtgggttgcttccaggcagaagcagccaaggaccgattccaggcactttctgtagcaaatgactgtgaattacgacttctcttgcccttcttctagc

SEQ ID NO: 6144 - DNA, 1207 bp, Homo sapiens
ctccttacataaggggtttgcaagagaacagggaaaagtgaaatctagagagaattacattctcctttaacaataccttaactagcaacttcaaggggaatttcctcccccaccccgcttttattcactaaatacctaaatttgtgatcctcaagaagggaagaggatgttaagtatcagatacctataggattttttccagctacacattccacttctttcacccaaggaattttgttgtggctctcctccagtagcctggcccttgtgtgaagaatcactaccacaatgagcatctcttagtgagcctttcttactgacatttcttaagtatggggaggttgggaggcattgagaatggtaacctataagctaatctataaattaattggtgaaattggccacaaattcatagatgtgttagctttttcagtttctcttgttactctctcttccctttttataccatacatgttattacacaggctcaactggaagccagcctaattctgaagcagagtctgttcctgagaatgtacccaaaccacctttacttcctcccaaaagacccttgtcctcttctcatgaagcaagtgaagggcaagcaaaggatgccacttcctctggcggcacggcaaggttcatcatctccacctccatcaccacagcacccgctgccaccactgctgccacaagccttgcaaagactgttaatctctctgtcaccccttccccagcacccaggactctgcctgctgctcctgccagcactaacactactgctaccccaagcctcactcatatggtccctgccaagcagccccctatccctccccctaaaccagctcacagaaatagcaaccctgtcattggtaagtaagtctttaggcttccagtgttttgggtttggtttgatgttggatggttattttatttgataactggtacaacattgatttggtctgtgagaattttccatatcttgtccctttgaatgacctcaatatggagaaaagtcttaggttaagaaaaaataggccaggtgcggtggctcacgcctgtaatcccagcactttgggaggccgaggtgggtggatcacaaggtcaggagattgagaccatcctggcaacatggtgaaaccccatctctactaaaaatacaaaaaattagccaggcgtggtggcacgtgcctgtagtcccagctac

SEQ ID NO: 6145 - DNA, 1134 bp, Homo sapiens
ttttggagatagggtctcactctgttacccatgctggagtgcagtggcacaatcttggctcagagcaacctctgcctcccaggctcaagcaatcctcccacttcagtctaagtagctgggactacaggcacgtgccaccaggcccagctaatttttgtgttttgttagagatgaggttttgccatattgcccaggctcgtcttgaacaccggggctcaaggaatctgcccatcttcgcctcccaaagttctgagatagcaggtgtgagtcatcatgcccagcctccttgaagtttactaacaattgggataactgagggaagagaagtgacaattccactcagtctattagaggtctggatataaggtagccacacaataactctaacttgacttctaaccattctatcttattgatttggaggctgtcttctgccagattttttgtggcttgagatgatattttcgaacccttctttcactacctttcttacccttaatgtgccaagcttgaaacaggatttgatttcctgagctacttgttcgccttctgtgcgtcaccaagtaatctggttcatctttcgtctcattcatgttattttcaagtgaaacaagacattttgggggtcaagtctctttgggtgttttgtttttatgtatataaaaatggattttgtgttccctttccatgtaagtaccaacttatatggaaactcacaatcataatgtaaagaagaaatgaaagcctggtgtattgtacttcaagatgcctccctgatgtatagaatctccttgtaaaataaataattgcattgtatatcagtcttcccatcaatattaattattaaatattttagaatttttaaataccaactatactattctggtgtgaggtattttcttttacattacactctatcccaaaagattaaatccagcttaaaaatgatatgtaagccaggtgtagtggctcacacctgtaatcccagcgctttgggaggacaaggcaggcggatcacctgaggtcaggactttgagaccagcctgaccgacagggagaaaccccatctctactaaaaatacaaaattagctaggcgtggtgacacatgcctgtaatcccagctactcgggagg

SEQ ID NO: 6146 - DNA, 1892 bp, Homo sapiens
gaacaagtgaccaccaaagcctgagtgggtgagggggatagccatggaggtcctgtagaagcctggagctggcagaggtgcttgacctgaggttatctgggaagacttcctcaggaagtggggcttgcactgtaccttgaaggttccattccttgtgaaaagcaaagaatgccattccaggcagaggaacatcagggcagtctcaaaggtggctggtcctgggaacagagggtggggtaggaccttgaatgccacgcctaggagcagcctttggcagtgtgtagggactgtgctctctggtttacagagttcttttttatccatcatctccttgggttctcccaacttccctgaactcccagagtctggtaccttgccaagctgctattggccaaggccacagtccacgcccatgtcccaggtttctcctgctacagaaaggtgggctggggatcctggagacagctgtacccatttctctctcttgcaggtcgtgttttcgcctggggcatgggcaccaactaccagctgggcacagggcaggatgaggacgcctggagccctgtggagatgatgggcaaacagctggagaaccgtgtggtcttatctgtgtccagcgggggccagcatacagtcttattagtcaaggacaaagaacagagctgatgaagcctctgagggcctggcttctgtcctgcacaacctccctcacagaacagggaagcagtgacagctgcagatggcagcgggcctctccccagccctgagcactgtgtcagttcctgccttttctcatcagcagaacagaatccttttcctcttttccttcctcctctttggaattttcctgggacctacagaataaagggggggatggacagggggttttcaaaaggaacatggctcactcagagctatatggttagacgtttctccccttttccctaccttccatggtcctggttggccctggctttgcctactagaaaaccaaaacttcccccctggggttttgtgcccactctctgagaagttggggctccatcaagccccattctagtcatgtgcccctttcctgtccctaacagtccacaggcaaacaaatggtacagtcataagagccatctgtcacggacccacgcccagaggaacgtgcagaaaaaagcagagctacatggctgtgggcaactataagccaaatatttggctcagaacaggtgtccatgggacaaaaaagaacgatcctccacttgaccaagaaaaaagtgattctcccagaagcacaaagcatactcttgcccctcaggtgttgcttgtgtacatcgtacccatccattcggcttcacctgcagccaacggcctggaatcgcaaagagacaccactctgggcagagcagagcagggtatggggtggggagagagggtggagggttttataaacaaacttaacagcaatattgaaaggaggtgggggattgagggagggacagagtgttggagggccagagactagtcctgagatggaaacagcaacttgtacagtggctgagaaaataggatatagttttgatttttttaattgtaaaatattttggagggagaacaaaatcttttaacattttgaataaatttagagttttataaaataggccacttgttttctacacattccctgctttttaagggagcacatattatgtgccaggcactgctgggaaagacagaataaactataaacctggtgttgaggctacaacttaagtgatgtcaagatgtcctgaggtgccaaccagctgtcagtgtgactgtaacaaaggcttcaaatctgtcaagaagtaaggaaaagttttgtttgaattttgtttgggtatttctgttttgggagtcactgg

SEQ ID NO: 6147 - DNA, 1244 bp, Homo sapiens
gggcgaggagtgaaactccgtctcaaaaaaaaagaaagaaatggaaagccaaggatgctgcagctgtgctttggggttcaaggtaatagcttaccttgttccacactttgtcaaagcactcaccctcctaagctaggaccagtccattcatttgaaactgtgcaatgtgatgtaaatggctctggttcttagactgtggctgtcacagggatggggctccaaggccatcattttcattgcatggctccaagagcagggagttcctcaatgaaaccagctgccttttttggtggggccatttttttggctttggaacccaaagcagccactcatttggtgcttcctcttgttctgccctccatccctcaactcttaatggcatctgtctcctagaacccacgctcttcagctttttggctgatttggagaacagtgacaggtgcctgcctgccttcgtccccttttagattcatttataccacagatgtttctgtgagatactgagatcataaaaagctttaggcttggcagagaggactcaacacccccaggctttcctgaggcaccaactagatgtctcttgagtgagctggactccctgggaaagaagcattgtctgcaacattatattataggaaatgtaccaggaatgtcaataataatgctttgggggggggggttattttgttttgttttgtttttaatgttgtttgtatatttagagctgggccattttccgtgctgcgatttcttctctttgaccctcttcagtgtttggggcaagagtggaccctggtttttatttctttgattgcattgtttactgcactaggaaaaatatagagatacagggaaactacagacaaatttaaggaaaaataggtcaaaaaagaaagcacacaccttaagagtgggaggaatatttttattaaaaacaaaacttggacctgtagtttttttttttcttttttatttttaagaaggcacctttcagaagccatgtttcttccaacagatgttggaaaccccatcgagcaagtaaaagttgcattctccatccctcagatggctgtatgtagtcaaagaaaccctgtaacatggtaaggttgctgttttttttttttttttctttttgagatggagtcttgctctgtagcccaggctggagtgcaatggtgtgatctcagctcactgcaacctccgcctccttggttcaagtgattctcctgcctcagcctcctgag

SEQ ID NO: 6148 - DNA, 1131 bp, Homo sapiens
aggaacgtcaaggtcgtgggaaataaaaggcagttctacacagactgcagcaacggttgcatctgcatatcctaagaggaaaaaatgaccttcaagagaattaggacttttttcttaatttcactgacttcagagacgattgcagacttgcagtttaagtattggaatttcacaaaagacataggacttaactggaaaatgaaaaaaaaaagaaaaagaaaaaactaaacaaaaaatccctctaggtagtttaggtgaaaaatgtcccttttattttggctttggttgtgatttcagagcataatgctatgtttttttgtctttttactatgtttttcggatttttaagtccgtaagtgcatacagttttctctaatttttaaaccctttcctcctcccattttgacatttgcacttggagaacacttgagttgtgaaggttttgggcatccaccccagaaagtgggaatttgattttatccttccgaactggaagaacatttttatgaagaatttttgtctaggagaatataacagtgttacccaaggttgtgtctttaagggtggttcattttctctgaccttttgttactcaaagtaaagtactaggagtcctaagaaatgttctgttcttgtacattatactgattaagtcaggattaatttgatttcaaagctgagaacagtggtaaaaactcgtttacagaaatgcattttggaagagaaaaatactgtaaaacgtgtcgtgaatgtttcttcagtttcttgttcagccaatgaggaaagggcattgcctttctttttaccattaatcacttctcaataaacgtgagatcctgttgagcatcacttctagtaccatttagtattatttgagtctgctgtgttttaaatatttggagtataagggggtataacaggtgagacggcaactaattttacagagtttgtgctaagagtaaacacttcaggcttgctttgtacccagggctggttaaccatgacctctgcaaaagcaaggtgggctgatattcataatgctttatatctggatactttgcagagaatgtagagtcattgctaaatcatttgttcaacagatattaagactattgggtgcctggcactatg

SEQ ID NO: 6149 - DNA, 1156 bp, Homo sapiens
ttcagattgataccctcaaaggacactaaaccacagtccttttttaaggaaggataaaactgtatttactgtatacagttctaggcattggatttaatatgtgatgtatttcactaaggtggcctccgtgggtactattttaagctactctctctgtgtgcatatctttagtgactcaaggcattaatattttattcaggatgtgtagataagatatttttgtaatttaatggaaagtctcatgtttaatgggtttgaattctgtttgttggcaattaaatacctaagtatattaattttttagggtttagggttttgccaacagtaatgtgttttgcttataagagccccccttttctatcttctttttaatagcaacatcatgacaacagagaagagtttagtgactgaggccgaaaattcacagcaccaacagaaggaagagggtgaggaagccataaactcaggccaacaagaacctcagcaggaggaatcttgtcaaacagcagctgaaggagataattggtgtgaacagaagctgaaagcttctaatggagacactcctacacatgaagacttgaccaagaacaaggagcggacatcagaaagcagaggactttcacgactattctcctcgtttctcaaaaggcccaaatctcaggtgtccgaggaagaaggcaaagaagtagagtcagataaagaaaaaggtgaaggaggtcagaaagagatagaatttggaaccagtcttgatgaagagatcattttaaaggccccaattgcagctcctgaaccggaactcaaaacagacccatctttggatcttcattcattaagcagtgcagaaacacaggtaaggatgtgtggatatgggaggtgggcaaaggaaggcaggttatacactttatttttcatttaagagtatttgggctgggcgcggtggctcatgcctgtaattccaccactttgggaggccgaggcaggcggatcaactgaggtcaggagttcgagaccagcctggccaacatggccaaaccctgtctctactaaaagtacaaaaattagccgggcctgatggcgggtgcctgtaatcccagctactcaggaggctgagacaggagaagttgaactcgggaggcggaggctgcagtgagctgag

SEQ ID NO: 6150 - DNA, 1567 bp, Homo sapiens
gtggaacgaagaggatggggaaaaggcagagggcactgagtgtccctttaaaaactaacccactgaatattccgtgtgatctagaacagtgtggcagctttcacagcacaggaccgttcatcgggggcctaaacgtttccctcagctctgtcaccaactcacttctctcggcttcgttgtctgtaaattggatgaaaagagctctaatgcctttcaggctcttagaagccatagatttggacaagcccagcaagatgggtgtccttccaggcctcttcccctttcctccatctctggcaacagttcttggggtttggcaattgtttggattttttttctttctgcagttgtgtgtatgtgtgtttgtgtgaagaaaaacagactctgtccaggtagaaatggtgaggagggggaagagaattacatttccagggtcagaaacttggcaacagttttcctagagtgactcagacacaccacagtaacaactctcgctgcaattttattttaatttgagaaataaagatttcctccaagccacatgaggactctggcacccacccacaaagcaagacctgtatttataagccgagggctcagggagcctaactgcgggacccgtcagggccccgtgacccatccccgtccccacccccccctccaccgctgggcccatcagtgtgtgttggggggatgcttggcagctgggggtgaggagacaacaaacctcgggaactggagccagagctgcggcctgactgacgccttttgatgctcacgggaaatttctgcccaggatctcagccccaggctggttgtttctacaaatctctctcaaatgtattattttggtgacaaaaatgaaggagctttgtaaattttttttaaaattatgaatcatatcaagtagttgtttacatttcttgaaaaaataggaactcgggcagcagaatcagattggcagaatctttagactacacaggcaataatcaagtctgctgttttggcctttcgtagtagaagtggttgtagtgtttagatatctgtttggtcttgcttcttgtattgcatttttttcaataaacaacaacaaaaagaactctctctgtgaggattgatccacttttaaatttctcttctaccagcaacttgggaaaaattaaatatgggtgggggagacctaaactcaagtcattttctaaagtaagttacccacattgaccaaaatgcagcttcaacgttgagtaaagggatttctgagagctggccaatgccttttgccagctgcagtgagattctgcagcataggccacgataaaggaaggagagaaggggcttctcagacttatttgcagaagggcccagaactcagtatgaaggcattggcagtagtgtagctctagagggatataccccagatggctgagggaagaaagggattgaggtggtaggagttcaaggctcagtccccgtcccagatggcagtggagagtctcatcccgtggtccatcttcccagaggccccacactccatcaccagtgccgccttggagggagcctgccccag

SEQ ID NO: 6151 - DNA, 1168 bp, Homo sapiens
atgacttgagtttaggtctcccccacccatatttaatttttcccaagttgctggtagaagagaaatttaaaagtggatcaatcctcacagagagagttctttttgttgttgtttattgaaaaaaatgcaatacaagaagcaagaccaaacagatatctaaacactacaaccacttctactacgaaaggccaaaacagcagacttgattattgcctgtgtagtctaaagattctgccaatctgattctgctgcccgagttcctattttttcaagaaatgtaaacaactacttgatatgattcataattttaaaaaaaatttacaaagctccttcatttttgtcaccaaaataatacatttgagagagatttgtagaaacaaccagcctggggctgagatcctgggcagaaatttcccgtgagcatcaaaaggcgtcagtcaggccgcagctctggctccagttcccgaggtttgttgtctcctcacccccagctgccaagcatccccccaacacacactgatgggcccagcggtggaggggggggtggggacggggatgggtcacggggccctgacgggtcccgcagttaggctccctgagccctcggcttataaatacaggtcttgctttgtgggtgggtgccagagtcctcatgtggcttggaggaaatctttatttctcaaattaaaataaaattgcagcgagagttgttactgtggtgtgtctgagtcactctaggaaaactgttgccaagtttctgaccctggaaatgtaattctcttccccctcctcaccatttctacctggacagagtctgtttttcttcacacaaacacacatacacacaactgcagaaagaaaaaaaatccaaacaattgccaaaccccaagaactgttgccagagatggaggaaaggggaagaggcctggaaggacacccatcttgctgggcttgtccaaatctatggcttctaagagcctgaaaggcattagagctcttttcatccaatttacagacaacgaagccgagagaagtgagttggtgacagagctgagggaaacgtttaggcccccgatgaacggtcctgtgctgtgaaagctgccacactgttctagatcacacggaatattcagtgggttagtttttaaagggacactcagtgccctct

SEQ ID NO: 6152 - DNA, 1159 bp, Homo sapiens
cggtccaagtctagatccaggtctgcttccagatcgccctcccgatctagatctaggtcccactcaaggtcctaactggctatggccacagctggaactacccgagaagtcttttgtacatgtttggtagccgtagcacaagtgattggagtagaacatgtcactgctgtacatttttaactcccctaatggtgtgtctataattgttaaatctaagtgcttcctctcagtaaagcctcctggcaccaggccttcctgctcgactgaaaaaaattttctctttgaaaatccccttttactcatggcccacagtagaatatccaaaacgccttggctttcaggcctggcctttcctacagggagctcagtaacctggacggctctaaggctggaatgaccacataggtaggtatggtgagttcaaccatttttgctcttgaattgatgcccttcgatgtatgccatttagtgaaagtgctaagtcttaagtttcctaccactttggtttcatatttttggacttaacaaagttgtgaatagcacagtcgaggaaaattgatacctgcagtaacccataggaaataaactgtagagttccatattctggtattgtgattatattgttttatattaaaaaagaaaagaaaagaattttttttaattttatttttccccgtcttgcaaagtatagtgacccctgtttccattaaatttgaataaagactatttttgcttgacaaaatttcatggtgtttgaattgaagttgtactttctgatatatcttgatatgtcttttcttagcataaaaagttcatgtgtaggccgggcacggtggctcacgcccgtaatcccaacagtttgtgaggcttaggcagacggatcacaatgtcaggagttcgagaccagcctgaccaacatggtgaaaccccgtctctactgaaaatacaaaaattagccaggcatggtggtacacgccagtaatcccagctactcaggagaatgaggcaggagaatcgcttgaaccccgaggggtggaggttacagtgagctgagatcacgccactgtactccagcctgggcgacagagcgagactccgtctcaaaaaaaaaaaaaaaaaaagttcatgtgtaatgactgttttgttccttgggatcacc

SEQ ID NO: 6153 - DNA, 1164 bp, Homo sapiens
cagcctcaacctccttgggctcagatgatcctcccacctcatcctactgggtagctgggaccacaggcgtgtgccactacacctgactaattttttcaatttttgtagagatagggtcttctgtgttgtcaaggctggtcttgaattcctgggatcaagcaatcctcccgcctcagcttgtcaaagtgctgggattacaggcatgagccaccacacttggccccaaaactttatttaaaggaacaatttaatgtgtatttattgtctctcccacccacctaatatggctggtgctttaaagaacctcagtacatgattgatgggtagatgaaaatatttaagagtaaactttattctgcggaatgctggcatttcttaaaggaaaaattcactcagatgattgcattagatattttagcaaaacatatcctaatgtagtcacacttttttttttcttcaggattatatgcgtcaggcaggagaagtgacttatgcagatgctcacaagggacgcaaaaatgaaggggtgattgaatttgtatcttattctgatatgaaaagagctttggaaaagttggatggaactgaagtcaatgggagaaaaatcagattagttgaagacaagccaggttccagacgacgccggtcctactccagaagccggagtcattcaaggtactgttgatgtcttttgtgtgttggagctcatcataaattcattagtgagcacatagataatttatttacattttcctgttgagttcttaataacatgattccatctggttcaataacttagaattttgaactgaacatttatttgtaaaactcttgaactcttaggtcatgagtacaaatagaagtcccttctcttagaaatcagaggccttgctcacgcctgtaatcccagcactttgggaggccaaggtgggcgcatcacaaggtcaggagttcaagaccagcctgaccaatatggtgaaaccccatctgtactaaaaatacaaaaatgctgggcgctgtggcgcatgtctgtaatcccagcactttgggaggccgaggtgggtggatcacctgatgtcaggagtcgagaccagcctggccaacatggcgaaatcttgtctctactaaaaataacaaaatttagttgggcgtggtgggtgccta

SEQ ID NO: 6154 - DNA, 1171 bp, Homo sapiens
caagacctgccagtcattatcatcatcattttgccagaggtgggggtttgggtcccatgaccccaggttggaattgcaggtcattcttgaccatactcagccctcatctctctgtctctcccaggtggtcctgccgtcctacgaggaagccctgtctttgccatcgaagaccccagaggggggcccagcaccacccccatactcagaggtgtgaccctcgccaggccccagccccagtgctgggaggggtggagctgcctcataatctgcttttttgctttggtggcccctgtggcctgggtgggccctcccgcccctccctggcaggacaatctgcttgtgtctccctcgctggcctgctcctcctgcagggcctgtgagctgctcacaactgggtcaacgctttaggctgagtcactcctcgggtctctccataattcagcccaacaatgcttggtttatttcaatcagctctgacacttgtttagacgattggccattctaaagttggtgagtttgtcaagcaactatcgacttgatcagttcagccaagcaactgacaaatcaaaaacccacttgtcagttcagtaaaataatttggtcaaacaacagtctattgcattgatttataaatagttgtcagttcacatagcaatttaatcaagtaatcattaattagttaccccctatatataaatatatgtaatcaatttcttcaaatagcttgcttacatgataatcaattagccaaccatgagtcatttagaatagtgataaatagaatacacagaatagtgatgaaattcaatttaaaaaatcacgttagcctccaaaccatttaattcaaatgaacccatcaactggatgccaactctggcgaatgtaggacctctgagtggctgtataattgttaattcaaatgaaattcatttaaacagttgacaaactgtcattcaacaattagctccaggaaataacagttatttcatcataaaacagtcccttcaaacacacaattgttctgctgaagagttgtcatcaacaatccaatgctcacctattcagttgctctgtggtcagtgtggctgcataacagtggattccatgaaaggagtcattttagtgatgagctgccagtccattcccaggccaggctgtcgctggccatcca

SEQ ID NO: 6155 - DNA, 1157 bp, Homo sapiens
caggctgccagcctcacacagatcttccccgaggaagaggggctgctgccatctgccccagactgtgcccttacgagctcatctcttgttcccctcatccctgccaccagtctggggcttcaggacctcatgtcagatggatgggaggaagaaagctcctgattggctggtggtggaagaaagggtggggcttgagatgagcctgagccctgacttggcacccacagtgctcactgagatctcctttttggggcagagaggcactcaggctggtttccaggacaaacatttggtaaacacagcccttgaaatcatctagacactgcaacctcttgctcgtatcccagggcctctctctagctgggtgagagggtgtcccttgtcaccagcctgttttgtcctggtctctctggggttgttgaatctctcctcttgcctgccaagtacacatgtacccagacttcatttctttctgcatcttcccccaagaaacagcttcctgagggtgctggggcagccactggtgaggaggggctgctctgatgtccctcctatgaggggactctgcacagacaccattgcccacactatcaccatattttcactcagtcacacacaagacaaaagcatgcaatgacaaaaccatacgcaatcctgaccgcccagccaatcaagacatatcacagaacacacgcgtccttccaagaatgtttatcctcatgcatcacttacacacccccagacacgtactgcaatgcaagtcactagtcatggtcacatgacagtgacagtgtggcctcctcctaccccaaatacacccacactctggcaccacacacattgtctccagctttcaggcttactggggagggtggaatcgagccagaacaatcagcccatattgggtccccctaagttgccccgtcatactcagtcccatgccatggtgcccacaccaaccatgcagccgccaaccccagccagtgtcagacacaatcccatgtggatgcacagtctcactccacatgacctgctctcaatgctggagggaaacaggcaggcccttgcctttctcggaaaaagtgtggggccacagcccttttagggcattgcatgcaggtgggcctggcttcacccctacctgcttcctccccacc

SEQ ID NO: 6156 - DNA, 1175 bp, Homo sapiens
cttcgagagacccgtggacctggagggctctggggatgatgactcctttcccgatgatgaactggatgacctctactcggggtcgggctcgggctgtaagtacccccctccctacctctgcctgggggcagtgaccagtctgtatccagcctcaactctgagaagcccacggggggcttgcttcagtgaggcagggggcattcactgcctgggtcaggcaagttcttcttgctctggatccccagaacaagaagggcagaacatccttctggggatagaacaagacctgggaggacctcagggcccagaatgtccaggtctccagggtcccacgtctgcatctttgtgtgtgctatgtggctttctctgcagaccttgcttggttccggtggtcccgtcaggtgcaataagctgtggccaatggtggggttagggcagtgatgacacagggcaggtgcttcaagtggtgcctgggatggccccgccctggggaaggggagccaggtcagctgggtctagcagaatctcgggagagaagggcaccgcgaaccccactctgccatgtagcaactgtgtgcccctcggtgctccccctccctgaatccctgtattttcacctgtggatggtgagaaatacgacttcttctcagtgcctctaggagggtttgggataggaagctggggtctggcacagaggaggagctctcaaaatggtagcaaaaagaaggcagctgagactgggcccagtgagggcacgggctggcatctgaggagatggtacggggtctgcacgccacagagctggctccccacagccctcgcctctggtctcccctccttagccaagtcctttgagcctctttcaaattaatctttgtaaaacccgtttatattgggtcacatctctattcgcaaagttccctggctcccctccctcctgcctggttccgagcccaggagctggctgtggcttctccctcccccatcccctactccccatctcatttcctcccaagttccttcactgtcccggctttgcgtcagccagattgctcaagcagttcccctgcctcaagggcttcttttcccttttaccctccgcctctgcctctgggggaagcccttagtgtaccacccctgccttgagcttgtggtaggggtgcctttggggtctg

SEQ ID NO: 6157 - DNA, 1595 bp, Homo sapiens
acacataacatgtactattttttttaattgactaattgccctgctgttttactggtgtataggatacttgtacataggtaaccaatgtacatgggaggccacatattttgttcactgttgtatctatatttcacatgtggaaactttcagggtggttggtttaacaaaaaaaaaaagctttaaaaaaaaaagaaaaaaaggaaaaggtttttagctcatttgcctggccggcaagttttgcaaatagctcttccccacctcctcattttagtaaaaaacaaacaaaaacaaaaaaacctgagaagtttgaattgtagttaaatgaccccaaactggcatttaacactgtttataaaaaatatatatatatatatatatatatataatgaaaaaggtttcagagttgctaaagcttcagtttgtgacattaagtttatgaaattctaaaaaatgccttttttggagactatattatgctgaagaaggctgttcgtgaggaggagatgcgagcacccagaacgtcttttgaggctgggcgggtgtgattgtttactgcctactggatttttttctattaacattgaaaggtaaaatctgattatttagcatgagaaaaaaaaatccaactctgcttttggtcttgcttctataaatatatagtgtatacttggtgtagactttgcatatatacaaatttgtagtattttcttgttttgatgtctaatctgtatctataatgtaccctagtagtcgaacatacttttgattgtacaattgtacatttgtatacctgtaatgtaaatgtggagaagtttgaatcaacataaacacgttttttggtaagaaaagagaattagccagccctgtgcattcagtgtatattctcaccttttatggtcgtagcatatagtgttgtatattgtaaattgtaatttcaaccagaagtaaatttttttcttttgaaggaataaatgttctttatacagcctagttaatgtttaaaaagaaaaaaatagcttggttttatttgtcatctagtctcaagtatagcgagattctttctaaatgttattcaagattgagttctcactagtgtttttttaatcctaaaaaagtaatgttttgattttgtgacagtcaaaaggacgtgcaaaagtctagccttgcccgagctttccttacaatcagagcccctctcaccttgtaaagtgtgaatcgcccttcccttttgtacagaagatgaactgtattttgcattttgtctacttgtaagtgaatgtaacatactgtcaattttccttgtttgaatatagaattgtaacactacacggtgtacatttccagagccttgtgtatatttccaatgaacttttttgcaagcacacttgtaaccatatgtgtataattaacaaacctgtgtatgcttatgcctgggcaactattttttgtaactcttgtgtagattgtctctaaacaatgtgtgatctttattttgaaaaatacagaactttggaatctgggtttgtgctttattttaacctctccccccaccccacccccagtgtagttccccaggacagccctttcctgctcat

SEQ ID NO: 6158 - DNA, 1101 bp, Homo sapiens
atccctctgggtctctgtttcataatcgttaaatgaaataagttgatttgttgatttcttgtttttagctttgatacattctctgcttataccactgattaaataattaggtatgcccttgttttttgttggacataaatatttccagtttttctctgttatagataggtgcagtgaaccatttgtatatgtgtttgagaaaaatgaatatttactgccataacactccctccccttttaaaaatgaatatgtatattctattgtctagtaataatatgttcctgttttgtaataatagagaagaacgttactacctgtcttaaaaattgtgtgttcattagtattcatataaaccgttatggtggtaaaagaaagacaggttttaattagatataaggacttaagtaacctgcagaactggctttcacatacattttatttctcttactgtttctcaaacaggatcaatatggaaattatgtaatccaacatgtactggagcacggtcgtcctgaggataaaagcaaaattgtagcagaaatccgaggcaatgtacttgtattgagtcagcacaaatttgcaaggtacgtgctttgagttacaaggactatttcccagaagagaggattagtagtattgaactataattatcttattttttaatgttgttgttgttgttgttgttttcaaagtatatatagcttaaaagtcaaatagttttattacaaagtataaactctgagaggtcccttagtgggcttcttactctgatagagtcagccactttgaaatctggggaatatgttactaaagaatgtgagtgttacactttgatgaactgaatattttattaacttgtttgtttggaattgtgaaatgttgtttattcagtttccctttttagcacctgaaagaaaggcagtttaccatatgcatatctatatataggccttagtattcttaggatctcttttccagtcttcatattgtgcaagctcaagaatgaaatgcagtagttattcccaggttgtgaaaggtgtcttaggtcacttataagtagcagaggttggagaaggaatcaatggcccttccatgtggat

SEQ ID NO: 6159 - DNA, 1100 bp, Homo sapiens
ctctcgattgaacccactgagaaaacaggctttcatatagaagtcttgtgtagtggggcagtaccccatttacaaatcttttttctgtatcccatttttctacttgaaccttttcaattgatgaaaggcattcttctagtccattttcttccaccttttccatagttcatgtggccgtcagagctttttaaccctcccttatcctataatatacgacaccataggaaggtaaatttggcatatgtttgatggtcatgttaacctgagccatgtcctctttattacttatctgcccctagtactgctacattaacagttaggctgtctctgctgacaaatttgcggtggtaaggagtctggatcaaagtgttaggaacaggtcactgggcttgttcttcgaagaacaggcctgttcttatctgcattgttttaattccattttagttgcaaactccaacactggcagtggctcccgccgtgactccctgactggcagcagtgacctttataagaggacatcgagcagcttgacccccattggacacagtttttataacggccttagcttttcctcctctcctggacccgtgggcatgcctctccctagtcagggaccaggacattcacagacaccacctccttccctctcttcacatggatcctcttcaagcttaaacctgggtaagaaccattactctaacaccaccttgaactctagaactctcttgccaccgatgacattacaagaactttgcataagcaaaggacagtccctttatactagaagtgtcctgggtgttctgtgccttccgtaaatacctcatgttattcaggctgtacctatagatagtatagcagttttggctttattatagtttgggtacattccctgtatattcagttagctttagtatgaacattttattctttggctacctgtgagagtatttcaatgtaaacaatataaacacaggttcatttcagtgaagctaggaaacacagagacagaatttaatcacctagtatcaccacctgaaataccaccacaattaatattttgccttatttcctttcaaaatttcccctctgctatatgtaca

SEQ ID NO: 6160 - DNA, 1130 bp, Homo sapiens
tccccaatccatacatcatcagcgctgctcccccagggacggacccctacacagctggattggctgcagcagcgacactaggtgagacattctgctgcatgagggattttctcacctgctgaaaagtcatttgagatgggcgtgcattctttatactctttcccaaatccatgtctccagtggagattatccagattttcaatgccatctacctgccagcttaatatctctccgtagctgtatcataggcccctcagacttgaaaatgttcaaaggcaaattaatcacatacgccttgcatatgtgtttttgatccatggagccaccagatactcatttatattttgggaatttccccccttgcccagatctcctaccacctctagtctatcatatagttcaggtacttttactggtctctaatgtatttataatttccttgcctctctcacctcctcttcccctctaaattgttcaagaaaatgatttcaaacttagatcttacctcttcatctttctgcttaaaccttttattgatttcccttttttctaccctagtatgtcatactacagttattaccaaacatggctgatcattacaacttacttggagtcggggtgggggtggtggtgttttgttccttggaatcagtatttttaaggagcttccagataattctgtgggttagctagggttgggacccacagtatatagggctctatcaccatgcctcatacatacaggtctctacatatgtaccacccaattcccttcctagttgactgccattggctaacaccatacattgtagcagtacagatctgattttagtttgctgcagatactgcattggtttaggcccctgtctttggtcactgtggtcttctgtagtaagctctttttcccattctttgcctgtgaagtgccctagttggctaattactgcactgtttttatttgcttgtgggatgtatacatgagttttttcccctctttttttttttctctttctttctctctctctcttttttttttttggagacaggatctcactctgttgccgaggatgggatgcagtggcgtgaatacagttcactgtaaccttgaattcctgggcccactggattct

SEQ ID NO: 6161 - DNA, 1312 bp, Homo sapiens
cgacatgtaaaaacttttttcattctgtttctttcctcacaaatatgccaggaagataaaaactttttagaatcactgagttgtggaatttcccccagaaaccaactttttccattgtctctgtatttaaagagtagatagagtagatgttgcattttgatgcattttgggatctgctttcatggatgctatagacagtgatttttccactttatttcagttttcctcaaacccggcccccttggtgaagggatgtaaattaatagcaattaatgtgaatttaaggggtgagttatatggaattgccggcaatagaagcatcaatttagaagatgtaaccctgtaagccctgtaaagtatctctggttattttatagaaatagttttaaatactgttgataatgagctatgttgaggacattgtccttaaacttgggttgctgtagtccctccccactgaaaataaggtttaatgccctttactttctctgtttagccgtacccctggtaattgccagaactctgctaatgaagtggatcttctgggtccaaaccagaatggttctgagggcttagcccagctgaccagcaccaatggtgccaagcctgtggaggatttctccaacatggagtcccagagtgtccccttggaccccatggaacatgtgggcatggagcctcttcagtttgattattcaggcacgcaggtacctgtggactcagcagcagcaactgtgggactttttgactacaattctcaacaacaggtactgtgtgtgtctctgtcaccctctctactctccctccagccagcacgttgttcaagtaattaagaatggggggatgggggaggtggtggcattgtttcaggctatccatagctagcccttgtgaacctgttagtgatgtaggtttacagagtcccctcatgaagctggtccctatgctgaggtcactggcaagaggccaccgtcctctgtatgtacttcctttggttcttctctctcctcagcagctggggagtggatgaggtagtattgcctcttgtaacacaaccctctcgggtgctaaattaatctctgaagatttatgtggttgtgatgctgttggtttgttttgtttttaaaatagtaaactctactatccaccgctgtcaggagtgtagtgccaggtcatcttaccagttgtgtcttacagttaaacaagttactccagatagcatagacaaggatctggcatctttcaaaagtattagaatgcgatcagaggaaaccacacacacaaatcattcaacttaaaatctaccatgaaa

SEQ ID NO: 6162 - DNA, 1080 bp, Homo sapiens
gtaagggaggaatttacatagtgcagtggagaagtatgaaattctttttacaggcttaataattttttttttctatgctattagctgtcatacctggggcttattaagagtcatgctattatacagagttaggtttgggagtagagaacttgaccaagagctgcaaagttatggctgggctttgggtaggaagaaaaaaaaggaaggaagaaaaaaaaggaaggaagaaaatgggttggtgggacattggatatagtaagactgttctgaactctgtaacataaatgtatgtctgtctccctcatttggcaagaccttctgcagtgttcctgcctctgtgttgtttgttaattagattgtaatgtgtgaaagggcacaacactatcctcttctgagtagcatctagtgtagtctggtgcccacaacggttgcccgttattattagttgatgacgattagtgaagctgaagctattttttaaacagggcccaagggatgcagacagtgatgaaaacgacaaaggtgaaaagaagaacaagggtacgtttgatggagataagctaggagatttgaaggaggagggtgatgtgatggacaagaccaatggtttaccagtgcagaatgggattgatgcagacgtcaaagattttaggtttgtatgttttacacttctgatttttgaatatgggctatgggattttgtttgttttgatttagttttactttgattttcgttttcttcccctcttcatgttttctttttaagaatccaatctagtgtaggctatgctacaaagattgtaaattaactggtgaggtggaattttctaaaaggtgtcaatgcctgaagcgttgccaaaatgatagattttgcatttgcatagaactttaaaatctgaagaaagattccagagaagactatttcagtgattctcagatattaaaatcacctaggatagatgccttggaacctttcttaagtttctcccaaattaccgtattagagagctatggttactaatggaatatgtcatatccctctggtggtttagagggaaaaacagttgagaacttgtgcat

SEQ ID NO: 6163 - DNA, 1105 bp, Homo sapiens
gagatattgggatacttcattatagggtttgcatccccctttcctgaggtttaccaaagagaaatagtggattgaatcaaatgcactccctaatttaacttaactgttcacaactggggaggagccatgatcttttgactcattaggtcacatagtcatcttgaaggcatcattgctcttcagaatgttggtcttattaaattaaaaagtatgagaaatagctaacataattctcatgatggaatttgctttttcattcatttggattttgtgtttttcatgttttgaaaatataagggaatgggaggggagaaagtaggggtcattgctgaaccctgatggttaaaggtaagtgaatgtttaatctcttagtcacttgatcattgctattgtctttgccaatgtctgaaagtaaacatagaataaattttcaattgtgtgtaatgtgtatgtaaaattcaagatgctgacttgaagatttttccttctctattctaaacaataggtgcgttccatggatgaactgaatcatgattttcaagcacttgctctggagggaagagcgatgggagaggtaagtgaactggtgtgtcagaaaagtgggtctgtttttaagggaaggttggagttgtctttcatcaaatgtgtccaaatctagtctccagaaatatgtgcttgcttttccttgttgccattctcatgataggaacgggatgctggagaattttgccaaaactatgtcattaaaagaagaatgttaaccataacctaatgtcttaaaagcaaaacaaagtagccaaaatgtgagcacaaattattgaatattaatgtcagctataaattgagacattttaagtttaagaagtattttaattttatatgcattaaataaaaggccaacctttacttcattttccagtggctaggttttcccccaacccaccccccccgccaatggcaaagggagtcttagattggctgctaatcagaaaatgtcagtaacctatttttagagtagtgcctttttttgaggaagttgtttagagctccattgtgaaagggaagttgttaggtttctagtggaggaattacagaaggtagagag

SEQ ID NO: 6164 - DNA, 1540 bp, Homo sapiens
tttaactcaattccctgagctagactgggattaaaattctcattttgcagtacattaaaactgaggcccagagatgtgatttgcttgaggccacacagctagatttttggtggaagtgggccttgaacacagtgtactttctgcagtttctgactgtaaaacccagtgtctgctctctgagttccatttccaagcccccctccatcttggacctatgtggtctccaccatattcacacaccaccaccaccacttgccaatgcctctcttaaagcaatatacccattcgttctcttattgggaactggatggatgaagccccaaattcagccccacccacagagaagccttcctacactcagcctctgtccacccttggcaaatctttcaagctctctcctccaggaaagtggggccccaactcagtcactccacccccttccaggtccctgaggctggttctactgtatccccatcacctccacaactccactcacccctgacggctccatccacctcaccagttggaaggcttgtggtttcagagaggagcaatgctggtcagcgctgcccagactccagtgtttacagatcaccagcatttacaaccaatccaatggccagaagcctcctctaacaagcccagaaggagttctgaaggggcagatgggggtgtgagtagtcggggagtcgggattgccagcaccctcacccttccttgggggcaagtagaggtgagaacactttccccacctccctccacagacactcctgaggacgctgcatcccacgcactgcctggtgcgtccatagagagaggatcaggtctcagcatttcatctgtgaaagaggcatggccctgggttagaaaggagggcaggagacatggaggaactggggggcacccagatggtgcagatggtttgcacacctgagcctgtctgtggtgaccattccgctcctctcccactaccctccaatctatcattccctactctctaaggccaaaatatcctgagcaaggctggcaaccccaccccaccatcccaaatgcaagcagccaggcccaggagttcctctggcccccacaggcatggagctcccagctggtgggtacagcttgagaggggggcagctccctcaggctaagctactgcccttcactgggccagccctgcctccagccctcacctctctcaccccaactctcccccaagcccctttctactcaacgggtgtagccactggtgctttgaagccttttgtttttataagatggtttttgcaaggggaccaggttctcttttcactgggaccttgcaaggaggggagtgctctcctggtttctgtgcaggcgggttgattaaagatggtgttttcttctctatcttcctgtcctgcccattgggtctatagaactttctaagtgagaagtccctgcatgagggcaggcaggaatgatttgatgttgatgttatcaaatattcctggggtggccaggcacggtggctcatgcctgtaatcccaacacttttgaaggc

SEQ ID NO: 6165 - DNA, 1237 bp, Homo sapiens
caaatcacagggcctggtgagctcatggtacaggcagtaggggaaatggaaatctctaggcattttatccctttgcctgctctggccaccccttgccctagaaggacaaaaattctgagattttcaggataaggattggttcctaagcctgttttttgggaggaggtgggcatgttccacagccccagcctgaaccagagatgtgggttttcaattacacaattaaatgcacaattaggcataattaccagtgctcagagcccgagactgctcataataggcgtgtaatctactgcagcctctgtttatactactcagcgcgctccctaatgatgccaggatgccttcacactgcactgttgccatggagacaagcccgccaccaccatgcaaagctgacaaatggtgttctggtcttgggcctttggattgtttctgaggcttctaacagccagcactggagtggaggggctggccagggggacaggaaggtggggcaaccctccctggactctgacacaccccactggttcaggccagcgttggagccaccagggaggacaggggagaggagcatcagccacctctcacccctagagtcctcaagccatgagcaggatggcccggggccatgaaaggtcttgtggttatccattcatacatctcacgctatcatggaatcaaaggtctggacagggggtcctgcctacaccaggttcaaagataggcctggctctgctgtgaactggctctgtgaccttggttgggcaagtccttggccctcttgggggctgtgcttccccgtatataaaatggactgcagggtctctgcacatggcatagtctaatagagaagatttactgagcacttatgacccacctcattctgctgtaactgctttacctggagtggctcattcatcctcatggcaccctgtggggtgggcacagctactacctctatttcaccgaagcagaatctgaggctgagagcagtcacatccagcagtggcagagctgcgcaaacccaggtcttgcccttaaccccaatgccacatagcttcacatgtgccacctgaggtcatcctcacaacagccctagaggtggaactttgtcacacccatttccgtttcctagatgaggactctgaggctcagagaactgaagtcacttggccaaagtcacgcaacgaggcagcggcagagcacagtctggctggtgccaacagccagggtt

SEQ ID NO: 6166 - DNA, 1561 bp, Homo sapiens
tctttttttctctttttagagatgagatcttgctatgttagccaggttgatcttgaactcctggcctcaagcattcctcccacctcggcttcccaaagtactaggattacaggtgtgagccactgcacctggccaattatgtgctatgattgttaaaagcaaatatacacatacagtgttgatttttaaaattttcttttcaggagaagaagaaaaagaaacatagagataggaagtcatctgactctgacagctcagactctgagagtgatacaggcaagagggcaaggcacacatcaaaagacagcaaggcagcaaagaagaagaaaaagaagaagaagcacaagaagaagcacaaggagtgagagtataaagagtgtagggggtggttgagagtaagaaaccaggagccttgtgccttgagactcctggaaagactcaatagtgagaatatagcctcccaccccattaacttcgctcccatgggagatggcttcccctcatgcaacaggcaggtttgggagttagaggtcaaaagcagctgcctgaatgagttgttgtttccttatcactcctggtccctttgcaagtgaaccctgcagctcacccattcattcacccaacttccttcattcagcaggaggtcctattaccctctccagctgccactgccagagctggattcctgtaaaggagtccaggctagagccacagagactgttgtggaggtgagttcggctgtagttagagtgattggacccttcctattggtctgtcctgggccaactggtgggtgatctctgctgcatccaacatgggagcagagactggcagcaggaggggggaacatggtgagaagtggtgctcacttttcccattcctcctaacatagttctactatgctagaagtggcatccagcggccacagctagaaaacagtctgcagtgtgacttaacttgtgtattgcattccagcagaccactgaaccagacagcgaagccaagatcattgttctactttgtatttactactgtgtgaatcagttgattctacttcaggtccttgcttaaattcctgtcactaaatggaaatgtgtttggttttaaacttactgagttatttttcctataatccttcttcctgggtaacttacagacttaaagtcactgagcctgcattagctgacaaaaacatttaatatgttaccttagaccttggagagatgcccagcagaggtacagagccaaaggcactagcagatcactgccttcttgggagatcacttataagccctcccttttgtaatgatcagatgccctcttccctcagagttgattagagaagcagtaagaatttgtagtcataagtactagcctggtgcacaggtcagcagtcctcttggccagtggtcattttctcccaccaccatggtacaagcctgggttctgtgccctgaacctgaattctggaaagggagagactacagcatttcacagagaacagccagacccaagagctttcagtgtaggatgggcctgaagtgacagttcaatagccaaa

SEQ ID NO: 6167 - DNA, 1225 bp, Homo sapiens
ccgctagactaagcttgcaatctgagctccattcaccccctcctatttcttgagaccttgtcagttcccctgtgagcctcggactcctcacttgtaaaacgaggacagatgcccgtgccagaagtcaaccagagctttccccggcgtgggcaccagcccaagggcgttttgcttttctagtctcatctctgctctgacgctaagctcaaagagggactgggggacgggaagatatccaccatggcatgcgccctagctctcgggctggtgttggctgcttccttctcagattccagagtgcctagaggccaggaaagggagaaggtcctaccagcctggggtagggactcgggggccaggcactggcgctgacgcaggctagcagggcgccactggctggtccccacccacctcggtgggttgggggatgggcgcaccagcccctcctgggtgagccctagcctggggcttcctatttcgggagccgggggcgtgggccacgtctcctcatgtgatgcgagggctatttaaagcggcagcccgggcagggagccgccgtcggagcccttgcacgcctgctctcttgtagcttctctcagcctagcccagcatcactatggtggacgctttcctgggcacctggaagctagtggacagcaagaatttcgatgactacatgaagtcactcggtgagcaagccgcggggctcaggatgttggcttggggactggctggtggcgtgcctagccccacgcagcactcctgccgcatccctcctggttaagactggggaataggggagcgcggagatggcagcctggcctagagcaggtggggcctgttcagagggggctttggtggtccaaatctggttagagaccacggtagggaggtggtggaaggaggcagctgtgtgggaggctctttccaggaagagggatatgtgatttggaggtaggaggagggtttggataaagaacactgatcacaggaaagggagtgtagccaggggagaaaaagaacaggggcatgggtagtttagaaattggaggagactgaacccagaaagggaatggggcagccagggagtgtacaatgatgtaaacaagtaggaaatacctaggaggaaaaagattagtggggaaaaaactgtggatcagtgaatcagatatgagaaggacgtaagacaggaacctgcagtaagcagcaatccccatctctgctt

SEQ ID NO: 6168 - DNA, 1151 bp, Homo sapiens
tgtggagctctcctacatcatcaatgtgagtggagatccatgcagagaccttgggtgcacctcaacctgggtggccagaggcctggctggtgggaagcactctgtccctgatggtgggctgaaccctggacctgtgtgggagctgctgtggcccccatggcatgggcagtggtggggtgtggtgagcttccctccctagactgcactcatgtcttttgctccccaggggaccacggatccccattgcgccagctgggactactccagagcgtgagttgggtggctcctctgggtgaggaagggagcagccctagggccctttgccagaaaggggtctcctgcctaaaaggcaagagggatttttggtgccatcctagcctaaggggtcaagaacgtatcctgggactccctgctgttgcctcgtggatgtggccttactgtggatttagcctgtccttgggcagtggccaggactgggggcagggccacgtagctggcctggggctcactgaatctctcccctacccaagagatgccagctcaggagactgggacactgaaaattgccagaccctggagacccaggcagctcacacccgctgccagtgccagcacctgtccacctttgctgtactagcccagccgcccaaggacctggtgagtggaacagaggtgcctgggctgaataagggaggaggccctgggcttccagcagccatcagtgatggtgttggcaggcgcctgggtgatcctgaatgtgcatctgcaggtgcgcttgtgggattgtacgtggatgtctgtgcccctgggattgtgctcacagcaatgatatttgcctgggggtatgcggcagtggccagttgtgtgtgtgtgtgtgcacatgtgtgtgtctggttgtgtgtagaagagtgcaggtgactgagcataaatatgtgtccacatagatacccgggtctgttctgtgcatacatgagtacaacagcaagaaggtgttgcccttctgcctgtgggtatgccagtctatggtagatgaggggacagggcacccctgcagctcccccctcccaggaacccatctgactgtctgcccatcttccccagaccctggagctggcgggctccccctcggtccccctggtgatcggctgtgc

SEQ ID NO: 6169 - DNA, 3422 bp, Homo sapiens
gcctggcctcacctgggactcttaagtgatctattcagggacaaaatcaggatggtagtgcacagacaggatcttgacattgatctggaataacgaatcatgctattttgttatccagaattctttgacaatttttgtcttgccctttccctttcaacccttcctttaaaaaaagaaaacgaaagtagaaactattctgatctttattaaatggttaatagactataatgacagtcagcaagaaaaatttttctattccttctaggagggcttagaaagttcatgttgcaacttagctctttaagaattgttgtagtatgggaaatatgctggttttcagctgtgtggaattagaaaggctttaggatgtaaataatgcatttcagtgaatcagacagctctttttttacatgataaagtttgccattcttgtattttcagaaaaagaaggggagcgttcaattccaaacagctgctttatttggagaaataccgacctaagatgcgattacgcttcagagataccaatgggcattgctgtgttcagtagaaggaaatgtaaacgaaggctgacttgattgtgccatttagagggaactcttggtacctggaaatgtgaatctggaatattacctgtgtcatcaaagtagtgatggattcagtactcctcaaccactctcctaatgattggaacaaaagcaaacaaaaaagaaatctctctataaaatgaataaaatgtttaagaaaagagaaagagaaaaggaattaattcagtgaaggatgattttgctcctagttttggagtttgaatttctgccaggattgaattattttgaaatctcctgtctttttaaactttttcaaaataggtctctaaggaaaaccagcagaacattagcctgtgcaaaaccatctgtttggggagcacactcttccattatgcttggcacatagatctccctgtggtgggattttttttttccctttttttgtgggggagggttggtggtatatttttcccctcttttttccttcctctcctacatctcccttttcccccgatccaagttgtagatggaatagaagcccttgttgctgtagatgtgcgtgcagtctggcagccttaagcccacctgggcacttttagataaaaaaaaaaaaaaaacaaaaaacaacaccaaaaaaacagcagtgatatatatatatatatatatatatatatatatatatatatatatatatatatatatatatatatataatataatatatatatatatatatatattttccaggtggtttttagtctttactgatgaaagggtgttcatgttagtttcttcaaaaccctatctaatactaggcaaagtagccaagagccttttgttttgtttttattttgataaattagtggagaaatggcattttaagaggagtctcttctcaacttacctgagagtcgaattcttctcttccctaaccaatgaagctaagtggttatcccagaaacttgtcttctaaaagggaggactccaggccatcaataaagatgtccaggcagtgagcgtactttttacaccctgtagaattgtgggctgtagcgttactctgattttctgtctagtatcagagaatgctggtagcttaaaatttttattttaggacttgtactctgaattttcaggaaccgtcaaaggagcagcagcaaattcacatattttcgacttgagaaatgcttgtggtatgtgttttccaaactgccccctatatgtaaagttcagtttaaccactgattgccttgttattactaggttttttgagattaaaaaaaaaaaatccctggtttaaaaccaacaatgatgcctagtgagtatgtgtccacaggccataacagggtagaagagagacatcgtgcaacccaatgagtagtgaagggactgtgttgcttgtgaagcggtgtagtagcatttttgcagattcttggctgggtttagtgtactgatctagaaaagctgtttttctgctcctttgtggaaggcagttatgatcaggctgcatggacaaagcaggtagaggggcaccatcaggggctcttgcactattttcacctctaaatattacgtactcagtagtgccctgcttctagggctctgaatacgggcttaaagtcatcttgtcctgctggaatttgctgtgcagagccataagcctcccattttgttagcgtcagctaggccaataggaacagaccgggaccttgtctcacactgatgatacctcacatgttgaccggctatgtgaactgcctatttcctatgctggagttttgatttttaactaaacgcaaatctgtagattctctcctctcccatcccagaaaacaaaacaaaataatgcttttcgaaattgtttctaggactttaaaacataatggtatatccaaaattctttatttcagaatgcaacaatagattccattaatatagactcaagatcaaaacagcatacctgctaagctaagatagatggtgttgattccactgggttttgatcaatacaataacaaacctttttcctttgacatactctgaattttgttgtttggggggagggggtgtgtgtgtgtgtgtgtgtgtgtgtgtgtgtatgtgtgtgtgtgtgtgtgcacgcgcagtgtccatcagtatcagtgcctgcctgagttaggaaaattacattcctggttctgtattgaggagaaggatgtataaagcaacatgaaacattagccctccttttattttaaagactaatgttaattgttcttaaaactggattttttttccttaaagcaatttttttcttttcgatttaatgaagtattgctagctgaagccagtttgacatagagagatgtcagattgatttgaaaggtgtgcagcctgatttaaaaccaaaccctgaacccttttaaagaacaataaaacatattttacacgctctttgtgcatttttttcctccatcctcaagagtttatgtctgtgcttataaagcggagtttaagctgggtgcagtggctcatgcctataatcccagcacttcggaaggccaaggcaggcggatcacttgagccccaggagttcaagaccagcctgggtaatgtgttgagtccatctctacaaaaaaaaaatgtttaataattagctgggcatggtggtgtgtgcttgcagtctcagctacttgggaggctgaggtgagaggaacacttgagcccaagaggttgaggctgtagtgagctgtgatcatgccactatactccagccttggtgacagacaccctgtcccaaaacaacaacaacaaaaccaaaatttcacttacatctgttcccctttctttgcctgctattttcaaggactgttttgggtcctgctagtttactgc

SEQ ID NO: 6170 - DNA, 1232 bp, Homo sapiens
catcagccaccacacctggctcaagtctctgattttttttttttttttttttttttgaggcagagttttgctcttgttgcccaggctggagtgcaatggtgccatcttggctcatcacaacctctacctcccgggttcaagcgattctcctgcctcagcttcctgagtagctgggattacaggcatgcaccaccacacctggctaattgtgtatttttagtagcgacggggtttctccatgttgatcaggctggtctcaaactcccgacctcaggtgatctgcctgcctcagcctcccaaagtgctaggattacaggcatcagccaccacacccggctcgagtctctgatttttaaaactcttcataatacccctttatccaattcttcatagatggtaataacgtataattggtgacatttcacatcgctttgggcttataaagaatgtattttgacttcaggcatttgtgtttactgtgccatcagcctctagttcattttacttattcttttcttctccaggtttttcgttggaatatacgttgcacatttatggcgattctgagtgtgagggcagacttctgccaggctcagcacagcattttcgctgacaagtgagcttggaggttctatgtgccataattaacattgccttgaagactcctggacaccgagactggcctcagaaatagttggctttttttttttttaattgcaagcatatttcttttaatgactccagtaaaattaagcatcaagtaaacaagtggaaagtgacctacacttttaacttgtctcactagtgcctaaatgtagtaaaggctgcttaagttttgtatgtagttggattttttggagtccgaaggtatccatctgcagaaattgaggcccaaattgaatttggattcaagtggattctaaatactttgcttatcttgaagagagaagcttcataaggaataaacaagttgaatagagaaaacactgattgataataggcattttagtggtctttttaatgttttctgctgtgaaacatttcaagatttattgatttttttttttcactttccccatcacactcacacgcacgctcacactttttatttgccataatgaaccgtccagcccctgtggagatctcctatgagaacatgcgttttctgataactcacaaccctaccaatgctactctcaacaagttcacagaggtaagattgtggcatggtc

SEQ ID NO: 6171 - DNA, 3624 bp, Homo sapiens
gtggtgacttccttccctttatcttttttcattcttcccggtcctctgccctgatctgtgtaactcttatcttgggtacttgagcagacggtatattccagaggtgggaggtgggaggggaagggagaaatccaaaacaaagtgttcttgctctgacagaatattaatcttgtacgcttggattgagttatttaatttttttttcttttgcacatttttcttgtattaagattgctcttcccaagagccacaagttcctggttttagtaaacccagctgcctgcattgcctgggactagaggctggggaggctaccatgaaacaaaggtccctccctccctctgactctttgcccagacctctttagtttgggggatcctcctcactctcctgaagtgtctcaagtataccagtgggagtgcaggggaggagcacaggccttcagatggggcttcccacgtgtagctactgatcccatatttcctactcaccttccaaatggtgcgacccaacttcatttgtttacttgaaaattccccctcgaggttgagagaacctctgaggtggctgtattttctcctaagcttgagatagggggctgtggtccttcctttctcctgaggagaaagtccttgctctggtgacctgtaagttgcagaggagggtggagtgagagtgtcatgtattgggatagtcagggatccctgcctttggcctttcttcttcttcttcttcctcttccatagttggatcatgtatattttacttctaaaggagagaatgtcaaaaagttctgtatttttttatattctatatattaggtaggtcaatcttaattggtctcaagaggaagaactgtctgtcatttcggtaagtaggatactgtgaggaagaccaaaaagagatatggatgcttcctcgctcaggaggcctgagcttggtccttttcctctctgcttggattctggaccaccacctgggaccaaccttcagctctggaaccttcataaagcaggtcagcgtggcctgattgtcccaggacctgaagggagcaaggatggcctcagggcctggtgaagtctgctactctgtccttactgctgaacatcctgcttgtatcaggaaactcagaagcagtttgccttgtcaaattcaatctcaatggccattgtccacataactgatcacccatggctgcctctcctattatctattatcactgaaacttagtagcctgctttttttttttttttttttagagctattgcgtatcttccctgtttgggatccttgtacctggtttgggttttcccttccttgtgacaattataatccagatgcctcttctttctgtttgaattacggtagtgcattgccttagtggcttgcctgtgcctctgggtggattacatatgatagtaaagcccacctgtttggatgggagtagaggaagttggtgtagaccagctgtggagctgaaggcacagtctgccccacccccacctccccactgtggttagtcagaggcatcctgctccaagctctgcttttccttcctctgaaacaatgccattcttgcttctattgctacacatctccttctggctcaggtgaaatccatgcccttctgcttatagacctaaagttcaggtacttattattggccattgatcttgaatttgccctctcctagtgctgcagtcccacttcaaagccattttctgaggaggatggtttaggtctggcaattgtccttgaaaaatcccacccatgttgtaccaccttggtgagtcatatgccactcatcagcttgggaatgatggctgccaactcccaatctcccaggaaggcagggggcagaatctttttttcacttggcctgctacctccattaaaaaaccattctcttacagtttaaaaaaaaaaaaaaaaaaaaagccttcccctacccaacctccgcccattgttctcttccaaagggcaatttagtaggatctactttgtacatctcaagtaagagttaagtccctgatacagggaccagtttcttagtgtaagacatacacatcctgcttgtccagctgttcctccaaaatctactttggcttcagctccgggtcctgtaccagatggaaaatgtttttggtgatctggctgctgcttaaagccagttttccctaagaactccaaaggctaaagtctactaggggcagagtgtgaggatagatttctaatcagagaaaagtggcctccaggagctttcatttatgtcttctccagaccaggttttcctgttatcttcctttaatcccctttcaaccaacaggtgaagttcttccagcccacagaggtagtaatatcatcttttctatctcctcctctcctttggccatgtaatgaagcaaaatattatttatttagcccaggcttgagagccactgtttgtggacagtcttcatctagattccataccctggcctaggcgaggtaaggctctctggttattgccaggatggagcccctctaccccagtctgctgtagggaataccctaattagttgaggcatgcttttggaatcctggcatgttggcatatggctggtctatcctttttaagatctctggttgggggtatctggatatggattaggagggacaaggagcctttttcttggctaatgttttccaatacttttttgaatggtgccagcccctccaggcatcccacccccaaatcatcatctttagtactaacagggtgtctggtcttagaagcctcccttcagatcccagctgaccctggtgactgcctggccttgatgttggctgcagccttctgatagaaccacatggattccacccacagctggccaggcttgttacatgggtcagggaatacaaatggcccccccccagggagcaggtgttggcctcagttttcagggacccttggtgttgctccttacctagagcccattaatctaccccatcaactctctgccatgaaagccatcttccaggagccctgttttttggagctgaactgcacagattatagctgctattgtacttaaataagggagaggaaaagaaggttctcaggcacagactttctatttttctcaagccaaaccagtttaaaatgtctagcagaatgaactgtatttccatttcttcatgtctacctgccttccccccacaccctaaagttgtacttgtttctagcaaactagaaggaaaagataggaaagcctggcactactaacctcacctctcatacacctctttgaaggccccagctcttttgttcaggcctctcttctcccctagactcactcagcttggtatccatcatcttgagcattcttcagtagattcatctagggttcagattccagactctcagctgaagacagggagccaatttcccccaggtccctgcaggtaatccagggaccccatagggagaacaggctgactggggcattaggaatgtttgtacctctctgcttccctggcagcctggggaagggtgcagggctcagtgcgctaaaccatggtaaacatcttcaatagaactaccctagaatttagtgagtgtgagactgagatattgctcagaat

SEQ ID NO: 6172 - DNA, 1881 bp, Homo sapiens
ttgaactattgactgggccccagaaatccataaaatggctgcagacagttgtttctgtgtcctgttctacccccactccagtacataactactatgtactgtgtagagccattctatatgctgaatgttctgctgttgcaaacttgccagggtattagccagtgtttgtgccaagcagttttctgggacaacagaatgactcagaccaagatggataggatggttagggctttgcttcttgctgtttttctttgaagctagttcattgtcctgcaggtcccttcatcttccatacctagcccactcttttagcccttaccttaaatctctcagataagttggttcacaaagaatgttaagtactgaatcatgtgtgactgagaccagagatggcaaatgaatggcacaccatttctccttctcctgccccagggcaggtaccactgatctgcatcagagttgcctgctattctctggtgtatccttcacatctaggtgccctcaagcagctgtgtgagtgttgagatctctgccatctctggctgagatactgctgtcctgtgaagtgtttcccatgacctttttcttcccctttgaatccctctgtctggagtagtccttgcctcttcctgctccagtagggccttttccctaccccagcccctgtgccaggctaagctggtacaagagctgccaacctcacagagtgtttgctaggcgagagaggtgcagggaagaggcagaggtatgcaccttcccccttgaagagaggggaaaggcctacagtggcccacataattgcctgactcacacttcagctacctcttaatgcctgtggagggactggagctgctggatcccagtgtggtggtgtaggaggccacagtgagcaggtggccccagctgggtttcccaggtcaggaatgtgggccccaggcaaggtgcagcctttgctcacagctccatccatgtctagaccttcaggccagtctgcagatgaggttccctacctttttcttctcttcattgaccaaatcaaccaatcactacagctgctctgcttctgctttccaaagtagcccaggtcctgggccagatgcaggggaggtgcctatccatgagtgaaggccagtgtcttcctcacctgggtgggtcccacacttgtgacctcagttttaggaccaagatctgtgttggtttcttagattgctagcttttcctccaggggaccacagcaggtgaagctcaagagcgcatggctctgctaatagtaaattgttttcagggccttgtccagctgagagcttcatgtccaccagattctgagaggtgtcagcagcactttttttttttatttgttgtttgttttccatgaggttatcggaccatgggctgagctcaggcactttctgtaggagactgttatttctgtaaagatggttatttaaccctcctccaccccatcacggtggccctgagggctgacccggaggccagtggagctgcctggtgtccacgggggagggccaaggcctgctgagctgattctccagctgctgccccagcctttccgccttgcacagcacagaggtggtcaccccagggacagccaggcacctgctcctcttgcccttcctgggggaagggagctgccttctgtccctgtaactgctttccttatggcccagcccggccactcagacttgtttgaagctgcactggcagcttttttgtctcctttgggtattcacaacagccagggacttgattttgatgtattttaaaccacattaaataaagagtctgttgccttacttgtttctctcctgacctgtgtattcctttgtttctggatctgatccattcagccccttccatcat

SEQ ID NO: 6173 - DNA, 1378 bp, Homo sapiens
tcccatcctgccctttcctctgcagctgttttgcttccttgtggccatcagagttcccttcccctggacagtctggagaaagacagaggctggggtttgggattgaagaccagaccccatctgagcccttcctccagccctgtaccagctcctactggcatggctgagctcagaccctcctgatttctgcctattatcccaggagcagttgctggcatggtgctcaccgtgataggaatttcactctgcatcacaagctcagtgagtaagacccaggggcaacagtctaccctttgagtgggccgaacccacttccagctctgctgcctccaggaagcccctgggccatgaagtgctggcagtgagcggatggacctagcacttcccctctctggccttagcttcctcctctcttatggggataacagctacctcatggatcacaataagagaacaagagtgaaagagttttgtaaccttcaagtgctgttcagctgcggggatttagcacaggagactctacgctcaccctcagcaacctttctgccccagcagctctcttcctgctaacatctcaggctcccagcccagccaccattactgtggcctgatctggactatcatggtggcaggttccatggactgcagaactccagctgcatggaaagggccagctgcagactttgagccagaaatgcaaacgggaggcctctgggactcagtcagagcgctttggctgaatgaggggtggaaccgagggaagaaggtgcgtcggagtggcagatgcaggaaatgagctgtctattagccttgcctgccccacccatgaggtaggcagaaatcctcactgccagcccctcttaaacaggtagagagctgtgagccccagccccacctgactccagcacacctggcgagtagtagctgtcaataaatctatggtaaacagacaagaggttagtaagtattcttttattgtgacaaaccctctcccaggcttagtcagctactcctttctctggccagagaatcccataaggaaatagcccccacagccagggctgctctgctcagaggaagggaaggctgggctgtgggtttaggagcaggagaacggggagggctgaggaggccgcagtgtaccctgtgagcccagcggaggtgctggctcctgaggaacaagctgctggaggctaaggacaaaaggtggccagagtagtggtccccagttgccctctggagctgctggctctcaagatggcagagctggggctgaggctgagatagcagccccagccccaggctggttttccagggacaaggcctcttccactatctgtgctgccctctgcaggaggtggaaggccatacagaatgg

SEQ ID NO: 6174 - DNA, 1197 bp, Homo sapiens
tttcaccatgttggacaggcttgtcttgaactcctgacctcaggtgatccgcctgcctcggcctcccaaagtgctaggattacaggcatgagtcaccacacccggcctggccattttcaagatgagaaaactgaagttcagaggagagaagcactgtatttgagatcatatagtgagacagtggcagagcaggcaccagaacccagacttccttactaccagctgctcccacttggataagacatcagagatactgtttttctggactggagctcaacttggccttttattctttggagccgttgggagtcccaggagagctggagctaacaaatgaggatgcctttacaagccgcctgactcctctgttgcttcccttcaggaagggaggagaatccaggagttggtctttttaccagctccctgctgtttcccaagaaataaacagaagagggcagaatcagccttgctacaggctgctgagggttcctggggcaaaataggaagccattgctcttactgggatgtgtactatcctgtggtttgacttttccagatcgtcaatgtatggtactctgtgaatggtgagaggctgggcacctacatgggccataccggagctgtgtggtgtgtggacgctgactgtatccttattttgggtctgagtccgtgttgctagggtctgtcagcgatggagaggctgagttgggagttgggagttgggggtgctgttgagggcctagagaacgatacctcctactccctggtctcttcactgactgaggaaacattcaggacaaattccagttctggataaggaggtaagaggggtagaaaggctctttggggctgaacagggagatgattcacttggcatcccaagaggacaagggctcgggtgaacttcgtcatatttcttaacaactcttcaggggacaccaagcatgtcctcactggctcagctgacaacagctgtcgtctctgggactgtgaaacaggtaagctgggttcattcacctttttagcaaatattgaggacctacagtgtacctgtttgagtaaacaggtcctaggaaaatagagatgaaatccatagatagtttccagtctagggaataagagacaagaaagatagatgagaaaatacacgccatggtagaggaagcatagattaagttttctttttttttttttttt

SEQ ID NO: 6175 - DNA, 1177 bp, Homo sapiens
cagaggacggggaatagattttaaacgtccttcagtgtgaggaggtaaagagttttgactttcctccaggcagtagggaatctttaaagggttatcaatggccagattttccttccaacagcttttgcagtttatgtttggagagtgaacctgaactagccaataggcataggatgtacattactggacagagtcaagggatatttaggggtgactgataggatagagggggtgaggaaaacacaaagtccatgctgtctcagctttcatttgggtgcttgggtttctggggagctgagattagtagggattgggcccattcagtgtcactcttcttccttccctagtctggagaggtgttggtgaatgttaaggagcactcccggcagatcaacgacatccagttatccagggacatgaccatgtttgtgaccgcgtccaaggacaacacagccaaggtgagcctgggcagcggtctggcagggctgctccctccctccggctgcacagctcaccctgcccgacttcccccaggaaagctctttacagatttcccccctgccttctctctccagctttttgactccacaactcttgaacatcagaagactttccggacagaacgtcctgtcaactcagctgccctctcccccaactatgaccatgtaagagaaccccacctgccttcctgctgaagcctcaggaagcttccaagttctagatgcttgtccagaagttgggctacaacattgtgggggaaatgatgtcaggcagagaggagatgcccagaggagtgacaaagctggaaggattgaatagccccagggcagccagcaggaggtggcagaagtgtctgatcatcccctacctttggtatcctcccattgagccgtgtgagatgttaaaaatgtatatggcagcagaaaaacacaaaatggacttggtgtccattggtcccatctagagtttcttcttccattcaggtggtcctgggcggtggtcaggaagccatggatgtaaccacaacctccaccaggattggcaagtttgaggccaggtaaagaagaagagagctcttccaaattaaaatctcatgtggtgtaccttttttgtttgtttttgtttttgagatggagtctcgctctgtcgcctaggctggagcgcagtggcgtgatct

SEQ ID NO: 6176 - DNA, 1190 bp, Homo sapiens
ggaaggagctgcctgtggccatctccctggcattggagcaccagcccctttgtcccaccactctgaggaaaggcacagggacagctggtccagcttacaaaggcctctttcagggaccagtctgtccagctctgcagttctaggcagagctaggagccccagcccccagtagtcacctaggatcctgtggaagtcactgtctgcacttttgccctgaggctctgggctgggtcatctcatgccagtctctgctctctccacagggtcaaggaggaggtcaagttggcctgaatggacctctccagctctggcttcctgctgagtccctcacgtttcttccccaacccctcagattttatattttctatttctctgtgtatttatataaaaatttattaaatataaatatccccagggacagaaaccaaggccccgagctcagggcagctgtgctgggtgagctcttccaggagccaccttgccacccattcttcccgttcttaactttgaaccataaagggtgccaggtctgggtgaaagggatacttttatgcaaccataagacaaactcctgaaatgccaagtgcctgcttagtagctttggaaaggtgcccttattgaacattctagaaggggtggctgggtcttcaaggatctcctgtttttttcaggctcctaaagtaacatcagccatttttagattggttctgttttcgtaccttcccactggcctcaagtgagccaagaaacactgcctgccctctgtctgtcttctcctaattctgcaggtggaggttgctagtctagtttcctttttgagatactattttcatttttgtgagcctctttgtaataaaatggtacatttctatatcctcctgagcttgtttcctatgtgtccctgggttggtttcaactctacttccctgccgttctggtgtccatgagtattggggcaaccccctgaacaagaaaaccccataaacttacctgcctgccttaactcctcccttgaggtttgaggtaaactactttccaccaatcttctcaccctacccccagaagaccactcattaaagcaccactaaagggacgacatttattccttttccaaatgttacagtaaaaccaggtggaagagaatggttttagcagttagaaaaaaaaaaaaagtacaaatctggggtttg

SEQ ID NO: 6177 - DNA, 1519 bp, Homo sapiens
atcgagccagcaccccctagccagggtgctgaggccaagggggaggtcccccccaaggagacccccaagaagaagaagaaattctctttcaagaagcctttcaaattgagcggcctgtccttcaagagaaatcggaaggagggtgggggtgattcttctgcctcctcacccacagaggaagagcaggagcagggggagatcggtgcctgcagcgacgagggcactgctcaggaagggaaggccgcagccacccctgagagccaggaaccccaggccaagggggcagaggctagtgcagcctcagaagaagaggcagggccccaggctacagagccatccactccctcggggccggagagtggccctacaccagccagcgctgagcagaatgagtagctaggtaggggcaggtgggtgatctctaagctgcaaaaactgtgctgtccttgtgaggtcactgcctggacctggtgccctggctgccttcctgtgcccagaaaggaaggggctattgcctcctcccagccacgttccctttcctcctctccctcctgtggattctcccatcagccatctggttctcctcttaaggccagttgaagatggtcccttacagcttcccaagttaggttagtgatgtgaaatgctcctgtccctggccctacctccttccctgtccccacccctgcataaggcagttgttggttttcttccccaattcttttccaagtaggttttgtttaccctactccccaaatccctgagccagaagtggggtgcttatactcccaaaccttgagtgtccagccttcccctgttgtttttagtctcttgtgctgtgcctagtggcacctgggctggggaggacactgccccgtctaggtttttataaatgtcttactcaagttcaaacctccagcctgtgaatcaactgtgtctcttttttgacttggtaagcaagtattaggctttggggtggggggaggtctgtaatgtgaaacaacttcttgtctttttttctcccactgttgtaaataacttttaatggccaaaccccagatttgtactttttttttttttctaactgctaaaaccattctcttccacctggttttactgtaacatttggaaaaggaataaatgtcgtccctttagtggtgctttaatgagtggtcttctgggggtagggtgagaagattggtggaaagtagtttacctcaaacctcaagggaggagttaaggcaggcaggtaagtttatggggttttcttgttcagggggttgccccaatactcatggacaccagaacggcagggaagtagagttgaaaccaacccagggacacataggaaacaagctcaggaggatatagaaatgtaccattttattacaaagaggctcacaaaaatgaaaatagtatctcaaaaaggaaactagactagcaacctccacctgcagaattaggagaagacagacagagggcaggcagtgtttcttggctcacttgaggccagtgggaa

SEQ ID NO: 6178 - DNA, 1275 bp, Homo sapiens
gagccctccgctccccggctggccatggcaggcaggcagggacgtgggtgggacctctgaccgctctccaggccggagcgggtgccgagcccagcgcaggggccctgcagcttctatgaccacatttctagagtataattcaggaccagccatctgacgagcctggtcgtgtgagcccttcgaagggttcaagcgggagactgccagcggctgcaggaccaaggcgttgggggccgctccaggctgcgggggcgcccaccggagaggtggagcggagaggatggaatgactgcccgtctccttcctccaggccccccgccccgccccgcccagctcgcgggaggactggcctcgctcctgcccacaccggactctacctgcccctgggattcgggtggggtggggggtacccgaccgccagcgtcgcctgctgcgcaagtggggcctgcgagccaaccccgcctccgcccctcgattgggcgcgcatttaaatgtccggccccgccccgagctccgggcgcttatatataggcagctcggcgggcggcgggcggcattctggcgcggagcggagcggcggcgggcgcagctagcgggtcggccgcggagcggaggtgcagctcggcttcccccggcacccctccccctcgggcgccagccccacccctccgccggccgggccgaccccgccgtactatcccctgcggcgcgagcccggggcggctccaagcgccccccagcagacccccatcatgggcagccagagctccaaggctccccggggcgacgtgaccgccgaggaggcagcaggcgcttcccccgcgaaggccaacggccaggtgggtacgcttggcccggccggccccagcccctcctctcgcacctcgccccttctagggcccggggccggggccggggccgcgcgctttgtccggcccgggacacgcggcgccccctcccccgcccggtccctttgttctcggcgccgcagcccccgcgggcgaagcgaggggaggggcggggagggggcgccggccgggccctgccgccttctttgttcgcggccccggtccccggcgctgccccccggccgccccgagtgccgcgcggggaacaaaggcgctgctgggccacgccaagggggcgcccaggggccgcggagctggggcccggcggggagcgcactccacccgccgacccgacctcggtggcccacggtctttttttttttaagggggagccgagatgcgggagagcctggggtgggtgggggcc

SEQ ID NO: 6179 - DNA, 1250 bp, Homo sapiens
gccactgccacctctgcttttggccacagtgccactcaggcagtggcctccattcacccaaagactaagtaacttgcccttgattacactggtcttttgtgtccagggccaagtatctgctcaggcctcctgagttctctgcttctcagagccatggcattatctgctcagcaggaggcaagttctccttaaaggactgaggctgacttggttcctgtaggcagccatcaccttgtggtgtctggtgttggttgggggaagtgtttcctttaggtctgaggtaatcagagcatcaggcccacccctcaggcagagggcagctctgcccctcagacacattccttaagactaggggttcactctcagtgggacctcagagtatggcctggggtaggggatgggaggtggctctgctcagcaagtggaggttaggtctgggcctgactcaggagtaactatgtgtttgtgatttccattaccccctcccatttgcagctggaagatgtagagtgggaggactgggagtgagggagccagagggagcagctcccccacccatggcatctctcgcctccctcgctcgtctcagcccagccctggaagactgagaatgttcccccaaatctcctctgccaaccagagctctgggcacagattctggtggctccctgctggccctcttgggcctctgctcacacctgggaaggggctctctaaatcccggccagaaactctgacttgtgccaacaataggatgacccaagggagaggaaacctatcctcctcaccagaagagcctgtgtttttctgctgaacacccactgttcctgaggactcctgctgggaagtcccaagggatagttctagcccttctgcctgtgtagacagaagctaaaccaccagtctctctcggaggaagctgagacaacatactctgtccatacataagcaggcagggagggccatgccacctacccttggctaaacagggacagtgaacacattttggttcctatcccagtgggtaagaggcacttatctctgggaaatttgcctctcttgggactctccccctcccaggcattttccattcctggaaaggctcctttggggttcagaatccagagaccaaaccctgacccacctccttcctttcctccagcccacgctggtctgtccccatgccttcccagggcttcttcatgtcggatgcacccaagtccttagcccagctgtgccacctgcaggag

SEQ ID NO: 6180 - DNA, 1115 bp, Homo sapiens
tcttttttatggctgtgtagtattctatggtgtatgtgtgtcacattttctttatccagtctaccattgatgggcatgtggattgattctatgtctttgctattgtgaatagtgctgcagtgaacatacccatggatgtgtctttatgtgatttaacccattttataaatgaaaaactgatgtccagacaggccagacaatttctatacacccaggtggaaacaaagccaggattagagttccatgtcccaactccattgtgcatgtgttgcctctcatttttcttggatccctgtatattctcctaatttgataactaattgtttcatgtgagtttttcattttcaaaatactaaaatttttactttctgctgattgttgctagagttaatgattatgatttcaatatcctattttccttttttttttttttttctctaaccccaactttagggaacagaagtcaaagcaataacatattcagcaatgcaggtctataatgaagagaacccggaagtttttgtgatcattgacatttaagacaccaaaaaataaaagactcctacgaagaactgtttttgttttcctcttccttttgagaagacactatgaattaaattctacagcttttttttgatatatggaaatttgtagaacagaaatattttagttaaagtgtgactttcagaaagggaaaatcagggcacagccttggtctgtgttccccaaatattcacactttaaagaattcttcaaccccccaagggacagttatggtcctttgattctctgctgtggcagtaggtgtgcctcatgcccttccagtgcaatgcaagccctccagcctcaccccagagaggatcactgatgtcagcagcagcctgaggctgaatccaggttgaaagaagaataacttgaaaaaatatatttccacacacagaattttgtttttcttccaagttggttaagacatatattttgtttcttttttttttttttttttgagacggagtctcgctctgtagcccaggctgaagcgcagtggtgtgagctcggcttactgcaagctccacctcccgggttcacgccattctcctacctcagcctcccgagta

SEQ ID NO: 6181 - DNA, 1134 bp, Homo sapiens
atttttcttcattttgcctccatgaaaaaataatgcttttttacatagaacaaaatactggtgctgtttaagcattatctatttgatcataacggttcctatatcatttataaatgttaagagctttagacatcttgaccaaaattccattatgctcagtaggcccagagagccagtggactgggtagtcttgatgtgtctgtcactttgcagatccttctggagagtgcaacccagacttgcgtctccgtggacatcagaaggaaggctatgggctttcttggaacccaaatctcagtgggcacttacttagtgcttcagatgaccatgtgtgtatccttcccattttgaagcaaatctgggctagttaccagttggtttcttttttggggtgtgtggggaggtgagaatcttccttttatataatggttaattttacatttaagaccatctgcctgtgggacatcagtgccgttccaaaggagggaaaagtggtagatgcgaagaccatctttacagggcatacggcagtagtagaagatgtttcctggcatctactccatgagtctctgtttgggtcagttgctgatgatcagaaacttatgatgtgagtagaatccattcagagtttctaaatatcttgtctaagttttatgtttagtcaccatttcaaggtttttttcctttgtttttttttcactgaagttgggatactcgttcaaacaatacttccaaaccaagccactcagttgatgctcacactgctgaagtgaactgcctttctttcaatccttatagtgagttcattcttgccacaggatcagctgacaaggtcagtttcgtttattttaatagaaaacataatttctctaggtttttttgaattgcagagatattttacttacagtattttttttttcttaaaaaattgattactcttgcttttctttttgtacatagactgttgccttgtgggatctgagaaatctgaaacttaagttgcattcctttgagtcacataaggatgaaatattccaggtaagagaaactaatgctactattttgtttgttttaagaaaaacctgctgggcgcggtcgctcacgcctgtaatcccagcactttgggaggctgaa

SEQ ID NO: 6182 - DNA, 1155 bp, Homo sapiens
tcccaaatctggaaagtcagggcggcgtcggcgggagcggcggagcactgtgctgggactcccgcagcatgtgcagaaggagcttggtgaggcctgggttaggagggcagtggtggggtgggtggggagccttggtcatcccctctctgctgaccccacctcctccctgtcccttccaggcctgaggaatgagcgtgaggcaccaggcacgccccgggctcctggtgcacgggatgccgtacgcatccccacagtggacggccgcccccgaggcacctcagggatgggggcccgggtgtccctgcaggcgctggaggcggaggcggaggctggcgctgagacagaggccatgctgcagcgccacattgaccgtgtctaccgggatgacacctttgttggccggtccacgggtacccgggccccaccattgacccggcccatgtccctagcagtgcctggattgacaggaggggcagggcctgcagagcccctgagcccggccatgtccatctccccccaggccacctacctgtcgaagttgattccacatgctgtgctgccgcctacagtggacgtggtggccctaggccgctgcagcctgcgcacactaagccgctgcagcctgcactcggccagcccagcctcagtccgctcgctggggcgcttctcctccgtctccagcccacagccccgcagccgccacccatcctcctccagtgacacctggagccactctcaatcctccgacaccattgtgtctgacggttccaccctctcctctaagggtggctctgagggccagccggagagctctacggctagcaatagcgtggtaccccctccccagggaggcagtgggaggggctctcccagtgggggcagcactgctgaggcctcagacacactcagcattcggagcagtgggcagttgtctggccggagtgtgtccctgcgtaagctgaagcggcctccaccccctccccgccggacccactccctccatcagcggggcttagcagtgcctgatgggccattagggttgccccctaagcctgagcgtaagcagcagccccagctgcctcggccacccaccactggtggctcagaaggggcgggggcagcaccctgtccacccaacccagccaacagctgggt

SEQ ID NO: 6183 - DNA, 1175 bp, Homo sapiens
ctgtggccagccctgagcctgcaggcccttcaggctccccagagcttgtcagctccccggctgcttcgtcctcctcagctactgctttgcagattcagcccccgggtagcccagaccctcctccagctccgccagccccagctcctgctagttccgccccagggcatgtggccaagctccctcagaaggaaccggtgggctgtagcaagggtggtgggcctcccagggaggacgtaggtgcgcccctggtcacgccctcgctcctgcagatggtgcggctgcgctccgtgggtgctccaggaggggctcccaccccagcactggggccatcggccccccagaaaccactgcgaagggccctgtcagggcgggccagcccagtgcctgccccctcctcagggctccatgctgcggtccgactcaaggcctgcagcctggccgccagtgaaggcctctcaagtgctcagcccaacggaccgcctgaggcagagccacggcctccccagtcccctgcctcaacggccagtttcatcttctccaagggctctaggaagctgcagctggagcggcccgtgtcccctgagacccaggctgacctccagcggaatctggtggcagaactccggagcatctcagagcagcggccaccccaggccccaaagaagtcacctaaggctcccccacctgtggcccgcaagccgtctgtgggagtccccccacccgcctcccccagttaccctcgagctgagccccttactgctcctcccaccaatgggctccctcacacccaggacaggactaagagggagctggcggagaatggaggtgtcctgcagctggtgggcccagaggagaagatgggcctcccgggctcaggtacagtgggcagtgctagggtgaggtcccattgctgatgatgggaagtaggaatctgaagtcccgccatgggggatttgttcttggatctttaacttttctggtctgagaatgcctgggaagggcaagctgtcacccttgctggggcccagaggagaatggtgtgtgagtgtcaggcctactgtgtttgaattccaactttgcctctttccctacccttcctagctacattgtaaagtgtggggcagtgacacctacattatagtgtctgaacatgtgtagggtgtccagcccagtgc

SEQ ID NO: 6184 - DNA, 1871 bp, Homo sapiens
gcttgggaccagtctgtgccctcctgcccagtccagtttactcctcttggttcctgaaggtggccaagtcattgtgttcccacaggcttctctaggctgggggcaggtgtggggctgtggaattccaaagcacaaaaggtgcagaggggattggccttcctgtgcctcaactcaccaaccaccctcctgccttccagttctgccaggtgctccatgctggggacaagtaggagactgccagggcccaaagaaatgggtgagcagtagagtcatctcggggcacttggcagtgtcaagcacctgccccttgcctccttgaccacactggggtgggtgggcccccagcacttcagaggcaggagcctttgggctgagcaagcactgaggaggtggatggaagggagcatctggagggggggagcttccttgagcagtgggcccaggcctggccctccacacttcattctctgacctttctctctcctcatttcggtgcatgtcctttctgcagctgcctttcagcacaggtggttccactgggggcagctaacgctgagtgacaaggatgggaagccacaggtgcattttactcaagtcttctctagtcaatgaggggcacccagtgcttctagggcaggctgggtggtggtcccctaggtatcagcctctcttactgtactctccgggaatgttaacctttctattttcagcctgtgccacctgtctaggcaagctggcttccccattggcccctgtgggtccacagcagcgtggctgccccccagggccaccgcttctttcttgatcctctttccttaacagtgacttgggcttgagtctggcaaggaaccttgcttttagcttcaccaccaaggagagaggttgacatgacctccccgccccctcaccaaggctgggaacagaggggatgtggtgagagccaggttcctctggccctctccagggtgttttccactagtcactactgtcttctccttgtagctaatcaatcaatattcttcccttgcctgtgggcagtggagagtgctgctgggtgtacgctgcacctgcccactgagttggggaaagaggataatcagtgagcactgttctgctcagagctcctgatctaccccaccccctaggatccaggactgggtcaaagctgcatgaaaccaggccctggcagcaacctgggaatggctggaggtgggagagaacctgacttctctttccctctccctcctccaacattactggaactctatcctgttaggatcttctgagcttgtttccctgctgggtgggacagaggacaaaggagaagggagggtctagaagaggcagcccttctttgtcctctggggtaaatgagcttgacctagagtaaatggagagaccaaaagcctctgatttttaatttccataaaatgttagaagtatatatatacatatatatatttctttaaatttttgagtctttgatatgtctaaaaatccattccctctgccctgaagcctgagtgagacacatgaagaaaactgtgtttcatttaaagatgttaattaaatgattgaaacttggctgtggctactgcttcttaatgtgggggggacagggcagtggtctgggcccacatttagaagggaaaatgttttgcctgctgcacacattggacccaagtatgggcctcttctgcctagtactgccaaagggactgttaaggtgtcttgtccatcttctaccccccaccccccattacagggtaaaggaaccccagactaggtgaggggccagcagctgcctcacacttgtgttctctcctgagatggtccagctcacatccagacacccttgttcagacatttta

SEQ ID NO: 6185 - DNA, 1835 bp, Homo sapiens
aacttacttgagtcaaaagatgaatgtgaaagcttttgacaaacatttcttagaaaagctgagccagcttaccttaccctactggtatataagagagttttcaggctgggcgcagtggctcacgcctgtaatcccaacactttgggaggccgaggcaggcggatcacttgaggtcaggagttcaagaccagcctgaccaacatggagaaaccccgtgtctactaaaagtacaaaattagtcgggcgtggtggtgcatgcctgtagtcccagctactcggaaggctcaggcaggagaatcgcttgaacctgggaggcagaggttgcggtgagccaagatcacgccattgcactccagcctgggcaacaagagcaaaactctgccccccctccaaaaaagggggggttttcttgcagtcccaccaccatcattaaaatctctcttatctgtcttgtccaggctgacttcaaaatttctgaggagtgcatcgcacagtggaagcaaaccaacttcatgaccaagctgggctccatttcctgtaaatcgctgaaaggggggaacattagctagccagcccagcatcttccccccttcttccaccactgagtcatctgctgtctcttcagtctgctccatccatcacccatttacccatctctcaggacacggaagcagcgggtttggactctttattcggtgcagaactcggcaaggggcagcttaccctccccagaacccaggatcatcctgtctggctgcagtgagagaccaacccctaacaagggctgggccacagcagggagtccagccctaccttcttcccttggcagctggagaaatctggtttcaatataactcatttaaaaatttatgccacagtccttataattggaaaaatactggtgcccaggttttcttggagttatccaagcagctgcgcccctagctgggatctggtacctggactaggctaattacagcttctccccaacaggaaactgtgggatttgaaaaggaaagggaagggaaaacagagaacctagtggtctaccaagtggttggcaactttcccaatgtctgcttactctgaggcttggcactgggggccagggcctgccccagggctcctggaatttcccttgatccagctaggctgggacactccctaaatcagctgcgtgttgttagcatcaggcagaatgaatggcagagagtgattctgtcttcatagagggtggggtacttctccataaggcatctcagtcaaatccccatcactgtcataaattcaaataaaatgtctgaacaagggtgtctggatgtgagctggaccatctcaggagagaacacaagtgtgaggcagctgctggcccctcacctagtctggggttcctttaccctgtaatggggggtggggggtagaagatggacaagacaccttaacagtccctttggcagtactaggcagaagaggcccatacttgggtccaatgtgtgcagcaggcaaaacattttcccttctaaatgtgggcccagaccactgccctgtcccccccacattaagaagcagtagccacagccaagtttcaatcatttaattaacatctttaaatgaaacacagttttcttcatgtgtctcactcaggcttcagggcagagggaatggatttttagacatatcaaagactcaaaaatttaaagaaatatatatatgtatatatatacttctaacattttatggaaattaaaaatcagaggcttttggtctctccatttactctaggtcaagctcatttaccccagaggacaaagaagggctgcctcttctagaccctc

SEQ ID NO: 6186 - DNA, 1142 bp, Homo sapiens
ggtctgatagactcacctgatccctatcggcttgcctggactagctacaggccttatcttggatgggccactttgcccccttcagaaagtggtggagggaagacttcctttttcccagagacagaaggttatgcacccagtggcctgggaccattgttctgggctttttttcccttcgacatggatttgcttctcactgtgtaccccaaccaccaaaaccaccctgagatcaatgctggtgctcctgcatcagatggcttagagatccttccacctcttaacacaagcatctaggtccactttactcaaatctggcctcagttgagagcagagtataccatcagagcccattctcctgtctgctgtctgggacgtggaaagaaagttagctctagggggtctttccaggggcctctgtaaggagtggatgctcctttccggaatccaagagttcaccaggctgcttctctaatggacgatgatcctcttcctcctgacgtctctccctggcagcacccagatgcagacagcctgtatgtagagaagattgacgtgggggaagctgaaccacggactgtggtgagcggcctggtacagttcgtgcccaaggaggaactgcaggacaggctggtagtggtgctgtgcaacctgaaaccccagaagatgagaggagtcgagtcccaaggcatgcttctgtgtgcttctatgtgagtgaggacttggagtggggcacaggacctggggaggccaggaagagtagggaatcagcccatatgatgtccttccacacaccaggtggaagctctgagaacacgtgcctcttccttgctgatgccaaaagttgatgcatgaaggacttatcgtacaagtactgttaatgaagcattttacctacagttaattttgttaaaatagaaatggagggctcaaaccagtacatacccaagtcttactactagtaaggagtggagcagggattcaaatcccagttttgatgtctataaagtcctcgctacgttattttatacttcctcccctagaaacacagattttggtatcttgacacacaattttggtatagcctgggttaatgtaaccctggtgatatgcagggatgtagcaagataagaggacctcctggg

SEQ ID NO: 6187 - DNA, 1740 bp, Homo sapiens
gaacagttctcttggtaatagacatttaggttgcctccaggatttggctactttgaacatccatgtatatatatatgaagttctagaagtgaaattgctgggtcaaatggtgtagtcaaattactcttcacaaaatatcgtactgacttaacgcttttactgatagtgtgtgaatgctcgtttctccacatcctcaccaatccagattatcatggcatcttaattatcaccattttgataggcaaaagtatctcattgttctaacgtgtatttccatgtttctggtaaggttaaatatcttaaaattatttcttatgctacaagtcacagtgcaaagattttgaaatactagaacattacccacatatagtggactggagttggtataaggttattttctcttcctcagtgaaattgtctcttatttctccagaaatgatgtgctcacgggtgccctctgaacagtcttctggtacctctctcttgcctaaagacggtgccccattttcttgggattccttggatgaggatggattggatgactccttgctggagctgtcagagggagaagaagatgatggtgatgtaaattacacagaggaagagattgatgcactgttgaaggaagatgacccatcatatgagcagtcttctggggaagatgatggtgggcatgttgagaagggagaaagagggagtcaaattctacttgatactccccgagagaaaaattcatcgtacagcctgggaccagtagctgagactcctgacctcttcaaactacctcagctaagtacatcaagtggtcatggaccagctcatactaaaccattaaacagacgctctgtactagaaaagaatcttataaaagtaactgttgcaccatttaatccaacagtttgtgatgctctgcttgataaggacgagactgattcgtccaaagatactgaaaaactctcttcccttggagaagagatgagagaagatggtcttagcccaaatgaaagcaaactttgtactgaatctgaagggatcagccccaataactctgcctggaatgggccccagctctcttcttcaaacaataactttcaacagactgtctctgataaaaatatgcctgacagtgagaaccctacgtctgtattctctcggatctcagaccattcagagactcctaatatggagttatcctgcagaaatggtggttcacacaagtcaagttgtgaaatgagatctctggttgtttccacctcatcaaacaaagtaagtatattttattcaaggtgaagagaaaaatgaaattatttttattcagatgtatagcagagtttccatatacctgctatctccacacatacacaacttcccctgctgtgggcatcctacaccacagtggtacatttgttataatctggcagagctttgtattcagacaaattggggtttgaatcctgactagcactgtgaccctgggctaattatttagcctctatgtttccccacatttcttatctaaattggagtaaataatacttcatagtataataaggattaatgaaataatgtatttatatcacctggcacgtaatattaaattaccctctgttgaataattactaagatggtaattctgttatttttcttgtctttgggcttcagcctatgtctcaatctttattgccatgctatatattaagatacagcactagctctgaatcagccatgaaagagctgaaa

SEQ ID NO: 6188 - DNA, 1515 bp, Homo sapiens
aggcatgcgccaccatgcctggctaatttcatattttttagtagagacaggatttctccatgttggtcaggctggtcttgaactcctgacctcaggtgatctgcccacctcggcctcctaaagtgctgggattacaggcatgagccactgcacctggccggttattctctctttacagatagctatagacatcattttaggaagtgttgcagtctggcatttgtgctattgttcattctctgtgaaggctgttcatagttgctatagcctgtgtttagttttgtgatttcatcaatcccatctttctgtgtgagtaatgcattctaaacatcctaccccactttagaaacggacgtggggaacgcttggtcatttaagccaacaataaatttaggtgaatgtccctaagtgtttactgtttttatccagtcaaggatttgcttttccttgaacatttgttttaaattctggggccaaaatgcaaaggagaagttctattcaaaggcagtagttgaaatctattattttagttagcctacttggcatttactacatcggtcacttctccaggctgccctaaattaggttgatggagtgagacatgccaaacatccacctttgggaccatagcatagttaaaattaaatgtagttggaatagctagcattgcagctacagtagggaactgtagtctagttccctacagaaaacccaaggagtgaagggacaggattttgcctaggcaaaaatctaagactcgtgccctcctggtacatggggttttaagactgaatgtgtaataggagcactgcctttgccaaatcaaatgagtgacaggttaactagaaaatgtgacaatcacatttcctcttagctcaaataattctgtttttccaaagctttagcagcttaattaaatctgttggactgggggaggagagagctgttctctagtggttaacatggtattctttaagaagaaaaaacaaagccaaagaaaactcattatctggcatgttcgccttaaagatggtactgggtagaatctggagttttcatctcttttcaaagctgcatatctcttatatttggtattggcctctaagtctaatattgcagttggaattcttgctgtattattttttaagcaagtgttaggtgcatttaactgctttcttcatccatgacgacattcccaccatgggggtcttgacaaagcagagtaaaaatatgctgtttacattgtttacttacaagtaaggagcctgaaataacctgtagtttcgaatgcaggccctgatttactggcgttgtcagtttcaattatgaaactgaagtttggtgcctcctctttatcatgttttttcccttgtagcagttgtgtttaatgtcattaaaaagaaataaaagttctttgtcagtgacatatgtactgtggcggtctgtcgtaggcttcgatggagggttatttgccttcttcctttgcgtaggtaggttagtggggtggggaggggg

SEQ ID NO: 6189 - DNA, 1186 bp, Homo sapiens
gaaagtatcatgggaagggattgtgggctatgttaacagcaaatcacaatgatacatgttgaacctgaaaaataaatttcccaaactaaagtttttaaaaatgtaaagctaattccaggctgcaggctattctttctgtaggattcttcttttaaatctaccagcctatcgactggtagaaatttcatttttcttggaaacatctttctccctaaggaaatctccttgctagaatgtggttcaagtgctgtgtaagatgccagttgttgggataggcagctcaataagagacaggattcattttatgaaaattcctgaggtctagacatagccaaccttccagtaaagtgggttgtacaatttggagtgttcagtgaagagttcttgactgctgcctcatttcttatatatactcctaggaacaattaaatcaaactggatttaactaggggtattttttctacccattcttcccccactcatagcagatgacatcaagccatgcccacgatgcagtgcatacattatcaagatgaatgatggaagctgtaatcacatgacctgtgcagtgtgtggctgtgaattctgttggctttgtatgaaagagatctcagacttgcattacctcaggtaagatgggaaatgcatccattcctttcgtagtctcattctcttactgatttagggaaaaggatgtcaaaaagacacatccgttctctcattacaggtttaaggaagctgtgaaaacttcttctgacatgctcctctaatcatgttttcaccagctactattctgtttctacctttctttgcttgccatattacaggtagtctggacttgctttttcccttttgctgtcttgcctccatacttgttcatgttctttcctttgcctagaatgctttctgcctaccttccagtatcctccttttatctcaacttgttcagttcttatcttttaagagccacttaaatgcctttcatccatgttgcctctcctttttccgcctcattctttgactttcttttatcttttgtcataaatatcgtcagtactttacacttcacgtacctatcttatcttactaaactgtaagtatcttgaggctagagttgtgacctttttacagttttttgcatttagtgagttcccaaggaattcattaagtgaattctttttttttt

SEQ ID NO: 6190 - DNA, 1222 bp, Homo sapiens
gaggcctagaaagcccttgccttccttcctcccacttctttctccaggcctggttaactcttccgttgtcagcttctcccccttcagcctgtttctgcagcagccagggttctcccccctacaccctctgcaggtggagagagagaagctgggcccagccgggccgtgcctgctggcacagacgccttaacgctgtgtgtatgactgtgtgactgtgtgggagcctggactgacagataggccaagggctactctctggcatctccaggtgttttgtagcaaacagccacttagtgctttgtcctggactccactcagcctcaggatggggaatagccaagaatggcagcctcagcgcagaggcaaggtcagaaagagacggcgcttcagagtttcctttccagacacccctccccgcactgtgaagttcccctgaccgccctcctggttcacaaagagcattaagaaagctgcggtggtctgagcaacatagcccaaagggctgagcctcctggcctgcctgcccgcccaccctgggagtcccagtggtgaggctcagagaactgctaaggggaaagaacagctggagtttctgttgatgtgaagaaggcagctcttggcctcccactcccacacttctttgcctataaatcttcctagcagcaatttgagctacctgaggaggaggcagggcagaaagggcgagggcctgcctctgacctgccgtgtcctttgcaggaaggaggtaggcacctttctgagcttattctattccccacccacacccccaggcagggttggaaatgaaggacttttttaacctttgttttgttttttaaaaataaatctgtaaaatctgtctctttggtgcctttctcccctaggaatgcctgtctctgggcccaaatggctacttttcacccatacagacaggtgggtccctgggctggggaagggaccttaagtggatggcatatcctccacacttttctggagctgggtcatttgagggtgccctcagctgcagttcacacggtagataccagctttcttcacacggtgtcccttggagtgagagggtccagaagccctttctgctctgcgcccccctacccgccattcccacttgggagatgatgactgttgggctagcagcctctggacacctggggcagaacccagactctcccatcttccagcacacacctctcgatagagctgc

SEQ ID NO: 6191 - DNA, 1236 bp, Homo sapiens
gaaggaacccaaatgtccatcaacagatgaatggataaacaaaatgtggtacatatgtacaatggaatattattcagccttaaaaaagaaggaaactctgacccatactgcaacatggatgaaccttgaggatgttatgctaagtgaaataagccagtcacaaaaaaaaaaaaaaaaaaaaaaaacaaccagatactatgtgattctatttataaaagctaccttgagtcatcaaattcatacagaaagtagaatggtggttgccagggactagggggaggaaaggatggggagttactgtttaattagtataaagtttcagttttataagatgaaaagtttctggaggcctggaagccctacgcgttctactggttttaaaacaaagagctcaattgacaccaggtatgacttgtcagtctctacattctctcctgatggaagagttttttgagttgaatatgctgtgaaggctgtggaaaatagtacagccactggactcagatgtaaagatggtggtggctttggggtagaaaagggagtcttcctaaactttatgaagaaggctccaacaaaagactttttaatattgattggcatgttggaatggtggtagcaggtttgttgacagatgccccttctttggcagatataacaagagaagacgcttccaactttagatctagctttggctataccattccacaaaaacatcttgcagacacagttgccatgcatatacactctgcagtgctgttagaccttttggctgcagttttacagtagggtcttacagcgtgaacaacagggcacaattctgcaagatgtttcgtatggttattggggctgtacccttggcaaagccaggcacgctgcaaagatagaaaatagaaaagcttcaggtgaaagaaatgacctgccatgttattgttaagaagttgcaaaaatatttacatagtatatgatgaagttaagaataaaccttttaaattagaactcagcagggttggtgaattaactaaaggaagaagacatgaaattattccaaaagatataagggaagaagaagagaaacatgccaaggaatctttgaaggaagaagatgaatcagatgatgacaatatataacatttactccagcatctattctattttaaatttctgctacagtcccaggttaacatttagccccctgtggattatacacactcactaaccaattttcattaaatgttt

SEQ ID NO: 6192 - DNA, 1100 bp, Homo sapiens
gcagtgctcagaaaggagagaaccatctcaaggctcagcccccctgaggaggagggccagggttgaaacagagggagcaggcagaatgtcccagctccaccagtcttcactctgcagaacctcaagaccagagcctcaggcccggggaggaatgagtggctccctggacctgcccttatccactggtattggtaagagctgggttctggacttaattacctatgctcaaatcccagccctgcacctaatagttgtgtaaccttgtatataatgccactaaacctcagctccctccctctacaaaatggggacagtagtagaacccagctcctctagtgatggtaaggatgaaatgtgatgacatatttctacaaagtgctcagagcaagtctgtgataaatgtaggaaatgattgttcttgtttccctgcagtagcagctgacgcgtgggtccaccatgaactggagtatctttgagggactcctgagtggggtcaacaagtactccacagcctttgggcgcatctggctgtctctggtcttcatcttccgcgtgctggtgtacctggtgacggccgagcgtgtgtggagtgatgaccacaaggacttcgactgcaatactcgccagcccggctgctccaacgtctgctttgatgagttcttccctgtgtcccatgtgcgcctctgggccctgcagcttatcctggtgacatgcccctcactgctcgtggtcatgcacgtggcctaccgggaggttcaggagaagaggcaccgagaagcccatggggagaacagtgggcgcctctacctgaaccccggcaagaagcggggtgggctctggtggacatatgtctgcagcctagtgttcaaggcgagcgtggacatcgcctttctctatgtgttccactcattctaccccaaatatatcctccctcctgtggtcaagtgccacgcagatccatgtcccaatatagtggactgcttcatctccaagccctcagagaagaacattttcaccctcttcatggtggccacagctgccatctgcatcctgctcaacctcgtggagctcatctacctggtgagcaagagatgccacga

SEQ ID NO: 6193 - DNA, 1641 bp, Homo sapiens
ggtggacctacctgttcagcctcatcttcaagctcatcattgagttcctcttcctctacctgctgcacactctctggcatggcttcaatatgccgcgcctggtgcagtgtgccaacgtggccccctgccccaacatcgtggactgctacattgcccgacctaccgagaagaaaatcttcacctacttcatggtgggcgcctccgccgtctgcatcgtactcaccatctgtgagctctgctacctcatctgccacagggtcctgcgaggcctgcacaaggacaagcctcgagggggttgcagcccctcgtcctccgccagccgagcttccacctgccgctgccaccacaagctggtggaggctggggaggtggatccagacccaggcaataacaagctgcaggcttcagcacccaacctgacccccatctgaccacagggcaggggtggggcaacatgcgggctgccaatgggacatgcagggcggtgtggcaggtggagaggtcctacaggggctgagtgaccccactctgagttcactaagttatgcaactttcgttttggcagatattttttgacactgggaactgggctgtctagccgggtataggtaacccacaggcccagtgccagccctcaaaggacatagactttgaaacaagcgaattaactatctacgctgcctgcaaggggccacttagggcactgctagcagggcttcaaccaggaagggatcaacccaggaagggatgatcaggagaggcttccctgaggacataatgtgtaagagaggtgagaagtgctcccaagcagacacaacagcagcacagaggtctggaggccacacaaaaagtgatgctcgccctgggctagcctcagcagacctaaggcatctctactccctccagaggagccgcccagattcctgcagtggagaggaggtcttccagcagcagcaggtctggagggctgagaatgaacctgactagaggttctggagatacccagaggtcccccaggtcatcacttggctcagtggaagccctctttccccaaatcctactccctcagcctcaggcagtggtgctcccatcttcctccccacaactgtgctcaggctggtgccagcctttcagaccctgctcccagggacttgggtggatgcgctgatagaacatcctcaagacagtttccttgaaatcaataaatactgtgttttatacaggttggctctgtctctggttctcccacactcccacccactgacagaaccctgaaggtagggaaaggtaagccctcagaaagggaaagagttccatggctcggggtggagctagggtgggggctgtggctgtggctgcagctggggcttgagctggagctcggttaggctggggctgatgttgacagccgggagctgggtttgtaccagaggaggaggctggggtggaacctactgatacatatgttgggattctagctgtggccacaagagtgcgctgtgctccctctgcaacggtgcttccagccttcgtaattagacttcaccctgagtacacacacaatcactgccactctcactatagacaaaccacactccctcctctgtcacccagtcactgccatctcaacacacatcccca

SEQ ID NO: 6194 - DNA, 1505 bp, Homo sapiens
ctgttgagaacggcgccaccagggggcgctcgaacgcgccgcgctttggtggaaaatgtggggatttgaccttgtcggaacaggagcacctggggcttcaggtcacgggatccgtggcggattctgagcgccatcgcgttcggagccacgcggtcgtcagcactctgggcgcgggggtgcgggggcggacacctgggtgttgggatggttcggcgccccagctcagcgacgccctctgccccgcaggaggagaagaaggtccctccgccgataccaaagaagcccctgcggggccggggcgtgccggtgaaggagcgctccctggactccgtggaccggcagcggcaggaagcgcgcaagcggctcctggcggccaagcgcgccgcttccttccgccacagctcggccaccgagagcgccgacagcatcgagatctacatccccgaggcccagaccaggctgtgaccggtccggcccgcccagcccggcccgggcccgcggttctccacccgtactgtacacccagcgtcgaggtcactgtgaacgcgggccgccccgtgcgcccgccccaccggcaccggacgccccggcccccgggcccgtcacactctcgtgggttttttaccttcctgatcccacgcgaaggcgcccgggctgggcagggggccgtgcctctccgccctgcgcccctcacctggatcccctgcccacctggtccgacgctttgtccccacctcctccccatgggcaccatctctgccattctttcccccacgggccaggccgggccgggtccctcatctgggctctgcgtccccccctcccccaccccgcggggctgggcttcgtggggatcaagcttcgtggctttttatgaagaatcccgaaccctgcctaggagcccgccccaccctcccaggggctccatcctcagccctctgcccactgggcccagggaccacagtggctggaccaacccaggaccagggcgcctgggcctctcccctttcccagcggctggggaggggagatgggggcttcccctcaccacacctgtggctgttcccacatccccttgaatatcccaggaaaaataaaacggcagaactgcactcgagccagctgctctctccagaagaggccacctccgtcccgtgtgtgggaggacgggggtgaagggagaagggaccgggagcccactctcttggtttggagatagcaggggttgcctgagctccttccagggatgggccagctggtggaaaggagattcggccccctgatgcccacagtaagggcctggaccctcctggaggggcccaggtggggtgaagagggggagggtgccaagctctccgttcttcctatttcggtgtatcccgttctgcctcccagtccgcagggttcccccagagagggaagtccggagctcgccgggcacgcagcatgtgctcaataaaccgggagtgtggttattgttaggtattgacaaataattggtttcc

SEQ ID NO: 6195 - DNA, 1170 bp, Homo sapiens
ttgctgaccaacagcatatggacgtgggccctgctgccagggccccatacctgctgggctccagggaggccttctccaccgagccccgcttctgtgccccgagagctggcctgggacacatttctcctgaagggcccctgagcctgagtgaggggccgtcggtaggccctgagggagggccagcgggggccggggttggggggggtagcagcaccttccccaggatgtaccctggccagggccccttcgacacctgtgaagactgtgtgggccacccacagggcaagggtgccccccgcctgcctcctacactcctggatcagtttgaaaagcagttgccagttcaacaagatggcttccacacactaccataccagcgagggccagcaggggcagggcccgggccagcgccagggacgggcactgccccagagccccgcagtgagagccctagccgcatccggcacctggttcattctgtgcagaagctctttgccaagtcccactctctggaggcgccggggaagcgggactataatgggcccaaggctgagggaagaggtggctctggaggagacagctaccccggcccgggctctggaggcccccacacctcccatcaccaccatcaccaccaccatcaccaccaccaccagtcccggcacggcaagaggagcaagagcaaggaccgcaagggggatgggcggcaccaggccaagtccacaggctggtggagttccgatgacaacttggacagtgatagcggcttcctggcgggtgggaggccccctggggagcctggtggtcccttctgcctggagggtccagatgggtcctaccgggacttgagcttcaaggggcgctcgggcgggtcggaaggccgctgccttgcctgcactggcatgtccatgtcactggatggacagtcggtcaagcgaagtgcctggcataccatgatggtcagccagggccgggatggatacccgggggccgggccaggcaaggggctcctgggtccggagaccaaggccaaagccaggacttatcactatctgcaggtgaggcttttttggggttggggaacagagtccttagccttcaccagtcttgtcaactagggagcagtggaaagggttgggtgggagccagctgtccctgtgatggagggcc

SEQ ID NO: 6196 - DNA, 1641 bp, Homo sapiens
ttacataccaaaaggtccttcaaacatttaatgctgaatctagattgcaaataaataagttatacgtaattgttaacgtttccccctagtggagctcatactgtaactcagccatttattttactatgttattagagtagatatatttgatattttaattaatttttgaaaactgttaaatgttcttttctcattttctcccaaagctttctaagagttcacctagtgaacccagtaatgctgttgctagtagtagtacggaacagccaagcgtttcaccatcttcatcagtattcagtcagcatgcaattggttccagtacagaagtacaaaaagacaatatgaaatctatgaaaataagtgatgaactatgtcacccaaaatgtacatccaaagtacaaaaagttaaaggtaaatcacgaagtattaaaaaatcttgttgtgcagattttgagtgtttggaaaacagtaaaaaagatgtggcattctgttattcatgccagttgttctgccaaaaatattttagctgtggaagagagtcatttgcaacccacggaacttctaattggaaaaaaaccctggaaaaattcagaaagcatgaaaaaagtgaaatgcatttgaagtcattggaattttggagagaataccaattttgtgatggagctgtcagtgacgatttatctattcattcgaaacagattgagggaaataaaaagtacctaaagcttataattgaaaatattttatttcttggaaagcagtgtttacccttaagaggaaacgaccagtcagtttcatctgtgaataaaggcaattttttagaattgttagaaatgagagcaaaagataaaggagaagaaacatttcgacttatgaattcacaagttgacttctataacagtacacaaattcaaagtgatattatcgaaataataaagactgaaatgttgcaggatattgtgaatgagatcaatgactcctcagcattttcaatcatatgtgatgagacaatcaatagtgccatgaaagaacagctttcaatttgtgtaagatacccacaaaaatcatcaaaggctatcttaattaaggaaagattcttgggttttgttgatactgaggagatgactgggacccacttacataggactatcaaaacttatctgcagcaaattggagttgatatggataaaatacatggccaggcctatgatagcaccactaatttgaagataaaatttaataaaatagcagcagaattcaagaaagaagaaccaagagctttatacatacattgttatgcacactttttggatttatcaataattaggttttgtaaagaagtaaaagaactccgaagtgctctaaaaactctcagttctttgttcaacactatttgtatgtctggggaaatgttggcaaattttcgaaacatttataggctaagtcaaaacaaaacatgcaagaaacatatatcacaatcatgttggacagtccatgatcgtacattactatctgtgattgacagtcttccagagattattgaaacattggaagttatagcaagccattcttcaaatacaagtttcgccgatgaattgagtcatttgctgacattggtttccaaatttgaatttgtctttt

SEQ ID NO: 6197 - DNA, 1162 bp, Homo sapiens
cagaattcagtgctgttgcagttctcagataaaaagtgcaaacttgattctttggtatatctgactcagttgtgtggtttcctttagttgcattgtaactgaagataacatggaacacatcagtggtgtgggggagagggaactaaactatacttgggaactagggtgcttttagcaccttgacatggaccgtatagcatgtgataattagtctctattgtagcaaactgacctgcccatagatcggcaatatcagtaatttcattatgcaatcttggtaattctacaagttgagttgaactaaaagtacaggtttttttgtaatgcgatttaaaatttttaaaaacatgggcttcatgaaaacaccattgttactaacttgggcttagatgggaatctaatgtgaatagttcaagttatgggacttgtctaaatgtgtctatactctaaacctgggggaaggtggtgtggaacattgacttgactacagtcgaatacatgttgggaatcattcccaatcataagacatcgtcgtttctgtaggatgactgcatatgttcagagtagctttttgaatttggttcccttagctttagggatgtgatgttatagtccaaaatgtttacaagaaaacctaagtcttcaaaagcacaacttttgttgcttaggactttgcatcaactgttgttccagacctcacttcaacttcttggtctctgaactggttttagctagcatgcatgagagacagttttcatgtataatgtttctgctctgtaactggaaagtggtttactttgcataaatgctgatgaaaacttcatgactatgagacttttcttctgtgtatcaagaaaaagcttgctcgttggcaagcaattcacaaggtggggacagacttgtactttaacatgtagtccattcaagcaaacaactttggactctactgatagatgaaagagcaaatgatgactagtttagcctctgcatatcaacaatataatgcagatcaagtataatgctcaatattagtgacatgagtatcactaaattacatagaaccctgatggggtttcctgtgtcgtaatccattaaatcggtggccagtgcttgctgccgtggtttagtgattgggtgttagaaataaaaactcaggtctatt

SEQ ID NO: 6198 - DNA, 2075 bp, Homo sapiens
tgcggggcctgtgggtggacagggtcctagaggaatggggcctggaactccagcaggatatggtagagggagagaagagtacgaaggcccaaacaaaaaaccccgattttagatgtgatatttaggctttcattccagtttgttttgtttttttgtttagataccaatcttttaaattcttgcattttagtaagaaagctatctttttatggatgttagcagtttattgacctaatatttgtaaatggtctgtttgggcaggtaaaattatgtaatgcagtgtttggaacaggagaatttttttttcctttttatttctttattttttcttttttactgtataatgtccctcaagtttatggcagtgtaccttgtgccactgaatttccaaagtgtaccaatttttttttttttactgtgcttcaaataaatagaaaaatagttataatattgatcttcaactttgccattcatgcttctatgcatattaggctacgtattccacattgaaagcatgagagtgtctaggcctttgaatggcatatgccatttctgggaaatgcatctggaggctaagtattgctttctacaaataattgccccctttgttttaaaaagaagaaatgcatattgaagtagtttgatgatttgtttggcatataggaagcacgctggtgctaagtattttttaaatggttatgtaagcaaagctgaactgtaaatcttcaggaatatgtattaagattgtggaatgggtgtaagacaattggtagggggtgaaagtgggtttgattaaatggatcttttatggccctatgatctatcctttacttgaaagcttttgaaaagtggaaaggtcattttgttgcatttccccatttcttgtttttaaaagaccaacaaatctcaagccctataaatggcttgtattgaacttttacatttgaattaaagatgttaaacatgaagtcttttcatgtattcaagtgatttataaagatggggtgtagtctaaaaaacaaaacttgaaagtaagaaggtttagtaactgggccgggcgcggtggctcacgcctgtaatcccagcactttgggaggctgaggtgggcaaatcatgagatcaggagttcaagaccagcctggccaacatggtgaaaccccgtctctactaaaaatacaaaaaattagctgggcgtggtggcaggcgcctgtaatcccagctactcgggaggctgagccaggagaattgcttgaacctggagatggaggttgcagtgagctgagactgccactgcactccagcctggacaacagagcgagactctgtctcaaaaaaaaaaaaaggtttagtactgaagtaggtttagttatatatacatttgtactctgtaacttttacatctccttgtgctacttctgttgggcaaaatctataggactataaaaatctattggttctcttctaagagctagtggtgattgttaacaaatagggttgcagataatcattcttattgtaaatttaacttgttttcacatagtttcgttttcatgtagcactaaatctggagaaagttgctcatgctacacagtacaaatatcccttcctcccaccataaaggcttggaatgtttccatggtgttgtcagttaattgtcaacttcattgaacccccttccattagaacaagagactttgactattaaagtagattgtttattgttgcctgttagtataatgggagcctgatttcccagtgtaaatatgttagaggaacagcttcctaacagtaggtaaagtaattgaatggtttggctttgttctgagttacgttccattcaaatctgtacattgtagaattcttactatggaatgtgtcttcctccttttcacctcttttcttggtgctaattggcaaaagaaaaattctaagtcaaacctttattaacatgctgaagtttagtattgtgcctgtgtacaaaaggagacctattgttggaacaatctgagcactttctgcataggaaacaggataatgctgaaagtaaacactagtgtataaaagcatctcaccaa

SEQ ID NO: 6199 - DNA, 1225 bp, Homo sapiens
taattaacataattatgaaagccccaactttttcttttttttaagttcttagaggtagaacacagaacaatgagccaaaaaccctgtaatttataagattttgaaaaacaaaggataaaagtttagtcatgttgagtagctcaatagtattttgtttaaaagaatgttgaaattgtgtataggaacagttaaaccctgatgcccttttagttttttatttggagtaatactcttagtaactggtctattataaatggaatgagaaaaagtgtaggctgctgtgtttgcatacctgaggggtctgctatttaggcacatatgtttctattgaaaacttctatctccagaattacctaaaactagatgggaatagtgaagtcactcactgctttattgcagttactttagcttcgtgtttcactgttcgggaagtgtctaaaacatggaattacagcaaagtgtctgcacttttcaaagacctaagggaaaagatggactgatgaaggtgggtggggtttgttcatttagtttgcaacaatatagaatagtactgagaacgtaattgtctctggttatatagtgatggctcggaaggtagtgtgcctgtgagaatttggcaacataagtttttttgatcaagttactgtgccggttaagtgactaaatctatagtcttatgctttttctttttgtagtctggtagcattttattaaaactttcaaccttttaagatttctgcaacttagcagatgtgtcttaagatcttgaaaagcacaaggtttcttaagcagcacatgccactaactggtgagtaggtctttgtcacttcattgagtgaattgaatctctggttgggcttgttaggcttacttggaaattaaatttccgttcagacgttgaaagtgagagtttgcaagtttttcagtgggttaatctgatgtgaaatttcttagaactcattttggaatggattttcacatctgcactaattcttaaattttttagcactacagggaagatctgttctttgaaacaggtgtatgagaatggctcaagtgggaacataccacaaggcatgtattaccgtaaactaattttcaaattacccttttttcctttctatgttcccggtacctgtggatcgactcattggtgattgtatcgacgaacgttgactacggaaccttctaaaatatttacttaacacacatggacatcaactac

SEQ ID NO: 6200 - DNA, 1977 bp, Homo sapiens
ccccagctaattttttaattttttttgtatttgtggagatggagtcttcctatattgcctaggctggtgtcaaactcctggcctcctaaagtactgagattacaggcatgaactaccaaccctggccttaatccttgacttatgcactaacatttatattctgacatttagggaaaagatgtacttagtttttcaggtcagtcaggcaaaatacaaaggttaaatatgtcagtgttggtttaacacttaaaatcgaatacagtgtaagattatccttaataaagcctacattatttgccagaatgtctttagtactatgcccctaggctcactctaagcctttgtgttttttagtgctaacctagttcttaggtcaactgctaggtttcttcacattgaattctaaaagatgtggataacacttcagttatgtacctgatgggtatttctaggcaagaggaggaacgacgtagaagagaggaagagatgatgattcgtcaacgtgagatggaagaacaaatgaggcgccaaagagaggaaagttacagccgaatgggctacatggatccagtaagtcagcctttactgccttccaattggagttgtctatagaacttgcaggtacctagaaggaattacaggaaattttaatatcaaattacagttattttctgctttttttctaacaaagtatattatgtttgatttccttgtatgggtcagaggatttaattgaataggaagtttttttgtgttttgtttcttggtttttttgttttgttttgtttttttgtttgtttggttttttttttggagagagttttgctcttgtcacccaggctggagtgcagtggcttgatcttggctcactgcagcatctgccttctgggttcaagtgattctcctgcctcagcctcttgagtaggtgggattacaagtgcctgccatcaggctcggctaatttttgtatttttagtagaaatggcgtttcgccttgttggccaggctggtcttgaactcctgacctcaggtgatctgcctgcctcggccttccaaagtgctgtgattacaggcgtgagccactgctcccggccttgaataggaagttttgtaggtctttggataattgagtctaacttagttttcagaatattgatttcaaaaataattcacatgatgaacttttgaactttaccatgttttttatttaactcttgaaaatttctcagttcttaagaatgcttgctgtgggtatagtgcaggtatattgaaaggaatttttttcttgcagcgggaaagagacatgcgaatgggtggcggaggagcaatgaacatgggaggtaagtgtgaaatttaaattaatgatataagtagagagtagtatcctggtggagttgtaaccactatttttgttttctagatccctatggttcaggaggccagaaatttccacctctaggaggtggtggtggcataggttatgaagctaatcctggcgttccaccagcaaccatgagtggttccatgatgggaagtgacatggtaatgtatcctgtgggacgtagtaccaaggaaattctcattttcacaacttaggtgtgtttgttttgttttgttttgtttttttaagtaggtgactggacctcttttagtttcccctaccaatttcatacataaatatgtaatattgaggaatactttggcaacatagaagaactcggtgtgtggtaacctaaacagataacggttgccaacaaggagtcaatgctgttagtattatgtggaattacctttggcaataagtagatttaggtgcttttgaactctagtgcatggcaaatccaaattctagatgctagataatgtatctgattattctacatccaagtgagaataatcaaatggcaaactcattctttaagctggtatttgccataagtaggaatcagacttgtagtttgaagctttaggcacgtt

SEQ ID NO: 6201 - DNA, 1189 bp, Homo sapiens
gtttaaagatctgaaattacctctgacatggctctacttctgtcttaggcactaacgtactcagtaggaaccatccctataacaggcctcactttcaatttaagagcagcatgtttttggctttagcttaagagcaaaagctgttaatttttctgttcagttttgatgggaagttttacatagttctcggtgttagtaagttcttatgaagcgttagctgtgtttactgttattaaaatatatatgatcatctcttttgtgacatgaatgattaaaaaaataagtagttgtttatagtgagaggatgtgatttatctcttagtttttggtttggggctttggtctgagaactactttggttcatcctaaattttattttactctatttggcaatgtttttgtttatattgtgcacttgtcatttgggttgaaaattacagctccttggggaatagggagggataccaaaagaatgtatgatagaagatatgatggtaatgttactttttccttttttgcttttccagtttgaacaaaaaagtggtgcagtttttgatgaaattgtagagaactgtaagtaccatttgagaaaaaacaatcatgtctttagatagaaaatgaatgttaatctagatgtggtatttaactattacagtgtttagttagggctgatttatgtgatggttcaatctgatttagtctagatctcatcacgtactgttctttcagcaggttaatctgaattgtaagaatcttattctttttttcaataaatattttattctcatagttatcatattaaaatatagccatacttcgtgtctatatggaagattatacttaccactattaagggtttctacttgggttaaggtcttttattttcttttaaaattctttttgtgttatcgtatttttagaaataatttgttttttatgattataaaagtaatacattcaattttacaatacagaaatgaataaaatagaaagtaaaagtctttgtcattaccattctccaaagataaccagttttaaaagtttaacatatatatctttccagacttttttctatgagtgtatatagctatacatggtgtatggagatttatatatgtgtgtaggaatcatagatactgttcttgctttttttcattcaactgcgtagacatctttctgtgtcaatgga

SEQ ID NO: 6202 - DNA, 1150 bp, Homo sapiens
aaattgatactttttgttgttttgtttttccagaatttattcaacaaaccaactggaatgaattcttcagtagtgcccttgtctcagggccaagtaattgtaagcatccccacaggttccacagtgtcagccggaggaggtagcacatctgctgtttctcccacctccatcagtagctctgctgcagctggtctccagcgtctcgctgcccagtcccagcatgttgggtttgcacgaagtgttgtgaaactcaaatgtcaacactgtaaccgtctttttgccacaaaaccagaacttcttgactataaggtaaagtatagcatgttcatgataagattttgagtatacgtgggtctatttgtaaaattatttttaactttgcatctctcaaaatcataccatttgttttgaaagtaagggagataaggagttccataagacaaaccaaatgtttaattagtacttaatgattatttctttgcagggcaaaatgtttcagttctgtggcaagaattgttctgatgaatataagaaaataaataatgtaatggcaatgtgtgaatattgtaaaattgagaaaattgtaaaggagactgttcggttctcaggtgctgacaagtcattctgtagtgaaggtaaagacagaagattatcttacctactgagcatgttggttgttttaaagcagttgatgatgatttaagctttcactgtctaagttaatctgttttattgtttatgtataacgtaaatgccttttcgattcatttacacttagttcattcttttttgatctagttttcttatattatgtagctgttaaaatgaagtgaaagatttgcaaagtataatgcagaagaagatgatgtgaaaaacatttaacatccttaggttccccattattaggttgatcgggacctcaaagagcttctagttcgtgtacttatttctaaatgggatgccttaaattatggtaacattctaagtttatacttttattgtcttaaacagccattatatttctgaatataaatggcttgaatatgcaaattaatatgtggaagattgttttccttagataactcttctatatgtttataatgttttattttactctaaagctgtattagccttctagagcaagggcttt

SEQ ID NO: 6203 - DNA, 1197 bp, Homo sapiens
aagtcaaatgctgtgcaagaggctgattcagaattgaagcagttctcaaaaggggaaactgaacaggacctggaagcagattttccatcaggtttgtgtacagtaacctgtccactgaaagctttttattttaaaagatcggtacaactctgaattgacactattaagcagtgccaattgttattgataataacagtgtaatgtgttagaggtcataatctagagcacaaatagaccctggctttgtaggtgttaattcgtaccatattgttcttataagtggttaatgtggttaaaattttttttaacctttcccgtagtagctatataagaggttttcctgattgttaatgaagttttcatttatgcactatatccttggtttaagtctataagtggaatccttattttatcacaaacaaactaatgaatatagtgatgattacctgatatttctttactagtctaagtctttatttaaatttgtgagttatttacctcatgttgtcctttctgctgattattatagactcctttgacccacttaataaaggacagggaatccaggcacgttcccgaacaagacgacgacacagagatggcttcccccaacccagacgaagagtaagctgcagcttaacttttctagacttttctttccttcattctacaagcattatttagttcctgctgctttcaaaactctgtaacagccagagtcaggtagttccacatgttgttttgcaacttttgttttttgaattcaagaaccatatattttatttacatttctttcagtaggaactttttttgtttctatagttaagggttttcttttatattgctttgtttactttaaaaaactttttatagttattttttatgctttatctgtttgaacagcctctaaatttagctctttttacatgttataatactgagtactttgggaggccaaggcaggcggatcacaaggtcaggagatcgagaccatcctggctaacatggtgaaaccccgtctctactaaaaatacaacaaaattagccaggtgtggtggtgggcgcctgtagtcccagctactcgggaggctgaggcaggagaatggcctgaacccaggaggtggagcttgcagtgagctgagatcaggccactacactccagcctgggttacagagcaagactgtctcaaaaaaaaa

SEQ ID NO: 6204 - DNA, 1256 bp, Homo sapiens
aaatgttttgtgattgcatgtgtcctttcttctttgacccatagagctgtttaatttatgattttggaggatttttttggacatctatgcatcattggtttctattttaatttcattgtagttagataatttgttgaggcttgttttatagcacagaatatgatctgtttacatgtttcattaaatagacctgagtggtaatagtagttattcatacctcatcaggtgagtctatatctggaacatagtaaatacccaaatgttagtgattattacagtgtgctcttctgcatttaaactttttctttcttccttcctcatatggattggattaaataatctctaaagccctttcttgctctaagaactctgaatctttaggatataaaactaaattctttattctacaaatgtataccctttccagctttgagaaccctgactcttaaaaatccaaaactaaattttatgttctgtaaatttttggaattcttacagggacggaagaagtctatagtggctgtggagcccaggagtcttattcaaggagcctttcaaggctgctcagtgtccgggatgacactgaaatacatgtatggggtaaatgcttggaagaactgggttcagtggaaaaatgccaaggaagagcagggggatctaaaatgtggaggtaagtgcacagcatgaattgtatcttgatttaggtagggggaaatatacagataatctactgaaaagggatacattttaggtcaaaaaccccataaaactttggtttgggctttacttaattttttccgcacttttattttatttaaacttttcttttatgtttctctccttgtcaggggttgaacaggcctcatctagcccacgttctgaccccttaggaagtactcaagaccatgcactctctcaagaatcctcagagccaggctgtagaggtaaaatttgtttctctccatttggtatgaattatttatattattattgcggatttaaatttgtaaattgaatatttaaaattatttaaaatttagagtattaaggttagaaagagaaattaatcttatcccgttttaaggaggttgttataagggtaaggttatgtcttctgctcttgagtttattatgcaaatatacagaattttgttttatttttgacactgtgcaagtgcctcaaaatatgtcttcttgagccctgcgtctgtatagtaatccatgtggagcccagttttttttttgttttttttttt

SEQ ID NO: 6205 - DNA, 1099 bp, Homo sapiens
gttctctacagctccttagtttctacagcaacagcgttgttcagagcctatatggcctacacatcccaaaatatttactttctggccctttataaagacagcttaacccctaatctaaaatatcaatagattaaaacggtttcaggagactccacgaacggtgtctacttgagtggaatcatctgcctttttctttgtggtgcgttttctggttttctgcataaggaagaggggaaagaggaatagtcagtttttctctttatatctccctgtcttagaatttgagagattacttagtctactttagcaggagctcagtactgtttcttgtaccccttcttctgtctaggttacatgttctctcgcattgaggaagagcatttgtgggagtgcaaacagctgggcgcttactcaccaatcgtccttttaaacaccctccttttcttcaataccaaatacttccaactaaagaatgttactgagcacttgaagctttcctttgcccatgtgatgagacggaccaggactctgaagtacagtaccaagatgacatatctgaggttcttcccacctttacagaagcaggagtcagaaccaggtacgggatactgtttgtcagatttctctttgaagtcttagtagtagtactaaaatagagagttactgcagaaaggtaattataaatgctagacgtgaaagagtgtacctttaacatttgaatatttttctctattgtcagagagtggtcaaaggctggcctcaaagtgagaggaatcacgtgcttcaatatactttcattggcttttaaattagaaattttgatttaattgggcagagctcaaatagcctgcattttaaaacttctcaggaaattaaaaaatacaaacagggttgagaatcactaatttactagccccagatgagtcaatcactagttaaacgaaacctgcagaacttttagtccattgtttctaaatctttttttgaccagagcccctctttttagttaacattgtgaaattctgaaggaacttaaaagctgacctacaatatactgcttttgtacacaatagaataatagcagtgacaattttattag

SEQ ID NO: 6206 - DNA, 2846 bp, Homo sapiens
ggccatagtgtcacatgtgagttgacttttttgttgctcttaataatgtttgaagtactaaagtttatgatttacactttgtcttatattaactttatactcacttccaatccattgtgatttcagttgattcctgggaggaaatattcctgtaaactatttatctctgtgggtaccttgctttccccattgtgagtcacagtggagaaaggttgagagccatattaggttggtgcaaaaataattgcagtttttgcccttacttttaattacttttaatggcaaaaacctcagtttacttaagaatagtacatatttcctatactctctgatttctaattttcttttttctctttttttttttcccctgtggatagttctgaaagtgtgaagcaaaggaatgatgtgttttaccttcaacctgagcgctcctgtgtcccgaatagccccatgtggtactccacattcccgatagaccctggaaccctggacaccatgttaacacgtattctcatggtgagggaggtacatgaagaacttgccaaagccaaatctgaagactctgatgttgaattatcagattaaaacggaagtgaggttcttattttcatacatattggtatgcaccaaactgtgaatgcatccagctgttggaaaatgatgtataagtctaagtcctcttgacttgaccataagatcatggaaaacagatgacttgtgaaccccacagtgtggatgtgcaaatgaaaattgaaggaaagaatatgaactgagaaatgttctttggcagtgatatagttcttagacatcttcagaatgactaatttctccgagtggtgcataatcttattttgtttgggagtaacaaatcgtggaatatttttaaggaaaactgttgtataaaactttaccatagtaaccttagaccttagagaggtagctttggagtgaaactttggctgcaataggctactttggcaagccctccgtaaaagtcagaggagagatcagtacagagctaagagtgacatcaaatgaggactgtgggacccagatttgaagacccaataaaaatactcaactttttaaaaaagatagtgaagtggtcttgattgattttgattttcactgccaagccaatcatgtgaaggacagaagcttttgccatgggcccctcacatcagggaaaatgaccttcactgctgttaacagtaatgtgtccctttcattttctggatcaagccttctcagcggtgggtctggatgtgggtaaactaaggtaaaggggatgatattccacaaactaattatgcacacagaaaatctgtggagcctatcagaccccaagtgtcttgaaatgtttgtagaaacccactaaaatgccccttctctgggtgtgggcccttattgcagctgtctcacagcctgagctgtggtacagagaaatgggggttctccttttattttcattttttttccccaatggcagcttttctcccgttgttttaccttcctatttcccaaacagttcctcttattttgtcttttgcaccagtttctggaggcccttgtcatttcaaaaaggatagtctcttttcttactctggcaaacctgtgagtgattccacaaagatacagtattacttagctatctgaattatgatagaaaaggtcctagttaggttcctatataaagcatttggaagatgaccttgttgcccttgaaacttgaaaatagggattctggggtgaggatacaaagacattgtcttgcatatccataagcaggtcttagagcattattccaaactctagctgtttcagtagttctatgaggattgcaagtcataggtgtgtgtggcatatcagtccatctccctcatctccattctcagtttcttccccacaaaatttggaatcaaagcttttatgacgtttgccaattgcagaacttcttcagctaaggttaatttgacgctatgataaaactgagagatgtcaaaaagcctcttagaaattttaatcttgaaagacttttcagggtatctcattttttaggtgggggtggcaggtgtatttcttttttaacaaataaaaggcatttaagtaaaactaaaatgaaaaaagtaggccttctgacattgtgtacttggtggttctgtccctctgcctgtaacaaatctcatttttgttaccaagaactgtatgaaagaagtaaatccaccccgattctgtatgattaattccatctgtgtttgtcatttctgactggaaaacttcttactccataccttgttcgatatggaggacaaataattggattgtctgataagtctgccaataaactatccagaaatagcaagtgtaatagtccccactatacgaattttatggtttgtataaacactaacattttccccttctgtagttgtatgaaaaaacaaatattgttagcatagtagataaattgttatgaaataccagaaaaaaaaatctgtatcttttactgagaacacccaatacccagataaatgactgtatcaggatttcatttgcatgttagtccacagagttgcccagaaccctaaatttattcataagagaaaatattgattaattattggtcattcctcataagtgtagctgttgatgtgtgcgtctgattattgcttttttaattttatgaaaattgtgtaaaattacattttttttccaggggagaaaaaaacatcaaacaaaaacatctaaatcatcctttttgttctttttcagtttttaaccacttttaggttttccccttacagaaaccacagaaatattcccttagaataaaatagtatatttgt

SEQ ID NO: 6207 - DNA, 1905 bp, Homo sapiens
atttacaacatcaacaactcatggaatacttgggtgaggtttcctttttttttttttttttaagatgggagtctcactctgttgcccagcttggagtgcagtggcgtgatctcggctcaccacaatctctgcctcccaggttcaagcgattctcctccttcagcctcccgagtagctgggattacaggcatgtgccaatacgcccagctaatttttgtatttttagtagagacggggtttcaccatgttggccaggctggtcttgaactcctgacctcaaatgatccatccacctcggccccacaaagtgctggtcacatgcatgagtcactgcacctggccttgggttaggtttcacttcctccattagacatttgacattttattgtagcagctttctgggttaatatctctttgtgattgatagaagtggttggaagaggaagagtagggaaaagtgtgacattacagattaaacagtgaaaatcagtaccataatgactcctttacacccatgagatacgtaccatgatgaccagggctcggtgaaagaaagatttctttttttttttttgagatagtctcactttgttgcccagtctggagtgcagtggcgcaatctcggctcacggcaacctctgcctcccgggttcaagtgattctcctgtctcagcctcccaagtagctgggactacaggtgcatgccaccacacctggctaatttttgtatttttagtggagacagggagtcaccatgttggccaggctggtctcgatctcctgacctcaagtgatccagctgcctcagcctcccaaagtgctgagattacaggcgtgagccactgtgcccagccaaaagaacgatttcttagatggaggacctaggaaccaacagatgggctgctgtattactcttacccctttcattttcctgtatgcttcttcccaaggcagcatcaaattttgaattaatttttgctgcttaataaggacttaaactggtacccaagtcagaaagactctgcctctaattttctggggcttggggatgaagataaagtgttacacccagtgtttgtccaccacagtctgtggggcagagagacccttcctgggactgaattctcaatttgaagcactgttgttcaaagatctcccttctgggtctgacaagaagaaacataacccttatttattgcattcttctggcttacatacattgccctcactaatcaatggacatttcagcatttcattactaattttgagagaaggccaccatggaatttaataaaaatattattgaagagaattgccatcattctccattttccctgaactaccacaagcttctcagaattttagacaaatgtttttcccctcagaactgagcatcagtgctgctttggaaaaacattccatgtgaatactgtggtttcagtgtcaggacctgtacttgggcagttggaagagagtgtgccagttttttactgggagatgggaacaccaatttaattgatgcaattaggttgtaggttttttacagtttttcttttcttttctttttctttttcttttcttttcttttctttttttttttttgagacataggctggctctgtcacctaggctggaatacaatggcatgatctcggcttactgcaacctccgcctcctaggttcaagcaattctgcctcggcctcccaaatagcagggattacaggcacctgccaccactcccagctaattttttgtatttttattagagatgaggtttcgccatgttggccaggctggtcttgaactcctgacctgaggtgatccacccgtctcggcctcccaaagtgctgggattataggcatgagccaccgcacccggccggttttctacagttttctaatac

SEQ ID NO: 6208 - DNA, 1155 bp, Homo sapiens
aacaactgggattataggcacatgccaccatacccagctaattacaaacattttatttttttgtagaagatacggtctcactctgttgcctagtctagccttgagctcctaggcccaagtgatcctcctgccttggctgcccaagtactgggattacaggtgtgagccaccatacttagccctattcctgattgttgatagaccctggagtcaagcttttctccctttagcctccccctcttctcagaaggcactcacaccactctttcaggtccattacagccttggtgatctgaggaccagcagtgtcacttaggagcatgctagaaatgcagaatttcaggcttcgctctagacctgctgaatcagaagctacattttaataaaatctccaggtgattcataggaatattaaagtttgagaagcactgtcatagagtagatgttaggagtgagtataatagatgggacattgcctggactttgaattacttccaaaacttgaagtggtggtagtctctcagcttccacaggccactcctatcccccacagggaagtggtggaatacatggtccagcatttcaagcctcagatctttggtgatcgcaagcctgtgtatgatggaaagaagaacatttacactgtcacagcactgcccattggcaacgaacgggtaaggttgggagtcaggctaggcctgtgtcaggggtctggggtagaaccaagctcatgtaagcctctttggagatccagagatccttttcatcttttgtgctgagaaagtatgttttagggtgaggggtgggtaggtgctgatgtttatttagtctatcatgtgcctgtccgtgtcctaaacagattgagattagacttaaaatagacctaagggcttcctgctaggctgagaggtagttgagaggaacagaagcactgagccaaggtggctagaacctaaggggctagacttactctggattttcattatgagcccctatcaacttgaaaaacatgttctcagcaaatccatggagttgggggtcattctcgcagagcaatggcaatccttcatccctttctttcaccctcctgaaggtcgactttgaggtgacaatccctggggaagggaaggatcgaatctttaaggtctccatcaa

SEQ ID NO: 6209 - DNA, 4525 bp, Homo sapiens
gccctgaccccactggaccaaaaggggcagcactggtgcccaccatacacacaggtgtctcatgtgactcacagtgctaaagactcatgcttgacagcttggtaaggtcaactctgtagccctgcagacaaaagctggttaggtttgggtttgatactttagatgggaaagtgaggggcttgagaaagtgggtgggaggagggaaggattttttaggagccttaatcagaaaaggactagatttgtttaagaagaaaaatgaaaccagacccagatcaatattttaggatactagatgttttaatgggttcagaatccagtttgtaggaagattttttaatggttttggttgctcctcccccagctgccaccccccaccttacccttattcctctctgtccacattttctgccccaccttacttctcctccctgacagacatccagcccctagtaatacttaaggcactatggcacttagctttgaagtgacacgaccctgtcttccttccgcccgctggtgggtaaccagtgccttccctgtaacggtaatgctgcagaactgcaaccttttgtacctttctttggggaatggggtgggggtgggagaggaggtagatggggaagaaataccccagacccaacaaacctccagccagaaagccagctattttgcatttgaaggaattgacttcctcattcattgagctttttaaaagatcacaacctcaagatggttaaaatccattgacatttgcactttcaaacatgacaagtctcggagctgctgagatgacaggcccctggcctttccacttatgcctccttttctccttattcctcctacctcccgccccgcccaggtctggagttactttcatagcatttttcactcttggcttcttttctcccttgatggtcaagtctcttatgtttcaatatttcttaactggggtgtcttataacaaaaaactcttaggtctaaaatgagaaaaaagagagaaaacaaaatgttatttttataccataacttgagtgtattgccaaaatttggaaatccttcccatgcctgatgagtttatatcccagaaacattgagccatcagaatgaactgtgtacctgatttgttctctgacctggctaggtagggagggggtggttatcgccccaagatggggtccaggctccatccttcctctgtgcagataatacctttttcttgctatagcctccctcctctgcactgtcctgcactctttcttgcaagtgcatctttttccttcccctggactgtcctctgaccctttggctcatcctagattgcagtgtgtcctgtggacaggctggggaattttgctgctccctattgcttctgtttacaaaaatgaatttttcctggtttcccactagggcatgtgggtgggtggcatggacttttttttttttttttttttgtcttgagacatggggtttggctgtcttgcaggactggagaaggtggtggttctagcttggtctctgttggccttgaagcaagcatcccccctgccctttttccttgactgttcatttttttcctgccccactgcttgggatggggagttgcaacttcagtgtggaatttcctctttgaggagcctgggcttggatctatcctgatctggtgatgaagccatgattactttagacctagcccaggcttggaggccagctggaggaagaagggtctaaatcctggcctgtagagttagaactaccatttcctccccttagctgcccttgtatgacccggatttgctatgcaaaacaatctatcccaggttctgttctggttggctacattgttcagcaactcacaaaacgtagcacaaacattcattatggagaaagcatcaggactgttgagtaactcctcctttacttttttcctgctggctacagcatggggtgccctataggcacaagcccagctgaagaacagaatggagggctctgggaggaggcagctcactggagagcctacattccttacacaagtgcctaaagagagtgatgctaacactccatctgccctgtccattgccttcatatacagtctacttcgtgttctgtcaccctttggggaggggagttctcctgggacagtgggctctgcatgttctccacttggatacattttggggctaggatcagggcactattcctggagggtccagtcattcaccagcatttgcaaatgtccatagggagcaggtggcagcctctactcccagcaacaagtttgtgttctctccttttctctctttgcctcactctctccagttggttttcagctggggcttgaaatgcatttttagccctttgacgtggcttatgccattcaagaaataaaaagcaagagaatcagctttgggcaatgacaagaaatgagttcttactctgatttttttgtaaaaagataatttttgagacttgaaaaataccccgaccttgagattattcctgtttgaaaggtggtgcatgcagatggagaagtggtgttggcagcaagctttggctcatgtggatttggtttaagtggtgcttcttacccaagcttcaaggaagtgcttgggggacccccagcctcatcctcttagttgggtctcttgttccctttgtaccactgttttgccttccttttcctcttctctctttgcctggcttcctttcccttttcttctattcactctgcttgcttgctggccggcctgcctgcctgcctgcctgcctgcctgcctgtctgcctatgtgatgatgaaatctctgcatggctgcaatgatcccactgttagctggcagggtcaggcttagctccttgactgcagaagaccaagaacctgttccccaagcccagagatgtccacctgggctggactgccctcaagcttatactagagaagagcaactgacctgcccaacttgtgtgaagtcaggagggtttctggcattttccacacctgtccactccttggagctggtttctctcattgctttttctaaatctggttctttttctctttacctggggcctggcttttctgagattgtcttagggttgagctatttgggtatcctgggtttgagtgttaggggatggacataaaggaaaaagagtgatgagaagagaatggagagaatttgaataaaaggtgggaaaggagagcactgttctttgattgtttatccagtccaacctgatccattagggatcgaggtgctacactggcctccagggataagcctggggctactgttgctgggaacttaggcttaacataaagccgaagaaggtacctagaaatttgaaacttccctaaaaagctcctaatgcccacctgctagatagcttctctgtggcctcctatttagctaagcagcagtgtttttggatactttttttttctgtttgtgaataaggccagcactcaagatgggcagccaagggtgcactgactattagctggcccataggatatctgtaaggctggtgggacagttttggacctggaatcatgtgtaactaacaaggttggacgtttcttccccatcagggtagaaaaatcatctcaaactagccaaaaggcagttttggaaactacattgggggacgttatttttatttatatatggggcctaggccaatccaggatggtagctggaataccttccttcttaaaatctgatcatggcagggatatgcagggcactttttactatttggccttctaagcagattgggaaggaggtattttctggttttcgctttcctccgacttaataggacttgccttctccctgggcagggagagaggctgggttggtgctctcccttactctactcatactgacttagagcctctggctgctgtttgggcatccaagaaagggaggggaaggaatgagctaaaaacaaaacagaatgaggtgggaaagggagattttcttctttacagaggaaaataggaaaccctccaagaattgtgcaagtaaagacatttgttgaatgcactgagtcccttggtgtagtagcaataaggaaaaatgaaattactttcctgtgcacacagtccagcctaattggtatgtgatgttgcacttagcagccatgtggtgggcatgtgtgactactctggttttcactttagtttctaaactttttatccctctcaagtccagcatggatggggaaatgtctctggatccccacagctgtgtacttgtttgcatttgtttccctttgagatttgtgtttgtgtcctgctttgagctgtaccttgtccagtccattgtgaaattatcccagcagctgtaatgtacagttccttctgaagcaagcaacatcagcagcagcagcagcagcagcacaattctgtgttttataaagacaacagtggcttctatttctaaagtgcggtctttctctttttttttcctaccagcaaaacaaacttttgggactgattacatctctaatagattttag

SEQ ID NO: 6210 - DNA, 1493 bp, Homo sapiens
aagtgatttttcagaattatgtgtgcaaaaaattaatgtgcattcatatattcttgtaaaaggtgtctgtgtatttttaaaatatatacatccatacttcatatgcatatatatctagatctggattgataatagatatatatgtgtctgttatatattttagagttcattccattggggaattttctttcccttttattctacccccactaccgcctttatttctctatttcccttgccttcatcacctacatttttttcccagtcctaccagtgacattcaaatgttgatgtatctggttcgtttgaatataaaatatggcaaactagaattctacttttattttgcataccctactcctgactcctatctcatacacaattctgagttctcaactcttgatattgctgtcttaagaaacaaaattttatatatatatgtatacatacatacacagacacagacacacacatatatatacataaaataactttctgtgagagtgcgtctctcccctcccactcagaacatacatttaccatttgcgcaatttgtatataagcagtagcaacctgaactattctttttcttttttctttttcttttctttcttttttttttttaatgagacagagcctcgctctgtcaccaggctggagtgcagtggcgagatctcggctcactgcaacttccgcctctcgggttcaagcaattctcctgcctcagcctcccgagtagctgggtttacaggcatgtgccaccacacccagctaatttttgtatttttagtagagacggggtttcaccgtgttggccaggatggtctcgatctcttgaccttgtgatccacccgcctcgacctcccaaagtgctgggattacaggcatgagccaccgcacccggcctactattctttttctttagtgagtttgttaaagctgctataaatataaaacctgtcagaagttgtaactttctctctggtaagtgatgtgtattctgaagccttctgtttctatgggttatacatggaaattctttaaaggttttataaagggtaaatattttaaaagattagagctctgtagggttgagacctctgaaattgagtagagagaagagtttgttgagggatttttttgttttgttttttgatagtttacttgctgcctctcataccttaatgtgattttcatatattttttatatatatatatgtatgtgtgtgtatataaacacatatgtatgtgtttggaagtatagcttccttttcttttatatttattagaatagtgctttaataattatagaattgtattggcagcatcttttatagaaatataatcatgtttattttaagaactgacaacttgtttttgctatcttttagtgcaataagcagttttaaaggaaagttgtgtctgcatctttaccatggatagtaggaggaacaggcacctccatagtttaaaagggcaaagaatacagcctt

SEQ ID NO: 6211 - DNA, 1104 bp, Homo sapiens
aaaatatcagtctggcaactagataattgattttcatatgaagaagagttgggagtttaatgtatattcttgatggttaatgtgtctacataaagtgctgatacatgtattatatcacagtatcaggttactggcatggaggaccatacacttacaatattgtagctgctatatttatttaagtagattctgacagttactgcactaaacagtaaggagataagcaggattcaaggctagtgttagacccttttttttcctaagagtaaggacacggaatatcaaagtaacaaagggtgctgccattttagtttcaatttaatatcaggatattctttgttttagaaatgtagattttgacttttacagtttgaaaaagggtacctcagcctcttcagtactggttttttggcacatttcaacagaaatattagattccctttctttttcttaatagtgatcttctaacaagtttcttggaaaaactatcattctaagggaaatccctgtttataacctattaatatatttctattcctagaagagagtctagcagggattctagtaggaattactgagtgttttggaaggcacttgatagaggcatctctgctttccagcacagggattctcagccttctaaagatctagaccagtttccaagctagcttctccacagcccaccactgcctagtgtttgcttgtgtattctctaatggattttaggaggataggccttctgacagagtcatgaaagactgaaggcatgtctagggaaataaaacctgacttgcccttcagcaggaatgactggcagcggatctctgtgttcaaggaaagggtgagcgctaagcatgccagtgatggatccgaagtatttagatggattgcagaccaggaattagagaccgtttgtgactcaaggaacttgatggatctgtttagagccctacatgaatttgccaagggcagtgatttttatgaaattcaagaagcaaacgacttcgatacagctagaatatgttgcagtcttcctatttcaaacttgattttaatatttttaccaagaagtttaactgacaactctgcaaaattttcattcag

SEQ ID NO: 6212 - DNA, 1182 bp, Homo sapiens
acagccctgtcagagagttgctaacgttactccctgtctgcttaaggagttgaatctgggagcaggaagcttagcggtcccctaggtaactctcccagtcacgcagccagtgtgtggtggagccaggatttgagcccaggtggtctaactgtagagcctgagatcttagtcacagcctgcttgaagccgagagtgctgacttgtgtcaaatggtaggaggcctggggaagcatgcagcccctctaacctggcttccccacagggaatggcattgctgcctttgagtcggtacccaccgccatctactgcttcctacgctgcatggagccagaccctgagatcccttctgccttcaatagcctccaaaggactctcatttattccatctcacttggtggggacacagacaccattgccaccatggctggggccattgctggtgcctactatgggatggatcaggtgccagagagctggcagcaaagctgtgaaggctacgaggagacagacatcctggcccaaagcctgcaccgtgtcttccagaagagttgatgagggctacagctgttggggctctgccaggtcccctgggaccaactacagctccaatcagaaaccctgcgcttccttgagtgtggcttcccacttttcctgcattgtggagctgactgagtacaccggtgaggctggggtctctgcaggggaggtcactggaacagcgagcaagggactggtgcctcgctggtgctgggtctctggtttgctgcagagccgtaggacactcctggctcctcagtaggacagacagacgcaggcgggtttattttggaggggtacttgtggcattttcctgtattgtcttggacatgggatgtggggaggtggaaatgatgagcagtagcatcatttctccctgttgggttttagccagtttgccagcaagcgcatcctagcagggtccccgagcagcaggttgtgtggatgaagggacaggcacttgcatccagctgatctaggtcacacctggctcttggctgccatgtggcttattaacagcttccagtggaagtcgcaataaacagtttttggtaaatctcaccactgtttcttgtttctcctgccctgaatggattctcccctgccagcctgatctctgaagactagtgcctttgtctgtgctgc

SEQ ID NO: 6213 - DNA, 1115 bp, Homo sapiens
tcggtctgtgatctcgttgcactgctccaagtctggctgtgtccaggcggtccatgttgaaaatggaggatggctgctgacttctgactggctgagcagtgggttccttcaggttccttgccaaccctcctcccctgcccacaacttctccaaacaaagcaggctgtttgctcacttcttcaaaaggaggaatgataacccaaatctgcccaagtgacacttgagaaggttttggctggggttcctggtggatttcttactacctaacgcccaagaaaaccaactaaggactctcaaaccatacctggtgggggttcttcgctcaacctcttcttccctaggtcaaagccactatcatctgatgtgttagggatgggttctgattggcagaaattaatcagctcccaatgggagcccacggaactaagtagggtcccaagaaaaaaaacgggagctatttcacagagctgagcttctgccaaatttcattcctcaaacctttcaggaggggtggttggcgtttctaaaatgtttatgggatttgagttgcaggtgtccacttaactgactagctttgataaacaatgtcagattttaactatgaaaacgacattaccttgtgcatttttatattgattcctattttttttttaagattaaagtttaaatgttttccactagtcatttcacttctaacttggtataggaagcttagctctctacatacctatcatgtgccctgtatcacagaagattcaggaaaaatgcacttgggaatcaaagaaaatggaacttctttttgaaaagacaagcaaccatgttaactgtattgacacatcctcaataaaacctgttgtataaaacagcactgtgctgaaactgatactgacacagaggtatctcaagcctctgggttctgtaaggtgtccaggaagctctctggggcttgtgtgcctgctcttaaggatcatgcactcctcaccagctccctaacctggatttctgtcaccaccacatcacaaatgcctgatgctcgtaagctgctgaggccatgcgccaggcaaatgccaggaggcattttaagaaaccaaaggcaggtagtggctggagctggg

SEQ ID NO: 6214 - DNA, 1244 bp, Homo sapiens
ctctgcatccacagtctcccaagcaaggagttgccagcgtccctggtgaatggcctgcagcctctcccagcacaccaggagaatggcttctccaccaacggaccctctggggacaagagtctgagccgaacaccagagacactcctgccctttgcagaggcagaagccttcctcaagaaagctgtggtgcagtccccgcaggtcacaggtagatctcctgattcctggacccagctccattcctcccagcagccttccctgtactcctcagccctgccttctcttctggctctgccaggcaccctctcctgctccaccctgaagacccccagctatctgggcttgagtgctgtttgccctgactgtttcccttcctgtttttccccagaagtcctttaagagggtttgccttggatccgggcacagttgtgagggctcctctgcatcacctaccaggatgtctggaggagaaaaagacagaacaaagatggaagtggcctgggcccctgggggtgggtcctctctgttgtttttaatctgcaccttatagactgatgtctctttggccggagccagatctgcccctcagtgcattcgtgtgctcgcacgcgcagacatcccttctcccccatacacacatatacactcacagcctctctggcctcttcccttggggaggggccacctgtagtatttgccttgatttggtggggtacagtggatgtgaatactgtaaatagcttgtgctcagactcctctgcgtggagagggtgggtgcaggaggcagaccctccccccaaagccccctggggagatcttcctctctctatttaactgtaactgagggggatcccaggtctggggatgggggacaccttgggccacaggatactggttgcttcaggggtacccatgccccctgccctcgcctggaatcagtgttactgcatctgattaaatgtctccagaaataaagaataattctgccaatcctgcctgttcttggagctggtggcggaggtgggagcagatggcctcctgagttctaagaactgaagaagcctcgggctggtggtattagtcctgaactcctgccctatggtcttccagtttagtcatgaattcattcatttatttattcaacaaatactgttgcatctactctgtgtcaggcagtaggctatgcactggggatgcaatagtcagaaaggatgtaatctctgtccttgtgcagtttatagtct

SEQ ID NO: 6215 - DNA, 1202 bp, Homo sapiens
aacagatttttcttgaataaaaatgcttgtgtcaaaaattcaaacatttgtctctttcctttccattccagttctaggtctcgttccagatcatattctccagctcataacagagaaagaaaccacccaagagtatatcagaatcgggatttccgaggtcacaacagaggctatagaaggccctattatttccgtgggcgtaacagaggcttttatccatggggccaatataaccgaggaggctatggaaactaccgctcaaattggcagaattaccggcaagcatacagtcctcgtcgaggccgttcaagatcccggtccccaaagagaaggtccccttcaccaaggtccaggagccattctagaaactctgataagtcgtcttctgaccggtcaaggcgctcctcatcctcccgttcttcctccaaccatagccgagttgaatcttctaagcgcaagtctgcaaaggagaaaaagtcctcttctaaggatagccggccatctcaggctgccggggataaccagggagatgaggccaaggagcagacattctctggaggcacctctcaagatacaaaagcatctgagagctcgaagccatggccagatgccacctacggcactggttctgcatcacgggcctcagcagtttctgagctgagtcctcgggagcgaagcccagctctcaaaagccccctccagtctgtggtggtgaggcggcggtcaccccgtcctagccccgtgccaaaacctagtcctccactttccagcacatcccagatgggctcaactctgccgagtggtgccgggtatcagtctgggacacaccaaggtcagttcgaccatggttctgggtccctgagtccatccaaaaagagccctgtgggtaagagtccaccatccactggctccacatatggctcatctcagaaggaggagagtgctgcttcaggaggagcagcctatacaaagaggcaagtatctcatttcccctgcctggttgtgtttttatctcactagctggcagtttaattgtaatgtgatctaagttagagctctgattaatggtaaaaggtaatccctatttcctagacttttcgttagtaaacattaaaagcatcacccaaggaaacctttaggttaactctagctttcctaccttcctgaatttgtattgcagcataaactttctttagactact

SEQ ID NO: 6216 - DNA, 1169 bp, Homo sapiens
tttcagaaattattacgaagtaaccgcctagaaagtcctttggtaatacaggaatccataagacatgtttttttcagagaatcaaaaaccaaaaacggtaaggcactattttagagcatgctgttaagaagcctcttgtgtctctctcttgtgtttttataaataggtatctagaagagcagaagacagagaatggaaaagataaggaacagaaacaaacaaataccgataaagaaaaaataaaagagaaagggagcttctctgacacaggcttgggtgatggaaaaatgaaatctgattcttttgctcccaaaactgattctgagaagccttttcggggcagtcagtctcccaaaaggtataagctccgagatgactttgagaagaagatggctgacttccacaaggaggagatggatgatcaagataaggacaaagctaagggaagaaaggaatctgagtttgatgatgaacccaaatttatgtctaaagtcataggtgcaaacaaaaaccaggaggaggagaagtcaggcaaatgggagggcctggtatatgcacctccagggaaggaaaagcagagaaaaacagaggagctggaggaggagtctttcccagagagatccaaaaaggaagatcggggcaagagaagcgaaggtgggcacaggggctttgtgcctgagaagaatttccgagtgactgcttataaagcagtccaggagaaaagctcatcacctcccccaagaaagacctctgagagccgagacaagctgggagcgaaaggagattttcccacaggaaagtcttccttttccattactcgagaggcacaggtcaatgtccggatggactcttttgatgaggacctcgcacggtgagatatgctccttcttgatcctcagtgctttagtggcctaagtggtgtcgcctagcctttctccctggggacattctgctgtattcccccttctgtcttaagcttcagtggtgatactttcatgtccacctgtgttcactggagagtatgtgtcacagagtgattgtgtgcttttgaaggggggcagtatccctggggtgatgaagtatctcttcagtccttagtgactggctcactctctgttcatcactgcacccccaagtccaatgctgtttcttgtatttaagatagcttt

SEQ ID NO: 6217 - DNA, 1127 bp, Homo sapiens
acagtgtttatttagagaaccctgtaagacaggtagcattcctgtaagaaataaaagtaatagaacgcactaacagatgataatatacaaagctatttatctggcccagtaccagatactttggagctctcaatatagtgttaatttccttctcccttattaattcatgcctgtatcttagactgagctcctggaggccatggactgtgttttgttcctgcttctatgtatgtcatatgtttatcacagactcagacatagatgtgtcactgaacatgactgacagaattgagaggaagtatcttgggtgggtaggttgggggtgagctggctttataaggttactcatcatcagtttcttccatcacaggcatacttttgattgccctgtgcttatccatgaggccccagccaagcagtgtcccttagaaagatgattgatcaccctggctcttctcttttcacaggaagcatcggagagcaagagacaggtccagatcctcctcctcttcctcccagtcatctcactcctacaaagcagaagagtacactgaagagacagaggaaagagaggagagcaccacgggctttgacaaatcaagactggggaccaaagactttgtgggtccaagtgaaagaggaggtggcagagctcgaggaacctttgtaagaccttcccctctccccctttctctgagacccttgctcctaccagctttgatcacgtttcatcagaataccagttttgttgcctttgacataagtaatccaatccaaagaccctggaatctttggttctccttcccacatttcctggcctttccattttttgttacttttctgttcataatcacttagctagaaagcctcttatggcttctggtctcagaacttcccccacttaaccttgactactgctgtttatagggaggcccttggggcaggtttgtcctctgtgtaggctgcagacttgagatgagcagaaagggaatggctggaaaccagctgaccagcatatgactggaagacagctgtctattccacaccagaaaaatgtttgaacaaaaagcaggggggtttgttccccattcctggcatgatcctttgttctttttccctcatttatt

SEQ ID NO: 6218 - DNA, 2251 bp, Homo sapiens
gtcttacttcagtgctcagtgacgtttttattttctttaaactattaagggttcttgctcagtgaatcatcatcattgtcaatcatcgttacaatgcccaagctgttaccttaaaattcctaaatcacccaactgatattctcatggatctgaaccactggcatttttggagtgggggacagggagaagtgcagaaaaggatcaaaaggctgggttagggcacaggttcttttgggaaaggcacatttgggtgcgtgcagagaagagagctctggccacatcttgttcactctggcactgatggcaattttctttcccctcagcatgatgaccgtgaaggcgaaggcagtgacaagtgggtgagccggggccggggccgaggagcctttcctcggggtcggggccggttcatgttccggaaatcaagtaccagccccaagtgggcccatgacaagttcagtggggaggaaggggagattgaagacgacgagagtgggacagagaaccgagaagagaaggacaatatacagcccacaaccgagtaggggccacccttgacgggattcctgcccaggggagagaggcgctgggaagatggctggtgaggagcttaacagaggaacctcaagaagattctgaaaatcctacccccaccccccaccagccgcacagattgtactaccgcgagaggcatccctggcgctgtctcccactggacagaggaggctggccatggggcccaggggtcaggcccagcttttgagcagaatacaacgcattgggctttagctgtttttctcatttgttggtgtgtggggtgggggcaggggtagggcgggagagcgatgcttggatttttgtttcctattagaaaccaacagttttgttctaatttcatttcatttggagctaagatgactaatttgatgattttcgatctcttttcccctgtcctgattttaaaagccccctcctttttttttttttttttctttttttaggcatatgtagtaatattagaaacatttaatttgggaaactttgattcttgaaagagaaaacaaaagcatgtgaataaactttgaagtgttcacctcagtttgggaccaaactgcttggatctttgtaaaaaccggttttgtatgtcaaggaggagtttaaggcctttccgaccaccttgtgttccccttttctgcgcagccatgtatcacgtggagttgctccttaccacacctcacgtgcccctgagccctatttcctgatttcttctgggctggacttccccgttctccaccagcagctccagtatcccaaactttctagtcctgctgatcctcccagcaacggggtggaaactggagggcagtgtctggtctgttttctaagaaacttatgaattctattatctttacaaatatgagaaaattttttcaatattttttattaatctttttataaaatgaaaagaaactcctatgatcgattaaggaaggtggttatggctgggtggttcaggggtttttttgggtttctttttttttttctttgtctttttaaccttaagctgtttaagttgaagcattctcagatgtttggggggaaacatcctcttaaaatgggtccttgtgcttgccttctggggaggcggtcctgagcaggtgaatcataaggcatttatgcatatgttatatgcggactgcacccacctctcccccccagcctttgcctcttgcgttgttgtgctgctttccccttactttgctacatttctatagttaagttggttttacttgaatgattcatgtttagggggaaaatgaaaatctcccttaaaatttgtttcaactcctcctgcaaataaaataaatgaagtggcagatgtaaacgggttctgttcattgtcatcctgagtgtgtgtgtgtgttgagggtggtagataacttcccacggcagtttcagaaaacctgaaagacaaagggcctgtggggccttgcgcaggctgctggagtcccagacagacacagtccttcctgggaggagcattgtgtaccttggacaccccaggagaaacagattttttccactggtgtcataggcaaggactttggcttccttcatcatggtggtggggcagggatcaagggatgtggttagtaggctcagccttctacctgaaagagcctatcccacatggactggccatagggtgggccctaaccttcagactcctgccggctggggactcaactgt

SEQ ID NO: 6219 - DNA, 2336 bp, Homo sapiens
gctgggtacccaagcggcagttcggcagcgcaccaccggtgcgacggctgggccacgacgcacagcccatgacctccttggacacggccatcctggcgcagcgctacctgcggaaataacagcctcagccggggccaccagcactgctgccacttcttccagccccagccaaaggcgtggctgtcagggctgggccctgtagtgctggactctcccgggccacaatagggacagggcagggacagggacagcccaggtcacacgtggggtcagcagaggtaccacgaagctaccttttgggatgattgctcgattgtttggtttttaaatctgagaagcctagataactaatctgcttttaatcacgatgttttaatctacctctgtctctttaaccatgctgtctctggactgagcaagagggaggagggagcctgctcaccccactccagggccttccccagcggccaccaactgacctggggcgctgctccccacagtccaaataagctgaaagtgcagctcgctgcaggccccagagcgagcttcccctcctccctgctctcccaggcccctgccacagcctctttccgtccctctctttctgatccaggcccctcagtccaagctttggaaaaccttcacctcatcttaaaccgaactcaaatatatttatttttttaccataccaacttctctcccatctctaggtggctcagtccatggccactccctgcccccagcctggctggacagcaaggaatccacagcccacacgtgagctccctcctcacccccaggcagggaagcccctcctgccagtccctgtcccctttcagcccaccagtccctctctgctgccggtgatgggaggcctttctagacctggctctttctctcccgtctcagtggcttctctgaggtgctgtacacgcgcgttaacctgttcccttctctatccttccccgtggtactgagctcacgtggactcccagtgcgaaggggcccatgggttgggctgcaggcctggccgtgagcgggggctgcctgcacgctcccctagcctactcttgtgtttaggggatggtgggaacatatcccagtgcccttgcctcataatagatgtggtgactctcccggtagaccctagcaagggtcctccatggtggtgagggactcaggagaattgtagggattgggggaccctgcctgcctggcttgagaacagccctgctgcccttttgagccgagattttgaagtggatgcccgtcttgccagaaatgctgttctcaccagaatgccccctccccttgcccttactggacttggccctgcctgatgccaagcaaagacccttccccagaggcctaccccccatatgtcctcagagaggctgagtgtcccctccaggcagtcatgggccctgaggcccctcctgcctggccctgctccccagtggggaggtgactgtgtttcccagagtgtgagccgctctcctccccctaaaaagctgactcactgtgagtgaccttgggcaagttcccaaacctccttgtgcctcagtttccccatctggaaaaaatggggccacctcttgccagcagtagcagggctgcccacgcccctttctccccatgccccatccagcacttgggcgactcatgcctctgcctcagtgggcctgtgggagcctactggagcccagcacttactccccctgagcagcgagcctgcgtctgtctcagctgtccagcgctgagggccagggtcttgtgctgtggggctgggggatgccctcttttctatatttatttcatagaaagtctcctgcgggagcggaaatgcagtccggcctagggctcccagcccttgactgtcctcctgtgagggcctgaagctgggccagggcccgtcgcagcggagccccctctcagcagcccaccgggtccctccaggctgctgcccgtgcgtggtctttctcctccttttcaaagcaatagccgccgggtctgcaaagccctgtcagacagactgggcccttccaaggtcaagccatgtgtctgatgacattcctggtgaagcaaaggagaggaggatgggtcagccctcactgggtgtcacacactgagagaagtcctattgtaaagaaacggaaaaagtcacaaaaaagtttgtataaagacatatttttgtactacatggggactcttcctgcatgtcagcaataaaacttcctgatctggaaccactgtggcctgcgtctcctgccttcttgccttccctgcctacatctcggcctctccagccccgacccagccccatccctctccatccc

SEQ ID NO: 6220 - DNA, 2210 bp, Homo sapiens
tgagcccaactctgtgggcaggtctctggattagacacatctgaaagttgcaggtcaagtggacacatctggaagtggcccggctgctggctgccatggaagggccgtgccctctgtccccatggcagtttaaatcaggccttcccttcagtcctggatttgccctggagtaaaaatttcagagctgaggtcatacgtgagtcacaaaacttttaggtagaaggttaatgttctgtacaatatatatatgaatgtaaaatatatatatatactgtatatatatatatatatgcacagtgtatatatgacctgtagcccatgtgtatacaaccctttcctgcacgtctgcacacggagtgtacagaacccagccagcacgggtgaggaccagatgagagatgggggctgcagcagcaaagtctgggacggaggtctcagagagccccttggggtggcgaaggccctccacacatcagagctccagaccctgaagaagagggcagagctacatggtgctgccaggtgagtcctgcaccgccagggcctcctgtgggaggggcaggaatggccaacggacctcatctccatccgagcctgtctgaggcaggacagctgggtgtgtctgagaagcaatgtcatgctagtactcagcccctgtgccaatattacattctagttctggggcaattcatcaggagcagaagggctgggaaagagcaggccactccccaggcctgttctcacacctgcctgcagaatcacaggtaggtttcaggctccatctaggataccctagaaggcggggctattctaggtagcaaaagcctctgcctctgattctcacccacatgcagaagcagtcacaacttgcacacaacacagctcacaactagggaaagcacttgttaaagagaatgcccccagggcatggccagcatgccgatacagtgttcccatgcccctgttactgatcctgtcctcctgccttctagaacagtggacctcacatcacctcccagattgtctccattttatggattgaaactctgaggcctccagacatgaagaagcagccatagattcagtcaaatgccagccaagggtttgccttgcctcagacaacctccccagccccatttgacccagagaccagctgtcagggagcgacctcagagccagaggggtgaaagatgagaggcaagaaggtagctcctatcctagcacagcccaggctccatctgtctgcctttctctcccctgcggcatcctggcagggcagttggcagagtgccccctccccaggaggctgcagatctctgtccctggctcacccagatcggtctgttctctgcagttccattcctttagcctctttcgcaggtctgagcatctctggagcatgcaggggaggagatatctgaggtgggcttccgtgcagtcagcagcctgccccagcttcagcctcaggcgtcaggctggtctgcactgaactctgggtctgcctctggggccctgaccaagcacgcctgactccagccccatgaggagcatcctgtcttggttccgtagggatcatgggtcctcttaccactgtgcgccaagcccccagcccacctctgcctgggccgacttcctggttgggcctcccatggtaggggcctcagttcccaggctctgggctgagcccccagggagcaccatgggcctctgagaccctagacctgtcccaccacccagaccagagtgcctggacgccccccactcccactcaacatggttcccacacactggtctctgggccattcaggggatgccctttgtggacatgcagaatttctatgaatatagttttttgtaaacattttgtaacaatttgggtttcatagtaactgtgttacttgccaatcattctaggctgatgtaaataaatttccaaacaaatctgattattttcctttttaagacactgtgatatatcaaagtgcacagtttgctgtatgaagtaatatggttttaaattttaaataaaatgtttctagaaaacagggctcccttgaggcgtgttttctgtttctcttctctccttagaatgagaaggtgctgggcgacgaacttttgtcatcttcccccagggatgactgtgtcccaggcaagagaccctggtgcccagcaggcgggtggctccagccaggctcctggttcagacattg

SEQ ID NO: 6221 - DNA, 1957 bp, Homo sapiens
gtgtgtgcacatgtacactgaatggcataggatggagatcaggatcttacctgcagctagccaaatatgcgtaaaaggagaagccatgtcaccaaggggtccatgtctgagtgcatgtgaacacatgtgtacaggcatgtgtgcacagtggggagcggggggaaggccaggaccagagagtcgtgtgacatgggtcaatgcatgctgtagacaagaagccacgtggagttgaagtttccgagtgtgtgggacacacacatatgttccaggtcacagtggaagcaaagacagacaatcaggaaggccgggcaccagggtctgtttgcacttctgtcatgggagagatcatttgtcacagagaggttccaaggttgcatgggcacacttgccaggagacgggggcacaacccttcaggggctcatgctgctgatgcctttgctgtggacatcatgtcctgtttgaagggaaaactcttttttgtaattcccaggtaacaggattctaatgaaggtatttgccaatttgctgtcagcaaacacaatcattaagcgccgtcttactttgtccagtatagtttcagagcacgtgcctcattcttgctcttgtctcacacatgtgttgtgtgtgtgatgctacatgagcatgttcttcagaggctatgcatatatgtggattgtgacaggaggaagaagaagtggtgagaatttttataaaacgaacaaagaatagtggataaatagaggcagaattcaattcgagaaaccccccaaaatgtaccgactggtctttagactcctgtgtggaagcaggagggcatgctgcctcatctcctctcccaggcaaaccttgcgtcctgatgttcaggtgttgtcggtgtggctgatatttggcttctggccaatatcctgcatttgtcctagagaccagcctagtgttcaaagtgcagtggggaccacagctgcccaagcatgagctctgtctctcccggggcactgaaaatgatgctacatctgtgaggtgggacggagtggggaggtgttttcagtgaggcagatcttgtgtttttttaagtttaggtctgtcctgccagtgggcatggagctgagctggggcaggtgcatgcgtgtgtgtgtatgtgtgtgtatgcatgtgtagtgtgtgtgcacacacgcaggcactgagaggtgatgggaagcatgaaagcttgcttggatggagcagaagaaggaacctgcctgagcagatgctggactgtccctgcgtggtgccacatgccagccctgaacagaagaatgtccccactgcatccccaaatgcaagtgcctcctctccacctgctcaagctggccaagttgaggggcagtggtaagaagacaccaaccccaccgcccctgccgaggccctgggactaaggacagtgagccctcccaatcactctccccttgtcctgctgctggtttctctgctctggacagaagaaaatcctgaaagcgttgtcaatgttcaagtggccccatgctgcaagagtctctcgcgaggggtgacgcccccttggccagtgtgctggactttgagtgtctgaggggtaagagggccaccccctcctcacagccgagactctatctaacctggaagcacactctggctccacccccaacccctgccatgccctaggccctggaagatgggaatcctggcccaggccagggtaaagggccaaacaggttagaagttgctcccctccaccaggcgtgcactcaccaagaacgatcaaaagctccctttctgcctacttttccaggggtactgggtgtggggggtgggtcacagctcctgcttcatcactcagcatgaagttggtccctccctgagccactcccagctacatgcacaaacatctgaaagtaggctggcctctctggctcacatctggagtggtcctgtgtggatacccat

SEQ ID NO: 6222 - DNA, 1327 bp, Homo sapiens
ccagcaggctctcaggccagctgcttgggcttcatcctcctcagatcttctgtgggtttctaaagctgccagccgagatagccaaggccaaaggaagcacatgcctctctcaggccaaactcacctgcccctcaactctcctccagagtcagaagtttctgccgcagccctgcagagggcacagaaaatggaagacagctcttatattgccatttcttccacaagagcccaggcctcctacagcttgaccgtgaggccagagacacaagccttcggcgccttaaggatgttctagcatggctgccaatgggagctcatggtgagggatacccatcccatatgcctgggcagaaggaagacttcatccctctggggctgttcacgtggtcctaatcttctgaacttggcgctgcccctggcagcccctgttctggcagagttgaagacagagctacacaggggaaaagaggagtttggggtatgggagagaagagaatgcacaaacagaggccgccattttggattcttatggacaatgacccagtggttcctaatcctctaggaggtctctaagaatataagtgggggagtggccacagaaaattcttctccactttctagccagaggagagaggaccccctgaatttctcacaaaggatgcccaaagatgcagccggtatttgaagcccagcagaggaaaagcagattccatggaagtcccaccggctcttgtgccaatggatctcactttcctggttagcaagctgttgtctaaaccctgttcacatttggaaacctgggctctttgccatcttctcatcaacaactccccattcctggctggttgaccttggcctcactctgtctttttgaaagaagagttggttgaagtgaaagtcaagttgtccctcctcaaaaaaggagttagtgtcctactacacagactaactttgggctaggtgagggaaaccagaagagaccaaaagaacttctggtctcctggacttaccaaacctagagatgctccccaggaaaagaaagtttccagggacataatatcatagctggcagaggccccaagggtggggaggaagaagctgcctcctggagaattaaccaaagaccccacacagagacatgaggccatcctggccccttgtctgttgtccagagcagctatggcattgtggggcttggggaagacagcagagaagtagcagcaggttgggtaccagccagggggtggacctatgagttccagcttgctgtgatgaatgctctagaggtctgtgactttaagagtcttggaaaagaatgagacatgaa

SEQ ID NO: 6223 - DNA, 1109 bp, Homo sapiens
cagcaggttaggctctggctaactagtttcccctgaggacaaaccttgttaaaaacagaatgctctggcatattttgaaatgattccttttccccttccactgccagaagcacatggggatttttctccaatattcacttaagaacctggtagaattccaggagtaaaactcacaaaagcgtgggggcccagtgaaggcctcccctgaggtttttgtctctcagacttatccacactgagcctccagcaactagtcaattacactttcggttttcctacctgcacaccgattcccatggaggtttctgctccattaatttgtaattctctctatttacctatctctccaattctgggggcagtggtttgccctgtgacctcacttctcttacagatctaagaagagttgttgatttttcagtttgttcagccttaactggttgttaggacagaatggcaactttcaagcttgtcatatgccagaccagagactggaaaccactactttttagaattttcaaaacaattaaaacaatccaaatacccatcagctggtggatagaaaaataaaatgtggtacgtctatacaaagtaatattatttagcaataaagaggaataaagtactgatacatgacactaatatggatgaaccgcaaaagcacacgaaatacaaaaagccagatgaaaagaccacctattgcatgattccatttatatgaaatgttcagaaaagacaaaaagtaaattagtggctgcctgggagtgggaatgaaaactataattgactgtaaatgggcacggggattcttactgggtgatgggaaggttctaaaacaggattgtgcttatggtcatagaactcagtaaatttactaaaaatcattgtacactttaaaacaggtgaatcttgtagaatgtaataatacctcaacaaaatcaattatcaaaaataataaaggtttaattggaaaaaatatagaaaggcattaagaatgaaacaagaaatgtcttctattcttatgttaaagacataagttcctcttcttcttcctcttctaaagggaattgtactgcacctctgccagaaaccctcactgttcacttaaa

SEQ ID NO: 6224 - DNA, 1175 bp, Homo sapiens
ctgactctttgggcctaggcagagtggggtccttaggggctccaaggaggttccagaccactgaagttctgcaggaaattcccaggcctcccaggccctgtggattctccttcagaaatcacagcctcattgggatgcggagcacgtggcggagcccatgccaaagatggatcaggagcctccgcgtgtggcctggctgggatgattactgccgctaagtaaattgccagtgcctcctcaagccccctcctgcctggctccgtgattcatttccattcagagaagtttaataattagcaaaggggatttctaacaacagatggtgccaggccctggggagtggttctgccgcagaagcacttcacagagaggtaagctggagaagtttccctgttccctccaaaagggtgtctccaggcctctgtgactattggtgggcccgtttatataatgtggctgcaagaagagcagaagaaaaggaaggtgtcaggtgggggaatgtggatgctgatgactgtgctggagaggagatggcaggcagcagtcttcttcactctgctatccacctagaagtctttgagcattgaggatcagagctgccgaaggccacccagaagcctccctgggattggggcaaggttctaggagctgccaagaacttctaagaggcttctgatatccaagtataacctttccccactgtccctctctggaagtggagcaatttgcgcatctctcatccttcttaaggcacagaggggaggacttagactctggattctcttgattttagaggcccaactctaagtgtgttaagtaaaaagggaattagcaggccctcagaattggcagtctaggggtagactggttcagatgtggctagacctgggtaatcaagccatgccatcccttgactttgcttctgtgaggcctagctgcagcctcattcaattctacggcaaaggcagccttccatttgtatgggaaggatgtttcccctccaagctcttgaataaagccctcccagttggcctggacttggtcatgtggctatcctggagtcagaaggatgatgaggctgctttgccattttagacacttgcccatctctatgtcttggagaaggtgctctatgactgacagccctaccagaaccaggaggtgaaggaggttct

SEQ ID NO: 6225 - DNA, 1164 bp, Homo sapiens
cttcttcgtattaagccccaggattaattagcgtgtcagcccaggtcatttatatccaagagccctgccccatttgattctcagcccatggactggggtgttgtgcctgcgccaaacgtgactgccagagctgtgccagtttgggcggaggatgggaggactctgaggcctctggagactcctggggagctgagtttctgtccttctgagcccctgcttgaaccccagctggagccagggagctacagtggacatggacagaaagagcgagcgagcgagagagagagaatctcatgctaaaatccaaacacaccaccttggctgggcccagtgccctctcccttttcccatcccccccatccctgggatctcagggttctggctggggctttaagaatttaggccctctggagtgtgctaggtgcttctgattctcaagactggcacctgagccggctgagcttggagctgaatgcttctccagcagccaggcatcgccgagcaccagcccggagagggctttcttgcaggtgccagaggggctctctgggctgaggagcatcgtacccaccccctctctttgtgcctcttttgggggctgaaatttcctcttagacaaggagatggatagctcagcagtgtgacagagtgttcaaacaatccgtcttgaatagatgaattgcattgctctgtctttttgtaattgtgtctatcagaaggagaggtcaaggcattgattgcttggatggtttgcaagtaacaaaagagagtgagggagagagcaagggagagagaatgattggattgtagtctgcgagaaaaaatgatcattgattattttatgtgaatatgtggaagatgtattctatgtatgattatcaaatgttgtgcattgaaggttttcaagccatattgtttggcattttattattattatcgtcgttattattgtttgggtgaatcccagtcttaacttacggaaggcagtttaatgcatagattctctcagccaaacgggcttcagtgacctcccgtggggacctgaatttccaggttacctgaccccaaatctgtagtggaggggctgctggacttggagccaggaggtctgggttttctgctgcatctgccaccagtttgttgggccatttccatcaaatcaca

SEQ ID NO: 6226 - DNA, 1160 bp, Homo sapiens
agggccatagaaataggagtggatctcttgggaatatctctgctgattgccgtcatttcattagaaacacaattatttcgtaaggctgggctaacggtgttggaaatagccaagtgcagcgctggagtgacagggaccacatcccatttgatactaattggtttgatgatggtaattgttgtattgcagacagttgtgactatctcctaatttaatataatcaataaggtaacaacagctcaatgcaaatgagatgtggggacccatggggccatttgtaagttatgttcttaatgcattttcctaattagctgtagcagattcccccctcccccaccttctctggagtgtgagagaagtgatcatctgagatgccatgcttcgctttctccaaactttcactttcagagaggctcagggagagctcatcctggagctcccaggaaccccaaaggctttcttaggaccagctgaaatggagtcagggagtcaacagttcaataggatacttcccttcagattcatgacaccccccagcttgaacctatgtagtttctctgcttcttccatctgattggaaggttctccaagacaggggttgtacttcttcccatcagactggccactttgtcactcagggatccatgtctgtttcactgaataaaggctccaaatgccgctgctggtgttttattcatgacaagccctcatggatgtgcgtgtgtgcatgtatgtgtattgcagtgtagcccagacagtgtgtcaggaatgcagcatgccagcagggatgtaacttaggtagtggttaaaagagactctgggccgggcatggtagcctacacctgtaatcccagtgctttgggaggccgaagtgggaggatcatttgagcatagcagtttgagaccagcctgggaaacataatgggactccatctctacaaaaaattaaaaagttagctgggcatggtggcatgcacctgtggtcccagctactcaggctgaggtgggcctgggaggttgaggctgtagtaagccatgattgcaccactacactttgacctgggcaacagagtgagaccctgtctaaaaaaaaaaaaaaaaaaaaaaaaaaagagtggttccagactgcctgggttcaattctcagctctaccttttact

SEQ ID NO: 6227 - DNA, 1224 bp, Homo sapiens
gcagagagaatatccagtgtaaatgtcagaataaccagagggagggacgtacacatgagattagataaataggcaggcaggggccagatcacagaatcctgtagggatggcaaaaagtttgaatcaatctctgtctctgtctgtttctcccttctcccttcccctacctctcattctaagagtgatgataagccactggagttgtaaggaagagaatgacacctcctaacggatatttggctgctgtgtggtcggcaacttttggaaggacttagaagacaaattcagaagacaaacttaagcttgtgccactggcctgggaagaagcttctttattcggaggtggacccaactgggagctctggccgcgcgttcaggttaactaggcggttgctatgaacgggcagcttggcggttgctagggctggagcgggctggggctccacgcagggcgacgcctaggcggctggagcgggggcggagccaggagggtgacggcgcgcgccgcgcgttcacaggaagtcgctctgaggccgagagggacgcgagcggaagtgacgtacgtcgtgcacacgtggtccggcgtggttcaggcgggtgtcttcggccgggcttgggaacataaaagtttgtttcaccacgtaagccggacctcgcactccggtcccggtctcgtcgccaagatggtgaagcccaagtacaaaggacggagcaccatcaacccgtccaaggccagcacaaacccaggtacaggcggcagggctgatcgagggtggagcttggaggaagtatagggaagggctccgaggagcactggaggggaaggagggttactcgagtggcattgcttagaatgactacgagcggggtggctgttggggatgaaaagggaaaaaggaaagcaatatttgtggtggtttcttctcaggggggaactgaggagggctcagtgcacgcctggcaggccaaagtgtagtcaactggtctgaagtcaaggaaagtgaacactcaggctgacagccttgggtcctctccagttgagagatgcagagaaagtcagattaaaaatggtgtaggttgacccttcgggccttttacacgtgatcatacttgcctgccaccttagctttgacctttaaaatgagaaagggcttatagttttggcccttggaattattctatctggtaaagtgcttagagaaccctacaaagaagtcagtatga

SEQ ID NO: 6228 - DNA, 1724 bp, Homo sapiens
gaacccgggaggcggagcttgcagtgagccgagatcacgccactgcactccagcctgggcgacagagcgagactccgtctcaaaaaaaaaaaagttactaaacaaggctgggcgtggtggctcacacctgtaatcccagcactttgggaggccaaggaaggtggatcacctgaggtcaggagttcgagaccagcctggccaacatggtgaaaccccatccctactaaaaatacaaaaattagctgggcgtgggtgcctgtaatcccagctacttctgaggctgaggcaggagaaccgcttgaacctgggaggcggaggttgcagtgagccaatgtggcaccactggactccagcctgggcaagagcaagactgtctcaaaacaaaaacaacaaacaaacaaacaaaaagaaaacacaaaaaacattactaaacaagatttctagagggaattaacaaaccagtgcttatttaccaataaactaatacgctaattgcaggaaccctgattaaagcaggcccctgttaacacaagattcttaggatatacttggaaacaggtgcattggaaaccactgtactgagaagtttatgggctcaagactgaattggaagctaggcgtggtcgctcatgcctgtaatcccagcactctgggaggctgaggtggaaggatgagttcaggagttcgagaccagcctgggcaacacagagagacgtgtctttaaaaaagtaaaaaatgggctgagtgccttggctcatgcctgtaatcccagcactttgggaagccaaggcgggtggatcacttcaggccaggagttcaagaacagcctgaccaacatggcaaaactccatctctactaaaaataccaaaaaaattagcagggtgtggtggtgcacacctgtagtcccagctactcaggaggctgatgtgtgagaatcacttgaacctgggaggcggagtttgcagcgagccaagatcgtgccactgcactccagtgtgggcaacagagattctgtctcaaaaaaaaaaaaaaaagactgaatcagaattttgggaactagggtacaagagggaaggggaggaaggaggaaatagaccccagtggtcacctcaaggacacccagccccagttaggtaactgatattaagccccaccagagagatgagcaggcctggccacctggctttggggcttagctggggaaaccaaggcaggcagggacagctgaaagggttggatgttgacctgtagtaatttacagaaggtagcaacactggcttcatttaacacacacacaatctgaaaaatactaaacatgggaaggccagggggcagaggcagccattctcacacactgctaacagcagtgtaacttgactcagttcttttgaaggctaatccatactgagagccataaatacttcctacactttgacctactctcctaaggaaataattcaaaagaagaaaaacaaaccatttacaaatatgtttaatagcagcatttctttaaagaaaaacaaagttcaaatgcccaataataattatgtttaacacttggtacacatataaatagacaaaaggctgcggagaacactggatttaaataaaggtgttatgggtataattaactataatttattttatgaataaataagaaaaaagtccctggctataaaggatagtggaggtttatttcccaatattcttccatttggactga

SEQ ID NO: 6229 - DNA, 1219 bp, Homo sapiens
atgctcttccttctccctcttctcaggagttccaggatctctggcctcagttgtccttggttattgatgggggacaaattggggatggccagagccccgagtgtcgccttggctcaactgtggttgatttgtctgtgcccggaaagtttggcatcattcgtccaggctggtaagtctctttcctgtggtgtggggaaataatttgagggaggttggagagatgcaaaaaagctttgacaagataaagatggtgcctcctatgttgccctgaaggagtgtgggccaggtttggagaagtggtagttgcagtgggactaagtttcctggctttcttaggattcaaaaggtttcatcaagggttgatgaacagggcttaacaaggctagccagtttcgatgtccctgctcaccagcctctggtgggctcgggacttctgagaagtcagactggtaactgtcctgtttcctcctcagtgccctggaaagtactacagccatcctccaacagaagtacggactgctcccctcacatgcgtcctacctgtgaaactctgggaagcaggaaggcccaagacctggtgctggatactatgtgtctgtccactgacgactgtcaaggcctcatttgcagaggccaccggagctagggcactagcctgacttttaaggcagtgtgtctttctgagcactgtagaccaagcccttggagctgctggtttagccttgcacctggggaaaggatgtatttatttgtattttcatatatcagccaaaagctgaatggaaaagttaagaacattcctaggtggccttattctaataagtttcttctgtctgttttgtttttcaattgaaaagtaattaaataacagatttagaatctagtgagagcctcctctctggtgggtggtggcatttaaggttcaaaccagccagaagtgctggtgctgtttaaaaagtctcaggtggctgcgtgtggtggctcatgcctgtaatcccaacattctgggaggcccaggcgggagaactgcttgagcccaggagttcagaatcagcctgggcaacatagcaatactccgtctcataaaaattaataaataaaaagtctcaggtgaccaaaggctcctgaagctagaaccaggtttggataaagattgaagagccacaggccactcttccctctgagccattgggcctagtggtgtcatgtattgtaattg

SEQ ID NO: 6230 - DNA, 1151 bp, Homo sapiens
tcctgtgagcaaagccgacaagcagagactccttcagaccctcagacagaaacattaagtgccatggatgtgtcagagtttctatccctccagagcctggacaccccgtccaatctgattcccattgaagcactactgcagggggaggaggagatgggcctcaccagcagcttctccaagtgaagggcccatgtgtgctcacctctgggaaaagcgggtgagcaggaggcatgaggtacaatgcctgccatcatgggtcagaaatttgaaggatgaagaaatctactgtttgaaatcctcacctttcagacgtattttctttattcacatcccaggagcatccattttaaggaactattctttggaaaaaaacaaaaaacaaaaaaaacaacaaaaaaagctaagttataagtgaactgtttggctgcactgtatgtcacttttgcttgttgtcatgtgaacttggaaactaaggttactcgtgtgcataaaaattctaaatgaaagggtgtggtttccatcaatctgatgctgcccatcgcttgcactggggtctttgtggatcgggcaggagttttcagtgtgttgggtgttgctccttcctatgtgtcttttgaatctgaggctgacatttgcttggaaggccagacccttgctccatcagagagggcagtggcaaaggccagtgaggcagctgtgagttggacagggttcaggtgagatggtgttgtcatttgtgcttagtgttggtggtgctcagggtggataacacgggtcgttctgcagcccgcttcagcacaaataggcagcttaaggcctggctcacaggctgtggggttgatctggctctgcagaggccctaggcagcttgttgactgctgtctgttgatgacgtgtgtgcaaagcaggctctagcaacatgatcactgtccttgccttcctggttctttctctcggttggttgccagggcttgcagatcgcagtgaattttccttggggaacatcgctgttttgtcctagagtgaacttgtggcttatggccagtgctgtttggtggtctgccttctttttaatggtattttcttcctcagagcagaagggctgcattttgcttatcagaagaaggtgcagatttaagggaattcatatg

SEQ ID NO: 6231 - DNA, 1165 bp, Homo sapiens
acaatgctagtcccggaagttgtgtcagtgaacaggataaacgtagtccttgctctcatggagcttacagtccagccgggaagtagctattcacccatttaattggacaaatatttatttagtgcctgttgtttttcagataactgttgtgcctagccatgaaacataatgatgtaaatggtttaatcaggtaattattgcatcttaattttatcatgtgctttacaggaagctctgaaaacctataattaggatgcctattctagtctgggatagaagtaagggtcagtcaggaagagttcctagaggaagggtcatttagtggaggcttgaattgtgcaaatgaaaaaacatgaatgggagtagagtttggcagggcagggagacaggagggggtagttaattatttattgcagttacttataaagttaacaaaagctgtagcatcttaagagtgaaattctgctcttatcattcagcattgttgtaagctttatgattgatacatgcagactcctttatcccagcatccacaatcccatttctccttagtggtgagtgatcattttcaattctctatctggcagcacaaaggaggtttttagtcttgatgggaagtcagaatatatgcatgagacaataattaacagtataaactaagtgtcaaatgagtggtatagtaagtattactggcatttagagaagggcactgtcatgtagacatggaatgatggtgaaggagcgtgtagttcctgaggctcgcgttaaaggaagagaaggactcagaaaagcggagaaggaaggaactaggcatttccagtggagaagaaggagagaacgaagtcagggaagtaggaattcagtcttgcaaatgggtaagagtgtactgttgcttataggcctagacagagtcttctgtttggctgcttactgagtaatgtgatagaagacagaagcagccctggaaagatctttgaatgttaggctaaggaattgggactttatcatttgagcagagagatggaatgtgtggaaaactgttttagacttaatctggcaacaaatgactgcaaaactaggtcctgagacgtgagaagaatgcctggattagtgattcaataaggaattcagtttaacaaatatttatggagcttcttctgtgtgg

SEQ ID NO: 6232 - DNA, 1565 bp, Homo sapiens
gtgagccaccacgcccggccttttttttttttttttcttttttgagatggagtttcactcttgttgcccaggctggagtgcgttggcgtggtcttggctcactgcaacctctgcctccttggttcaagcaattctcctgcctcagcctctcgagtagctgggattataggcgtccgccaccatgcctggctaatttttttgtgtgtttttagtatagacacggtttcaccatgttggccaggctggtctcgaatgcctggcctcaggtgatccacctgccttggcctcccaaagtgctgggattacaggcatgaaccaccacgcctggcctaaaatgtttttaaataactgtacttgtactcactcaccctacctccagggcatagtcagtctgggctgagatccccatgatcagatatttgatggaaagtcctgaaaggccaatgagttggatggcaagaatgcaggcagaagctgctggataaaataggctacagccacctcagatgctttcagtgctctgtctgaggatgtgtatatgcatatgcaaactcgacccccgttcctgcccagataatggctcaataactctgaggctggttgctcagcctctgagggcaatacaggcatttaaaaaattaaaatgaccaggcacagtggctcacgcctgtaatctcggcactttgggagactgaggtgggagcatcacttgagaccaggagtttgggaccaggctgggcaacacagggagaccccctctctacaaaaacatttttaaaaaattagctgggtgtggtgatgcatgcctgtggtcccagttacttgggaggctgacgtgggtggctcacttgagcacaggagtttgaggctgcagtgacctatgaccacatcactgtacgccagcccgggtgagagagggagaccccgtctctaaaaataaaatgtaaaatcactgaaaaaatgagtgttcggtgaaacaagtgggattttctgggccagcaagtcttccaaactgtatatgatgcatcctgtctccatgtgtaatatattttaatgataaatgtatttttaacagtggcggttgtgtatgtttttatgtcttaagagatggcagttcgctgcagctggattttgtggctcaagccttggggccaaagagacatattcctggcagtctggtgggtaccagtcactattcacatacttccagcaagaaatggttatggcactgacctgaaccccttgacccctggtctggtctttggagttgtcccactctgaatattcgagagaagcagcttatggttaaaacaggcagtggcagctgggaggatctaacagctagatcctccaggcatttggaaaggacaggggcataacgaaggcagaatcgcttcctgggtacgaatgcccactacttctgggcactgtgaaatgggtttaagacgcgggccagcaggacaatgtgaacggtgaaaggaagggagtggccggtaggtggcgctaactggcccgggcatgagtcccgccgtagccgcgtcctcttgcaggggaagaaagttggg

SEQ ID NO: 6233 - DNA, 1140 bp, Homo sapiens
taagtgcagcagctgcaagcgccccatcgtaggtgggacaagggtcaaagaacggagtgggtagggtgcaggcaagggagtgggatgtggtattgggtgaggttgagggccggaccatccccacatctgcatagctaacttccagcctccctccaggactcggtggaggcaagtatgtgtcctttgaagaccgacactggcaccacaactgcttctcctgcgcccgctgctctacctccctggtgggccagggcttcgtaccggatggagaccaagtgctctgccagggctgtagccaggcagggccctaagccagggctcctggacccaggctttcccataccacgggcccaggactgtggctccttttctaaaccacctctgggactcagctccccccgccaaaaaaaatgggtctccttctgggctccaggattgtctccccactccagcatccccaaactggtactccctgacccagggccccaaacctgggctcttacagagcctccatgagtcaagccccctccccacacctggactccagaattcaccctctcccctgcagtctgggttcccagactgagtcctctccccaaatcagggctctagacccgagccctccaaacctggactctgggacttaggcccccttaaatctagacttctctttataggtttcaggtctcctatgggtgcctgggaagtccttgaaagtggactgttctcaggcttgacctgccccaccccatccccgcggttgaggctgtgggggcagcagatcaggagcccactgataaggggccctagggtacagggtgctgcccagcaggtcgccaccgagtgtcttctcattttatttcagctccattttgcccatagatgggcagaggggtgagattggctcatcccccttccagattctgcaataaagcggtgtgaggaagcaggggcctccgtgtgtgtgtgtgtgtgtgtgtgtgtgtgtgtgtgtgtgtgttcagggtataatggggaaggaagggtttttgcagactgggaggctcagaatctctgctagacctcatccttgcagggtggggtggaggggggccgggccatggggtgggaagtctctccccatgaaggggatccccgcca

SEQ ID NO: 6234 - DNA, 1212 bp, Homo sapiens
ctatgttctgagtaccagatgtctgggttctttcttctgcattagataaatgatcatgctcagtgtaacaaagggaattaaaagttttcccacagtccccttctaggggagaaactcattgtgtcactgaaatgtttagcttactttaatcttgatatcagcctctacagaccttttattctaagctatcgagcttcttgattgcatttggttgaccacgagtgaccctaaggcattgggggactgtccactgggagttggagtgagcacgtggtgctgcaacaggcattgttttacatactttgtctctagtattctgacaccaagtgtcaactgtggtactttctttgcctaggatatgaattcataattgttgcttttgttgatggttgataccctttccattgatttaaacctaacacattatttctattccacatgcccagtagacatatattccaaagccactggaccacttgagtacataagtgccactgtttaatgcaatatgtatattcaggtctgtaaagctaacagtgtgacttggagtgcttcctgcaggtgattctgacttgagtatttacatggaccatggtgatatccaaaagaaaaatgctttttatatttatagattatttcattgaactatatatgaaatgggtatcaataaatgtatttactccaaaatcagcgtttctccttgcctgaggtatggagggtggtggcggaacgttgggttgtcccactttgccgttttctcatccatttctttttcttttgctgcttcctgtggttaatgtttcttatgtgtcagagcttcaggttctatcccgatgtgggaatttcatggccttgtgtctaggtatctcccctggcccatttctgctctagggtagtaaatctaagctcaggtgaaaatgtttttggttgggtgtttcatatacacaaatctcacacatggtggggagtatcctggtcctggcatcattaatgtgttaatccaacctaagaaggagtgaggagatgagtgaagtaaaacacacttaaacaattgtaccgattccagcttgttttctgtttcctccagttgctgacatactcattgactcactcttaaatgtcagttaaataattgtttgtctatacaaacaggttgggtctaaactaatcagagaaaaatagacattagtttatcagtgggaggaagacaga

SEQ ID NO: 6235 - DNA, 2425 bp, Homo sapiens
tgacctcaagagatggctgctgtacactttttgcaactggtttgatgtcacatttcagctccaactttgcatcctgagaacacttaaacgtttctgcaggtccattttatacaacttgaaagaccgtaaaactttctggttgccacaagcatatctttcttttctgctcatccaataaacagctgtgccctactgtgatagattttccaaacaaaaatacctggagcagcagtttagcaaaatatgccttcagtggcattcaacaaatggagtttccccaagcacagttctgtaagaagtgcgtgtgagagtgtgtgtatatgtgtgtatgtgtattttaagttattatttgtattgtgcaaaaatttttttttgatcttggggattctggctgtgaatttggtgcacgacaattatggtaaaaaaacatttgcttggtctaaagaagatcattaatgttttgtgaccatacaagttgtaacagtggattgtttttatgtgtaggtattgttaaatacagggactgtttccaggcacagaatatgaatcgtaagttaggatggacattagatgtgattatgatgataaagcgaaggtctgcggtcctatatctacagacacgtggtgagaaattagaacaaactggagacgggccattgacacatggactctgcctgggcatgttaggttaattctttgactccaagccttaaaatactcacatggagtcagcgctcacctcattcacacaattatcatagagctccctggacactgaacctctaaagggaaaaggtctaccctggagccaggagcatcagggttggcttgggagcatgagaggtgagcccagggctaggcctgggccaggccccggcagcactgctacttgggaggagccacttcacctttgtattagttattaaaaaatataatttgggctgggcgcagtggctcacgcctgtaatcccagcactttgggagtccgaggcatgcggatcacttgaggtcaggagttcgagaccaccctggccaatatggtgaaaccccatctctactaaaaatacaacaaagttagccgggcgtggtggcaggcgtctgtaatcccagctgcttgggaggctgaggcaggagaatcacttgaaccctggaggtggcggttgcagtgagcacagatcatgccactgcactccagcctgggcaacaaaacgagacttcgtctcaaaaaaaaaaaaaaaacatagaatttggatcctttggtcgggttctcccaaattcttttgaggtgtccatggtcaactgcttcagctttgttttggcaaccccctgcccgaagtcgcatataggctgttcttcaccttgtttccaaggctgaggaacagaaagtagcctctgttttgaggaggtggaagttaagtatacatttattttttactgtgacttgttcaggaccacattttacaaaatgccttgtttccttcattgtttctggaaaggaaagttctattaatattgttttactttgaatatagaatagtttttttaattagggcttattttgaaaaattctgagtttaattcaaatgtatgccaataccttccaaagtaaggtaatattcagagacagttgttgtgatcagatggcttagagaaatttctggaatattcacattcgaagattccttattaatgaatgtctttgacttaaatctaaccaaaaactgcaacattattctttgtacattttcattatatagtgttaacaagcttagttgcaaacaaataaaatacttaagctatttgtttaccttgccttcttaatactgtgataatgtttattaattcaaataacttatgtgagagctgctataaccatttccccagttcaacattgcattgaaaatttatggacctttaaaaaaaaaagcccaacagtgatttttttttaataattaaagaatgattttactttgtatttgaagggtgatttgtttcatctcttcttttttcagggtagtcacttgttcctaaaagaggaacatagcagtggctgtaatgggaatggctctgcagtgggctagtcacaccaaaataaagaaagggcagctgtgggagccatcagaagctgtggaggctggactggtaatggggaatgctgccccactgaagtcttgttttagagatcagtgtgatgtgctcacttaactataaagtgtcagtccccattccaactaagtggctcctggctgggaagtagagtaggtttctctaaggaaaatgacacctgctcaccacccgccccactataccacattgttgttaggctatcatataatgataaggtagccctctgaggccacaaggtaagaccaaaccaccagggctgggttttgggatcccctctaaagagaccacacatgtttgt

SEQ ID NO: 6236 - DNA, 1208 bp, Homo sapiens
ggcctgctggaggtaggggtctgtttttttcctcccacataaagatttgccttggagctcggatttcagccctgaaggctctcttgcgagacacttctgcaagttaatgcctaatctgcgccttgggtgtatggggagaaagttttgacagacaagagggcctgtggactgcatttccctaactgctgtaggtgcccctgaatggaagccagggatgcgtggccttgggaggcccttgccttgatctttaacatccggttctgggagtttgctttggctggcagttatgctttccacagacggggagattttcccagaaacgacacaggcagcacttttccccattttattcagctcgggcccttgtgactaggcccttagtttctttttatctgaaggagaggaaacttcagcccctatgactgagtccagcgtacttgtttacagcacctatccagtgaagggaaactaatgaagaagctgtaaaacgccccccctctcccccctcccccccactttttttttcttgtggcattggaactctgcttgggaatgcagcaggaaaaaagtagagatgaaatgcgaaaaaagacctactagggtttttgcttgttccctctgcatcagctcctgtaaactgtccagcttttcctgcctgcagcaagttttctgtcaaccccctgtggtctttctttttaagaaatgtggttcatttcagagcacaaagaggttagattgtgctgctgaacttcattgaaaaaatgctgctcagtgaatggttgcattaagtttcctttgcaggcttttgagtaacactgctctcttcagagagaggagatacattaggaccgtcccgggctgtgacagcttcaaaccagcagaattaagacccaaaataggtgaagaaatctcagcacctcactggatggtagtactggtgacctccagcggaaaggaagttggactcctagcaaatgaggctgggaaagaagggggcagtagggcttgttccaggagagacctcttttgttcagttttttttttttagctgtctcactcagtttggctttcctctgaagggccttgatcaggtgtataggaacttaatccttcccagacacaggtctctttcttgaggggaggaatgagttaaaaatggttgcccaaagtaaattacctcgagttgtatacggtggtcgtgcagtctg

SEQ ID NO: 6237 - DNA, 1208 bp, Homo sapiens
ttcagctgcccagacacccccacgtctttactgggcacattccagcagtcctaaagtcctgaccctcaggagtgaaattctggtctggtgtctcactcctggaattccttcatgaggcatggctatggcatgaatcaggtgtcagattggaaagccaagagatcaggtggcttgtgatcataatataaaaaatttctaactggtaaaatggttttggagacttaatgcgtattgaaagtttctttctgctttattgtcagccttagccgcctcttgatggtctctttagttcctttcctggattgtctaggagcatgctggaggcagtcagaacataaggagttaaattgcagtgaacttatggagaatgattaaacagtgattaagtgatattttaacttctgtttacaggggagaaatggatgtcatcaggaaaagggtttgtttgcagttttgactgaagtcatcttatcttagccagggctgcctgcccttattcaatttcatttttagctgcaaggtgaactcccccacacacttattttctgatgtccatctttgtctttgctcatattccaccccttcctttctttccccagaccccgtgttgctctaggaaaacttgctccactcagaacagagttggggtgggacttagctgcccttctgcatcttctgtttctggaagtctttgggatgaaccatacatgggagagtcaggatactggaatgccattgaactagtggaaaaagcactagataggcaattgaagaggcctgggtttgaattccagctctgctacttattagctatgtgatcttggacaaattacttaatctctgtaagtcttagtttcctgttctgtaaaatggaggtgataatttctacctgaaagaataggaattagagaggattagagttatatatgtaaagagcattgcctgacacacacacagtaggcattcaattatgtgtgatcaaagaggtcagagttgatggtagaatttagactgtctcggttagccttttgcctgtttttcccagtgctaattgtatagtttatatattatagtttaaagttatgctgccaggcgcggtggctcatgtctgtaatcccagccctttgggaggccgaggcaggtggatcacttgaggtcaggagttcgagaccagcctggccaacatggtgaaaccccgtctctactaa

SEQ ID NO: 6238 - DNA, 1147 bp, Homo sapiens
ataacactttctaaacacttttccttctatgatctcatttttatttttatttttatttttatttttttgagacaaggtcttgctctgtcacccaggctgggacgcagtggtgtgatctcggctcactgcaacctccgcctcctgagttcaagcaattctcctacctcagcctcctgagtagctgggactacaggcatgtgccaccacacccggctaatttttgtatttttagtagagacggggtttcaccatgttgtctaggctggctcatttttatttttatcatatctttgtcaaatggataaggaagattttatttttaaaaactatactatagatttaaatcctttccttttttctcttcttccatttcagggtcatgcgtcttcaggatgagctggtcaccttgcgtctagagtgtacaaacctgtaccggaagggtcatttcacttcacttgaattggttccaccctctactttaaccaccactcatctgaaagcagaacccttaaccaaggcaacccattcttcttctacctcctggttccgaaagcctatgactcgggctgaacttgtggccatcagctcctctgaagatgaaggcaatctccgatttgtgtatgaactactgtcttgggtagaagagatgcaggtgggtgcatatccaaaagcttatgcagtacactgatgtttactggatctggaagcttatctaagaggaccaaattgctttgtgttccctgtgcagattcccttaattattattattcttttatttgagtgatggggtcttgctatgttgcccaggctggactggaactcctgggctgaagtgatcctcctgcctcagtctcttgagtagctgggacaataggtatatgccaccatacctggcttgactttcttaattattgatgctgcctgagacccaagcccccttctccttaaatcttgcatggatgaggttggcacaaattctcacagtcccgtactgaatagcatacagttttctcatttgaaaccctttggaatcttttccctcagctaactgtactctgagtgagagcttggtgaaaattgcaatgtctttacatctgttacctttttttttaattaaaaaaattttttgtgggtacatagaaggtac

SEQ ID NO: 6239 - DNA, 1164 bp, Homo sapiens
caataaacaggctgtgtgagaactgaaattaggctataacagagatataaagaaagtgctctgaaagcatagtaaggatcagtatccagcttcacagaagagctatttaaattgagtcctgcagttaatagaatttagagtcagtggaggacattgtaggctgaatagtctaagcaaagccaaccagtcattgatacccatgtcctggtgtgtcatgtactggtgtgggtactgacgtgcaggaactgtccactccagccaagttatctcttgtctctggtccaatgcttattctgtgttcccccattttactcacatctgggtcaggtcccatgtcctttgtgaatcattttccaataattccagtgtttgtgcccttctctgcaatcctctggcatgcactgtttatacatctcattttgccaccaattctatattgtaggttcctttaaaatagggaacacagcttttatttatgctatccgctccccactgccaagagtgcttatgctgtaaaattgaattccattttcaggagttgacaatggaactggaggagaaacaggatgtgtttcgttctctacaagatacagcagaactactttcacttgagaaccacccagccaagcagacagtggaggtgtgtgacttgagaatgtgtgaaggtcaaatgctgagaggttgttgttataaaagtattcaaattagagactttgttccactgaaagacttggaggaagtgtcagggaacatttgtcttgggtcttctctcttttcattcctgactgttcctatgtccctcaaaagcctgcaaacatttttgttagtctaaggaaactactaagagaaacaatagaaggggcattggctcacagctttcagaggaaaagtgacttggaccatatttcttcaaataactatccagacagatcctgacttgactcttgttggtgtggtgcctttgccaaaagaagagaaacagtggaagaattccagaggaatttatttatgcctgggttttgctgcctagatcatttacttacaactgagtgtggaagagaccttttctatgtaaccccctctaacaaaaccattttggattaaaggaacacctcttactcgtgggaagcattgagcagatgccagtcaagtatctccacatct

SEQ ID NO: 6240 - DNA, 1238 bp, Homo sapiens
ccttaccccaggcttacattccattggcaagattttttcagaaggagcttttttcattactgtgagacttttccccacccaaatggagtaaagtggactcaggaataccattttagagttcgagacctgaggttcttacaagctagaagcagcaatttgaatggtaaaggaaattcctaattagaataagtaacatctttggtcttcttggcaagggtagaaggttgcaggctttttctcactctgtaagacaatcatgtcttttgcataagaatatgtagtaggtgaatacttgtgaacaattattaagagttatgtccagtggggcacaaagggtggttctggggtgctggtaatgttctgcttcttaatctgaatgctgactaaatggaggaattcaaattataaaaatcaacatgtttacgattatggtttatgcactgttttgtatatatgttacttcagtaaaatggaggaaaagaggaagtgttacatttttattctgttgcaatttcttctggctttttctttctagcttcgatcctcagcaccaggggagtgccatcagattatgaagaaccttcaggcccactatgaagactttctgcaggatagtcgtgactctgtgctgttctcagtggctgatcgcttgcgcttggaagaggaggtggaagcttgtaaagcccgcttccagcacctgatgaagtccatggagaatggtgtgtgcactgggaagagggaaagagaatagtagaatgagagcctttcaaggggttgctgtgaaacccttcatataaatgagagagtaacatcaccacttttttccatttgagtagctacgaacttgagatagagaagaacttatagatgaattctcaaaatcagatcatggaagaagtctgttgatatttcagtcattactgctcatcaacctatcacattttcttgtggctgtaacatgtttggactctcaaagattagtatacagtatgtgaaatttaggatcaggtaggattaggcagaagattccctaaataaagccttgctttcattagtaggatatcaggtctgcttatctctgatgtcgagcttactggtcttttgtgtttgttcattcacagaggacaaagaggagactgtggccaagatgtacatttcagagttgaagaacatccggctacgcctggaggagtatgaacagagggtggtcaaacgaattcagtctctagccagctcta

SEQ ID NO: 6241 - DNA, 1201 bp, Homo sapiens
ctggttagggaaatttgtagggagaggagcttaacaactcataagttttcattctaattgaagtcttatcacaaagctggttagactagagaagtgatatgacttattggaagtagcaggaaataatgactatttttcacttctctcccctctctccttgagaaattatagtgattcataaatcatagctgtgctgtactgacaggtactctgtcatcagggaatagaactgtacagccaatactaccttattggtcaccctggtaattcttggcaacctaggtgaaaaatttgacaaggattattgtgggatgctagaccacaaggcagcatccagggctagcaggtcacaactggtttctactcacttttttgaccatagggcactggtacatgcataggtctcactcagccttgcatcgctgttccccgtagataaagatggatcgtttgtggtcaagcccagctggatacatgggttaaagagggaattacctcatttactttattgtatttgtaccaaggtatctgatagcagtttccctttgttcttctagccaatctgagctagaaagtatccaggaagttctgggagattaccgagcctgccatggaactctcatcaagtggattgaggaaaccactgcccagcaggaaatgatgaagccaggccaggcagaggatagcagagtgctttcggagcagctcagccagcagacggtgagtgtggtagtagctctggcgagaagagttagaaatttaaattttctttatcataaaagaaaatgatgtactggcaattaaagcttcctccaaatggaagatatccaaattcccttttctttgagtggtttgagcaggatcgtcccaagatactggttttgcatttagactagagaacctgtaaggtaccttcagttctgagtttctgtaactgtattgaaaccactagatggacagattaaaattatctttattttgtttttttttatattacattttattttactaggattagatatggggttttgaaaaccaagggaaaattgtaagtagaagaaaatgattcttttttttttgaaaatgatttattttaagcattttttttttgttggtattttgttttgttttgttttgtttagcattatggttaagagtatgagatctggagttgtattgcctggattccaattctggctca

SEQ ID NO: 6242 - DNA, 1124 bp, Homo sapiens
acttcagtttttagtgttcataaataaagttttattctaacaaccacaccctttcatctatatattgcctatggctgctttcacttataatgagagagatagtatggcctgatattttctgtctggccttttacaggaaaagtttgctaacctccagcatgagtggtcaccaaaacgcttccagcaataaaaagctatgatttattacatgatgtatgtgaattataaaaccctgagtaactgtagcgaaattcatcctttcctaggactatgaattgcaactgatgacatacaaggcctttgtggaatcgcagcagaaatcccctggcaagcgccgtcgcatgctttcctcttcagatgccatcactcaagaggtgagagggtgggggaaggaaatacaccactgtcttcccttaaggaaagattcatttgcctgggccttacattttgatttagggctcacttttctggtgaacatgtgactgcatgaacatttcctcttattttgaactatttaaatttcattttctggcagacgatttatttaaattgttcttttgaaccacagttcatggacttaaggactcgctacacggcattggtgactttaacaactcagcacgtgaaatacatcagtgatgcactccggcgtctggaggaggaggaggtgaggacagttgggtccaaagtcatcttgaaagtacagtaaaacatcttagccagcacggtggtgtgtgcctgtagtctctggtacccaggtggctgagttgggaggattacttgagtctaggagtttgaatccagcatgggtgacatagggaaatcccctctctacaaaaaatatttaaaaattagctgggcatggtggcacacacctgtggtcccagttacttgggaggctgaggtggaaggatcacttgggcctgggaagttgaggctgcagtgaccatgattgtgccactgcactccagcctgggcaataggctgtctcaaaaaaaagcccaaaatatcccacataccccgtaaatatatacacctactatgtacccacaaaaattaaaaaaattttttaaaccagcaaaatatatgctatatatgtaacatataattaaattattatataa

SEQ ID NO: 6243 - DNA, 1174 bp, Homo sapiens
aattgtgaaatgaaagctggatagctagacaacaggtaaataagaatgtgttacattcttctgcctgtttaaaatattttattttaaaaagaaaataggtatagaaggagtaaagaaagataaaactgaaaggtagagttataatcatatagtggattcttgaagtctaagatttcagaagcagaataatttcagatgataggatctaagtttgacatttgggggtggggctaaagtggagatgaggtcatttgaactacaagcataggggtgacatagcattgacatcatcaagaaccatgacttgatttgagataaacagaagaactgactgaaatgccaaagtctccgatgaatatggaagaagatcatccatccaagatgaagaagtagcaattttgaagcaatagagcagagtttggagattgtttttttttctcctaaaaaagctttaatgcttcatcttccaggctctcagaaaaagagaagaaacaaatatctgagcaattgaatgccctaaacaaggcttaccatgacctttgtgatggttctgcaaatcagcttcagcagcttcagagccagttggctcaccagacagaacaaaaggtacttttagttttcatctccaaatattgggtggataccttttgaatggtatgaaggcagctttgctgattcagagtcatgatcactagctttccatgaccaatgtgacttaatttttaacctcaccttagcagccatttgtcttgtgtttctttactggggttccatgatgtgttggtcagtcaaaagcactagaagacacttacaactaaccctttagacctggttcaccttttttgtcttatgccattttgtggcagacagcagtctaggagaacataaattctgtattatatgtgatcacagggcagtaacatactcccttgtggcattgtcactcaaaagttgatagccaaaagttctggatattgggaagaaaaacctgtgaacctcttccctctatactaaggcagtaagaaatattaagttccaaagcaaactggtagagtagtttcactgactaagacgctggttcccctcacccatagtcatctcatcatgtggcatcttgaccagttcccctccatattcatttcctggaccatgtgaaagtcatcatagttcctac

SEQ ID NO: 6244 - DNA, 1215 bp, Homo sapiens
catattcaagaaccgaaagaaagctagttcgactggactgcaaaaaacaagaggaaaattagggaaagttgaagttggaggggtaagtgggacctgtatcacactggaccccgcaggccacattaaggataaggagtgatacccaagagagtataagggcccatcaggcctcgactctgctaagatcatgttgtcaacacttctttatggaaagaatgatctctttgaggataatgcattgcaaaatgaaaaatctctcatgttcatgtttatggacaacctccttttttggcttcactaaatatttgcttagaaaacaaaatcaaatttctttgcattgatttaagcctaaacctgaagcaaattgtagttagggactatatacaggactatatgtcatcctagccattccatctttataccattagaggacttagaagcactaaagtcgaaggctctgccattcctattttcttgtgttaaggatttacaggatgacattcagaatcgtgccacctcatttgccactgttgtcaaggacattgaggggttcatggaagagaatcagaccaagctgagcccacgtgagttgacagctcttcgggaaaagcttcatcaggctaaggagcaatatgaggcgctccaggaagagacacgtgtggcccagaaggaactggaggaagcagtgacctccgccttacagcaggagactgaaaaggtaatagactgctatgacgcttgatatttttcaaaaaagaaaattttggtaccaacacaaataaaagacagtgaggggaaaacaggcttatagcatgcacagaatcatgaggaagggctacttcaggagctagtctggtttttgttttttgagacggaatctctgtcacccaggctggagtgcagtggcatgatctcggcttactgcaacctctgcctgccaggttcaagtgattctcctgcctcagcttcagcctcccaagtagctgggattacaggtgcctgtcaccacacctagctaatttttgtatttttagtagagatgaggtttcaccaggttggccaggctggctagtctgtgtttttacaagaatctttatttttacaagaaatgtccaggaggagtttaagtcaggacagttggtaaaaagtacatattcctattcctccccaaacccccaaacatcttgctatctgtatactcagtcctctgactaa

SEQ ID NO: 6245 - DNA, 1188 bp, Homo sapiens
gaaacgaaagataattattcttccttctgggcttctcgaggacagtacttctagtattaatataccacttaagatttgatttttatcattaattgtgatgcatcttcctctgcctatgctctgttttaaagtcttaagttgtagatgtcagataagatacttaagtatctttagtcctcagcatctagtacaatttctggttctttgtatgcagtaaataactaatgcttattgaacttggctctgatactaatgcatttcaaacttattccttctattggtcttaatgtcaattattattacaattactatgttcaatgtaggactgggcatggtggctcatgcctgtaatccaggcactttaggaggctgaagtaggaagattgcttaaggccaggagttcaagaccagcttgggcaacatattaagaccacatccatataataataataataataataatttttattatttattatttaataatattaataataaagtctttaaaagcataatacaaaaattgtctccactctttcttttcatggcctgatttttcagattccatactcagccacttccaaagcctctcctatagcctggctgagcgatcttctctgctgcagaaagcaattgcccaatctcagagtgtccaggaaagcctggagagcctgttgcagtctattggggaagttgaacaaaacctggaagggaagcaggtgtcatcactctcatcaggagtcatccaggaagccttagccacaaatatggtaagatctgtgtcccaagagctagcatagagggtatgtttgctatgtgccatcattacataatgttgaaaaagtaacaagagggaacctaatatctgtgaatcatctaataagatttagaaatgataactaatctatgtaaagatatttctacccagttgagctggaatgaaagtggagatagcaaagtcatgtggtagaaggggtggagaactaaggtgatgagatgtgtggtattctggaggctcggttgcagtcctccagtcccccttgtgagatagcatatagttattagtttgtggctcagatgtcctggaataagtgaaccaggagctgacagacgtgttcttcatgacagaaattgaagcaggacattgctcggcaaaagagcagcttggaggccacccgtgagatggtg

SEQ ID NO: 6246 - DNA, 1131 bp, Homo sapiens
cgtctcagcgccctgagtcgctgggattacgggtgcctgccaccacgcccggctaattttttttttgtatttttagtagagacggggtttcaccatgtcggccagtctggtcttgtactcctgacctcaagtgatctgcccgcctcagcctcccaaagtgctgggattacaggtgtgaaccaccatgcccagccattatcttaattcagagctttccttcctctaggcagaattagatagaactcctcttatgctcttggaattcacagactgtccataatactgtaatagcatttatcacattataatgcaattgataatctgagcttctggttttagaaattgtatcataattctattttgtaccccagtgtttggcatggtgccagtcatatagtaaatgttcaatagatatttgataaatgaataaataaatcagaaggatggtctcttaatgcttttcaaaacactagggagtatatacagaacagatgtccctacttatgaggaaaaagccccagatactacatttggccattttcttctttaaacagagtctactagatgactgggcaagtaagggaactctggtggaagaaatcaattgcaaaggtacttctttagaaaatctcatcatggaaatcacagcacctgattcccaaggcaagacaggtgagtacaggctcttcaaaatatagtgaataaaaattgctctttgcttttggcctttggagatgcctccttatataattaaagtgaaaatcaaggttggatatgaaaacaaagggcatgcccaaagcagtcttcccctgcaacctgacctgtcaccccttttgctatataacattgctccattttgcaaaattccttcccatgatggaaaaagtaaatgaactagttgtcccacttagaactatcaaatgaacactgaataattaaaatgagattttcatcttgagaatttcccttttttgaatgtgtaaatgggatgggtaagcatcatctttaaacttgggcactggccagccacgaagtcagaagatcaaaaccagcctggccaacatggtgaaaccccatctctactaaaaatacaaaaattaggccaggtgcggcagctcacacctgtaatcc

SEQ ID NO: 6247 - DNA, 1170 bp, Homo sapiens
gaagctaaaggtattgtagaaatacaatagattggatcactagataaggcaaatagggaaggaactcaaagaaaatatatgttaatctttgaattataaagaagttatactagagataatctagtctagctctcagcctcccagctaggtgacttctctgtagtttggagaagaaggaatggaagaatgctccaagtcccttaatcccaatagtaaactaaggttaatttcttactttgctcccttcacttttgttgttcccatgtttagcattttaaggtatacatctgagtatataatgccaaaaccagaaagcagattaatgagaatgcttttgttttgtgtatataaatgggaacttttgtatgatttagcaggaagataatctctaattcactagaaggagtaagagagatgcaagtaatttaggagtgaggagtcaaggagcatactcgaagagctgtctccaatctgatttctgtttctatgatactagatctgacggagatccagtgtgacatgtcagatgtaaacttgaagtatgagaaactagggggagtacttcatgaacgccaggaaagccttcaggctatcctcaacagaatggaggaggttcacaaggaggcaaactctgtgctgcagtggctggaatcaaaagaggaagtcctgaaatccatggatgccatgtcatctccaaccaagacagaaacagtgaaagcccaagctgaatctaacaaggtactgtgtttacattagttgcctcccaacaccaagaggaagagacagctgtaccagtgttcctgcccaagcccaggtatctgagagagagacatgggcaacaatctaggctgtgatgggcagtatgtttgacattctaaatgattaatatgccttaactctcctagagaattttcttatgaaattagaaattgttataagttagattcagaaacaaaaccaggtatgtttgcagaaaaagaatagccctccccagaatcgttagctcattgagaatgggatctcattttctatatgatgctgtaagcaagacaaaccattcttatcaaagtatctttccaattcttagagggatctaaataacagtgattacagttcattcttaagattgacatgtgagactaggaaaaatgtcagaagatataagaccac

SEQ ID NO: 6248 - DNA, 1295 bp, Homo sapiens
tggcttatagttttaaagtagttggcactatttggcacaatccaacatcagtttttgttttgacactgctttttcttttttggagacaaggtctcactctgttgcccaggctggagtgcagtggtgctgcctcagctcactgcaacctcggcctcctgggttcaagcaattctcgtgcctcagcctcccgagtagctgggactacaggtgttcaccagcacgccccactaatttttgtatttttagtagagacggggtttcgccacgttggccaggctagtcttgaactcctgacctcaagtgatcctcccacctcggcctcccaaagtgctgcgattacaggcatgagccactgtgcctggcctgacactgcttttagatagatctgtttttttcctgtctaaacatcttggtgtcatttctatttcagtttatgctaaaggaatttgaagcacgcaggcaacagcatgagcaactgaatgaggcagctcagggcatcctaacaggccctggagatgtctctctgtccaccagccaagtacagaaagaactccagagcatcaatcagaaatgggttgagctgactgacaaactcaactcccgttccagccaaattgaccaagctattgttaagagcacccagtaccaggaactgctccaggacttatcagagaaggtgagggcagttggacaacggctgagtgtccagtcagctatcagcacccaaccagaggctgtaaagcagcaattggaagagaccagtgaaattcgatctgacttggagcagttagaccacgaggttaaggaggctcagacactgtgcgatgaactctcagtgctcattggtgagcagtacctcaaggatgaactgaagaagcgtttggagacagttgccctgcctctccaaggtttagaagaccttgcaggtaagttggggtgaagaacatacttctgccattattagaggcaagcagaaagaaggaatgggttaggagtagtcccaagattctaggattcccttacgtaatttgtagactcagaatggtgttaaaccaattccttctcctagttgcagtgagaactgttgtagttgttacacagtgaacacttaaaaatgtgaaggtttacatagcatagtcctaaagataaaagctctaataaaatttcagtcagcaagtagagattcatccccatagatgtactgataaatggagttccacatatactctcattgatacccactttttttttttttttaatattatgcataccacacacacacggtctcgctctgt

SEQ ID NO: 6249 - DNA, 2268 bp, Homo sapiens
ggctcaactgatcctcccacctcagcctccccaagtgctgggattacaggcatgagccactgcacccggctgcttctggacttcttatgataacttggtagaagaaaaattgtgccattaatttattatttatttttctggaactgtttatgactttcacgtttaccagctagaagtcaaagtttacttctgttacttagatcaccttacaaggttgatacgaggattaaataagatagtgtacatgaaggagcctaattatatgcctctttttggtaggccctcaagtaacattagttcccttcccccaagattagaccgtatactctcagcaaacattttaaatgccagggttcaggctttattgatttcaattttattttctcatttcagccgatcgcattaacagactccaggcagctcttgccagcacccagcagttccagcaaatgtttgatgagttgaggacctggttggatgataaacaaagccagcaagcaaaaaactgcccaatttctgcaaaattggagcggctacagtctcagctacaggagaatgaagagtttcagaaaagtcttaatcaacacagtggctcctatgaggtgattgtggctgaaggggaatctctacttctttctgtacctcctggagaagagaaaaggactctacaaaaccagttggttgagctcaaaaaccattgggaagagcttagtaaaaaaactgcagacagacaatccaggctcaaggattgtatgcagaaagctcagaaatatcagtggcatgtggaagaccttgtgccatggatagaagattgtaaagctaagatgtctgagttgcgagtcactctggatccagtgcagctagagtccagtctcctaagatcaaaggctatgctgaatgaggtggagaagcgccgctccctgctggaaatattgaatagtgctgctgacattctgatcaattcttcagaagcagatgaggatggaatccgggatgagaaggctgggatcaaccagaacatggatgctgttacagaagagctgcaggccaaaacagggtcactcgaagaaatgactcagaggctcagggagttccaggaaagctttaagaatattgaaaagaaggttgaaggagccaaacaccaacttgagatctttgatgctctgggttctcaagcctgtagcaacaagaacctggagaagctaagagctcaacaggaagtgctgcaggccctagagcctcaggtagactatctgaggaactttactcagggtctggtagaagatgccccagatggatctgatgcttctcaacttctccaccaagctgaggtcgcccagcaagagttcctcgaagttaagcaaagagtgaacagtggttgtgtgatgatggaaaacaagctggaggggattggccagtttcactgccgggtccgagagatgttctctcaattggcagacctggatgatgagctagatggcatgggtgctattggcagagacactgatagcctccagtcccaaatcgaggatgtccggctattccttaacaaaattcacgtcctcaaattagacatagaggcctctgaagcagagtgtcgacatatgctagaagaagaggggactctggatttgttaggtctcaaaagggagctagaagccctgaacaaacagtgtggcaaactgacagagagggggaaagctcgtcaggaacagctggaactgacactaggccgtgtagaggacttctacaggaaattgaaaggactcaatgacgcgaccacagcagcagaggaggcagaggccctccagtgggtagtggggaccgaagtggaaatcatcaaccaacaattagcagattttaaagtaagtctgaaccttgtttttctttttcttttacatgtatttatttgcttgtaacttggaaaccagtcaagtatacattttaacttctgtccctagttttattattgtcacttccatcaccatgaaagcacactgtctgaagactaaatagtctctcggacttctgagcaaactggtttgagcatttttctttttctttttcttcttcttcttcttttttttttttttttttttttttgagacagggtctctctctctcacccaggctggagtgcagtggtgcgatctcggctcactgcagactcgacctcataggctcaagcgatcctcccacttcagtctcccaaggagctgggaccacaggcgccaccatacccggctaattttttgtattttttgtaga

SEQ ID NO: 6250 - DNA, 1147 bp, Homo sapiens
cagtcagagtcagtaactctggaacatgtgtccaaatccataggtattccagaggtgcaagattttaaaaacttaagtggagactgccaggactttagatttcagcagcacagtgcaaaccctcctcatgaattccagcctgtagaatcagaagctgtagcaacaagtggtaacacagatgtaatgcaggaatccagattctcaagtgcaacctggccgagggccacaaaaagtttagctaagggaggcttcagtgagaagcagcacccccttggggacacagcctgcactgtggaaatgccacctctctccccttgcctgagtgaagagctgttagatccagaattgcatgttctcataacccccagcctgagagagaaaacagagtctgagctaaagtttgaggaggatgagcgatggattatgatggaggctgagggagagtgggaggaagagaaactgtcagacagggaaaagacttttctgatggcagatgagaagaacagcctggcagatatttttgaagaaagagaacaagcaaacacagcagtggtggaggatggatccgattgcttagctgctgtcttgaggacttttggccacctatctcttggtcagatttgttgccctgatgacccacagccagccaaggaccagttggctactgttcccaaggatatacccctggattgcgattgtgttcttacaggtgaggatattctcggtgaggtggcaaacagaactgctcaggggttagagggacttgtttcagattcagcatgtactgtgggtactattgatgcagaacagctctctgacacagactcagtgcagatgtttcttgaacttgaaaaggagtgtttatgtgaagaaggagtaactcctctagttgagctacagaatcaaatctcttctgaagggctggctgcatcccaggatgcagaaaatttactcgtaattagtcatttttcaggggctgccttagaaaaggaacagcatttaggccttttacatgtaagggcaaaagattatgatactagattggattgtggatattttaataccctggattcttctcaggtgcctaatgctgtggaacttattgcccacgttgatatcatgagagacacttccactgttagcaagg

SEQ ID NO: 6251 - DNA, 1278 bp, Homo sapiens
taaactaaaaatatgtgccccctttcttgtttactcatggacagtaagatttgacataaagacatatacgttacacatatgttatgaagaagaaagaagttgaatcaagtttactttgtaacattttaacctctattatttattctctaaagagtgcttcatggttttatttgatttctctgcaggatctagtatagttctagatgcatagaaatattgtataggtacttgttaggttaaatactgagcctttggttaaagcattatttatcatttctgttgaagtaaggagatgaaagaagtattagttgttttacccagagacaatgtggctcaaaaagtcttacaggcagttctaagcaagcaacaatgaagtctaaagtcaggcttcagaatgattgaaaaatctgagatgagaaaaaaataactgaaggaaggaggtcagagtcctgctgggatgtgtggtagagatagcaatttccacccagcacagttgctgatgtgctttatttagcaaggtatggcctgaaaactcttttccctccttaggaattaaagaaggaggtcatggagcacaggctggtgttggacacagtgaatgaggtgagccgtgctctcttagagctggtgccctggagagccagagaagggctggataaacttgtgtccgatgctaacgagcagtacaaactagtcagtgacactattggacaaagggtggatgaaattgatgctgctattcagagatcacaacaggtaatgcttataatacctctgcattaatattttagacagtattgatgtgtgagatacagtactatgacccacataaatacagactcagaaataagaatgggctcaagctaaatctggtggaataaatatgtttcattgatgggaaatgattgggtagaagtttgtgaggatggatccagaatttgaccaaaatacttgacccctttgagtagagaagtacttggagaagagtctacatgaggccttttcttagctaatgccctgctaagaaggctgatggtgatgggagtagataatatctagattcaaaaggtccaaatgcaccacaatcttagtttgacataattaactctcttagcattagatggaagagggggaaggaattactatcaaatatgcaaaccaaaatagcagagctatctaaaatagaaccttctcagtaaacacaggtgtcatatttcccttgatcttttttccttcctactttctggaaaaaaatcatttgttcttttgtgtagctgg

SEQ ID NO: 6252 - DNA, 1136 bp, Homo sapiens
atgcagaactagcttgggttgctgaaacaaaacggaaactgatggctctgggtccaattcgcctggaacaggaccagaccacagctcagcttcaggtacagaaggtacgtgcccactctttcctgagctaatagaatcatcagtaacttagagtgactaggagagtttctgactatcccatgtcaagtggaataatttagtggcatgatggtaaatagaaattaattttctatgtatttggttgagatgaggaagaatttttttttttgctttgtgagaaaggaaaaataggcccattaatccataattagcaatttccttgatagaaatttttgtaagctactaaaaagataagctagagaagatgttggataggcaaagtgtcaaactgtataagaacaatttttgatgtggctttttcatagattttgtcttaacctttagtaataacaggaaaagggtctttttacttcttaactacagtttacttttcaaaggctttctccattgacattattcgacacaaagattcaatggatgaactcttcagtcaccgtagtgaaatctttggcacatgtggggaggagcaaaaaactgtattacaggtgaattacatttatttatttgccatattgttcctgtttttatcatggtgaattagaagcacaattgtgaaatgatggtttaaggctttttccctcctggacttttcttatgattgttattaaagtccagcttgatgttctggggaattcagaatcttaaccctgtgtccacaaatgtttaaaacagccatcctatataatgtgaaatatattgcaaatccatcttctttataacaggggaattgctacttatcctcactccacagggagcaagctttgagttacttttcaaggtatttatggtagatttttttcagaaccatatgcagatattaattccttcattatagccttctaaaaggtcgtacctagttttaaaaggattggtcaagatggtttgtagacaagttttttcatttcgttttgttttgtttcataaaggatatgtttaagcacagtttcctcagaaatattcataaactgactgagctactcatcctaaacatttgaagcataaatggcaggtttctg

SEQ ID NO: 6253 - DNA, 1134 bp, Homo sapiens
cctctctctaaaaaaagaaataaataataggccgggtgtggtggctcatgctgataatccaagcactttgggaggccgaggcgggtggatcacctgaggtcaggagttcgagaccagcctggccaacatggtgaaaccccgactctaccaaaaatacaaaaattagccaggcatggtggcacatgcctgttatcctagctacttgggaggctgaggcaggagaatctctggaacctgggaggcagaggttgcagtgagccaagattgcgccactgcactccagcctgggcaacaggagcaagactctgtctccaaaaaaaaaaaaaagaaaaagaaataatagtaaaactaaaatagaaaattatcctttagttataaatgcttagcatttttttaaaaaatagtttcattgaaaaggtcagagttacatggaatttctgaatagaccaatttcaggctcttcagaaagtcctattcatatctctttttttaacctcctcagaaatccaggataaattggatcaaatggtattcttctgggaggacatcaaagctcgggctgaagaacgagaaatcaaatttcttgatgtccttgaattagcagagaagttctggtatgacatggcagctctcctgaccaccatcaaagacacccaggatattgtccatgacttggaaagcccaggcattgatccttccatcatcaaacaacaggttgaagctgctgaggtaagaaggaaacaaaaccctttttcttaggtgtctgtcctctagaaaaagcactttatcaaatcaaagtgaggtatgttaactgcttagccaggctgagtaccttaaaggtttttgtttttgtttttgttttttgctcttgtccccaaggctggagtgcaatggcatgatcttgactcactgcaacctccgccttccaggttcaagtggttctcctgcctcagcctcttgaatagctgggattacaggcatgtgccaccatgcctggctaatttttgtatttttagtagagacagggtttccccatgttgaccagagtggttctgaactcctgacctcaggtgatccacccaccttggcctcccaaagtgctgggattacaggcgtgagccaccactccaggcc

SEQ ID NO: 6254 - DNA, 2949 bp, Homo sapiens
atggatgaggcactcagttagaacattagtgggcccagactgaagagtggtattgattgaagaatctgattgaatgtttttcccctagatgaataatgcttgggagaacttaaacaaaacatggaaagagaggctagaaaaacttgaggatgctatgcaagctgctgtgcagtatcaggacactcttcaggtgagaggccaggaggtgaccaccaaggaaatacaggttctgttttttgccatttttgtcatttttggaattaagcacaaaagtggatcaccttcacaggactgcagacctaagatagtggtgtttccacaaatttagccaaagttccccacttgtagtgaaaaaagtagcgacatctgtctgaattcttactcttcctgccatgtttatcattgcctgctcatcatagattcattcagctacgttgtgaagctggccttactgtgaaagtcattgcttgccagaggttccaaacccaggttatcttcaagcacagtttggcacagttgcttcagaacatcatgagcttgctagctgggattgaaaaatcttcacttttattcaaatttagtatttccaaattgtagtttattttgaacattatcttgataatgttggctccattattaaatcaccatattattaatataaagatcattattctttatctgtgccccttacctgaaatcacaaacagcacaaggtgctttgattgatttatgtcttcttatgttagcagagataatgctaattctctcccaaattcttctggttgtttttgactgtttacttgtcttttgttctaggctatgtttgactggctagataacactgtgattaaactctgcaccatgccccctgttggcactgacctcaatactgttaaagatcagttaaatgaaatgaaggtttgtatctgggtatggcttttgaagaagaattgttttattatagtttttaaaggcttgatttgatgttaacattgagtgtgtctttgacaggagttcaaagtagaagtttaccaacagcaaattgagatggagaagcttaatcaccagggtgaactgatgttaaagaaagctactgatgagacggacagagacattatacgagaaccactgacagaactcaaacacctctgggagaacctgggtgagaaaattgcccaccgacaggtaaggcaggtggtagatgacatcagtgaactactctccgctcttttctaatttcgtattgaatattccctttctgtcttttcctgagtagcacaaactagaaggggctctgttggcccttggtcagttccagcatgccttagaggaactaatgagttggctgactcataccgaagagttgttagatgctcagagaccaataagtggagacccaaaagtcattgaagttgagctcgcaaagcaccatgtaagtattttcattttttcatctctaaccctattgatttgagaccagatgctgccaccagcagcctttgaatgttgtgtatatcttaagagaaccaagttagatgatatccatagagataaattatgttgttcaacatgttttaggtcctaaaaaatgatgttttggctcatcaagccacagtggaaacagtcaacaaagctggcaatgagcttcttgaatccagtgctggagatgatgccagcagcttaaggagccgtttggaagccatgaaccaatgctgggagtcagtgttacagaaaacagaggagagggagcagcagcttcagtcaactctgcagcaggtacatgtgacatccaagtaaggtaggaagagctatacagataacagaaagcctatctaagtcagagagaagagatcaatttgaaaagcaaagaatcccttatgtcttgaggggaaggttaatactgtgctgtaacttatctagaaagagcagcttttgattgggtagttcttttctgaattcatttctagctcagtctctttattcacattcaaagttagcagatcttcactataacagattccctttttttcttggatcaagtcaggtctcttcctattcaacagtaccttaatcaatagtcaattcatctgatcgtatcaggcatttataatatgttatagtgaggtctgaaggattctgctagattctagcaataatattggccccatgctaatctagcaacagaacagctttgccagagagcagccgaaaattccttcctcaagataaactcctcatatcatttggaaagttgacttttaaagctgagaaatgactactgacatggttgatatatctttttctcaaaaggcccagggcttccacagtgaaattgaagatttcctcttggaacttactagaatggagagccagctttctgcatctaagcccacaggaggacttcctgaaactgctagggaacagcttgatacacatatggtaatagcaattttttgaaattgagcataagcatcccatattcactagctcctttccaagttcacagtcataattaatatgtatctggaaatctacaaagtagtgcatttttatcaaacatatagtataacctttggggattgctgcctgttacaggcttctaataccttacagtaggcagcagtagtgacagggaaggtcagctggaaattttgagttaatcagctttactggcacacatatattgacttgaagatgacagcatcaagaagacaaatatacaacacagatgtgctttcacttaagaaggaaactacttaaggggggtttagggaaatcaaatagttacccgacagtatttcaagaatgcatgctagaacaaaaagcaacataatttctaggcaaatttttcatgaaaaggggaaatagattattggagtcttttgagggatctctaatccttaaaaaatgtttttcttggccgagcgcagtggctcacgcctgtaatcc

SEQ ID NO: 6255 - DNA, 1074 bp, Homo sapiens
tctaaatactgtcctttcccagatagaagagcacaaggtaagtatgatattatgatgctgcattctttttgaaagcactaattgaaagaaatgcccctttatcttatcttaagctaaaaaagagcactattgttccctcaggtttttgctaatgaagtaaatgctcatcgagaccagatcattgagctggatcaaactgggaatcaattaaagttccttagccaaaagcaggatgttgttctgatcaagaatttgttggtgagcgtgcagtctcgatgggagaaggttgtccagcgatctattgaaagagggcgatcactagatgatgccaggaagcgggcaaaacaagtaagttggggaagaaagatactaattcactgaagagtcttgggctgcatgtattgagtctctgggatgattctcaaacgtgctgtatagtgtgtatattcattcctgttaacttatttcttatgtaattttagttccatgaagcttggaaaaaactgattgactggctagaagatgcagagagtcacctggactcagaactagagatatccaatgacccagacaaaattaaacttcagctttctaagcataaggtaaagcagttaattgctcttaggtcccaagccatagtattcgctaaagcttgtatcttgccaaaaataaaaatcagagctagtaaaaagaaaaccaattggttaatgtttaaaagtcaaaatgatgaagccagggttccattttatatctagatggtctaatcatgatatttgctcatttaaataacagtttaaggaaagtagttatgggagtaactagttaaaactgtaggctttcacaaattgtcaggcacttctatatatggtataaacaaaaaattataaatttcttaaggataagctatggttaattttagttcaaaaaaagtggtgatattcatactttatttggtttctagcctgaaaactcaaattcttttgttccaaatcaagatgtcgtctgacttttaacacttttttcttttctttctggaaacataggagtttcagaagactcttggtggcaagcagc

SEQ ID NO: 6256 - DNA, 1107 bp, Homo sapiens
gctacccttaatccattctagagggtggtttgatttaaaatgtctcaccatctctcagtcactttttactctatttctttttttttttttttttttgagatggaatctcgctctgtctcccaggctggagtgcagtggtgcaatctcggctcactgcaagctctgcctcccgggttcgcgccattctcctgcctcagcttcccgagtagctggaactacaggcacccaccaccatgcccggctaattttttgtatttttagtagagacagggtttcaccgtgttagccaggatggtctcgatctcctgacctcgtgatctgcccacctcggcctcccaaagtgctgggattacaggtgtgagccaccgcgcccggcctttactgtatttctaactgttctaacatagaagtcactctctatatagggttcaagcaatattccctttcagcgaggcagaattgtgggccatttgtaaaaggaatccctaaaaatggtagcgtttgtgtgcatttctcaggcagcacaagttggaggaagccctgctcttttcgggtcagttcatggatgctttgcaggcattggttgactggttatacaaggtggagccacagctggctgaggaccagcccgtgcacggggaccttgacctcgtcatgaacctcatggatgcacacaaggtaggggtgaggtctgggctacattggagtgcagtgggtcttctgtatatgactgcctagggtcttctacatatgactgcctctgcccttctttctaggggagaaagagagcctgacagttgctttgtgtgtttaaacaaactgttgctgagattctgcattagtcacaacgaatttaccaaaattggtttgattcagatttggcaatgtgtaaacttcacttcaaggttgcgcctcttcctgtttgtttctctcagttgagtcacaaaatggatctaaattccaacggaaacccataagatagccatttccactgactcctaaaatggaaatgagtgattttttttttaaaccacttctgaacctaacaatcctaacaccaggcacgccaatatttaacataatctctatctgtcatgttgaattatg

SEQ ID NO: 6257 - DNA, 1194 bp, Homo sapiens
tttctctgaaggagttttgaagcaggaataaagaatgtgttgtatagtcacttgggaattttctttcatgccttttctcagtgtctcaattagttcacttagtaagaagaacatatactaatttggaacagacaataaatgtatatgtcaaaagcctgaaatgcctaaaaagtaaataatgagctgtgcgtggtggctcacgcctgtaatcccagcactttgggaggctgaggcaggcggatcacctgaggtcgggagttcaaggccagcctgaccaacatgaagaaaccccatctctactaaaaaaatacaaaaaattagctgggcctggtggtgcgtgcctataatcccagccacttggggggctgaggtaggagaattgtttgaaccaggaggcggaggttgtggtggagccgagatcgcaccattgccctccagcctgggcaacaagagcgaaactccatctcaaaaaaaaaaaaaaatgtaaataatgaatagcctccctgttaatgtataaaaatctttgtttctctgaataggaagttttgctctaccctttacactttcctttttgttcacacccaataggttacaagacaagtggctcagtgcaaatgtgcaaaaaggtttcaggtggagcagatcggagagaataaataccgggtaaggaagagaaaaagcagtcctttgttgtggtggtttctcatatgtggctgatcccaccttttcctcctgatgcttagaggcccagagcccatcggacttgagatgtggtcactctctgacctcatctctatagatgccaagtgtcaggtaccctgttacatctgaaaactagtcccatatctacctagatagtagtagtttgtatttaagttttaagataggagatatttcagagctgtcacttcacatctgacaaagttcctagggggatgaaggtacctttggaaacaattatatctattgactgaccacttgcccacaaagagatggtcattgtgagcctgagtggctcccaggctagagaggcctggggaaactgtgttgaagccccaacagacactgtgcctgctctgagctgggctacaaatggggcccaggagcactgaggagacatcaggctcagtggtcttccctggaaagccatgctaggtgtggccataactgacagtgaactatacttgtgtttta

SEQ ID NO: 6258 - DNA, 1233 bp, Homo sapiens
ggcagtggtgtgaccattaaaagtgatttttatcccaatagaaagtatattggcccggcgcagtgtctcatgcctgtattcccagccctttgggaggccaagactggcggatcacgaggtcaggagttcaagacagcctggcaaacatgttgaaaccccgtctctactaacaatacaaaaattagctgggcgtgatggcacacgcctaataaacccagctactcgggaggctgaggcaggagaattgcttgaacctgggaggcagaggttacagtaagctgagatcacactgttgtactccagcctgggcaacaagagtgaaactctgtctcacaaagaaaaaagtatatcaagacaccagtctttagcttgatatttctgcttttctatttttaaaatccttttgtgaaatatataaaaatgcaaaattgtgagagttaacaattcttctgtagctatcaaattgtcattcctgtctgaatacagtctgctttgggagaaaaacatagatctgctttaagacatatatattaattaagtttcctttgattctacagtttggggattctcagcagttgcggctggtccgtattctgcgcagcaccgtgatggttcgcgttggtggaggatggatggccttggatgaatttttagtgaaaaatgatccctgccgaggtaaggaaccattctaagcatgaattacgtgttaggtatgcccccagcagtgatcttttatgcttacaggaagcattgatggtggggtctgtctgttttttattttgttaagctgcccaggtgtcatcccactagcacagattagaactcaggggtgccagcataggccagggagaaaaagctgaagaggttgatgctatttggggaggtaggtctagaggaatgcagtaatgagaattaagagtgtattggtgttactcgaatgtttgtttggggtattaaattaacactatcctagaaaggagcccagtgaagccctttaggttccctcttagtgcctcagatccctttgcctgtaattcctgtggctgatactcagggagagtgttaggcccttctcatacagggaagaactggtgagccccctggaccaggaggaaggataaagacacctacatgtgagcccattcacttctaagacaggtggccacctaagcaagaccatggggtgtctttctgctaaatgtgaaaaggctggcccaccagcccagaagcata

SEQ ID NO: 6259 - DNA, 2324 bp, Homo sapiens
taggaatcttccttcatttcctggctggctgcttcccctcattttgcctctatccatcctgcccatggattagcccggctggcaggctcacccacctgtgctgaggtggttgagcaaccttgcttgcctccactttggggccatggaaggtgacagtgctgctgatagagtggctttctaatccccaggaggcagcttctcaagtagaatcacaaagccagaaaaggcttcagcaacttctgtatggatgaggaaactggggtgcagaaaggctgtgagatttgcttaagatcacacaggatcagaaccctagcttctgctcacttgttcttccaccccatgccatctctattaagtctgctgttttattcttgaattccagaccctaaaaagtctgccagtcgccctgggagtcgggctgggagtcgagccgggagtcgagccagcagccggcgaggaagtgacgcttctgactttgacctcttagagacgcagtctgcttgttccgacacttcagaaagcagcgctgcagggggccaaggcaactccaggagagggctaaacaaaccttccaaaatcccaaccatgtctaagaagaccaccactgcctcccccaggactccaggtcccaagcgataacactgtctaagcacccccaagccactatccactttgaatcctgctccatacattgggtgtatatttattctgaacgggagaagttatattgttaaaagtgtaaaagaataattgtgttatgaagctgccttattttttttctttttgtaagttactattttcatgtgaatatttatgtagataaaatttgcctcctggtaaccctgtaatggatggggcccagaaatgaaatatttgagaaaaacaagtgaaaaggtcaagatacaaatgtgtattaaaaaaaaaaaagcctattaatagggtttctgcgcggtgcagggttgtaaacctgctttatcttttaggattattcctaaatgcatcttctttataaacttgacttgctatctcagcaagataaattatattaaaaaaataagaatcctgcagtgtttaaggaactctttttttgtaaatcacggacacctcaattagcaagaactgaggggagggctttttccattgtttaatgttttgtgatttttagctaaagagagggaacctcatctaagtaacatttgcacatgatacagcaaaaggagttcattgcaatactgtctttggatattgtttcagtactgggtgtttaaaggacaaatagctgctagaattcaggggtaaatgtaagtgttcagaaaacgtcagaacatttggggttttaaactgatttgttgctccctatccagcctagacaccagtaactcttgtgttcaccaggacccagacccttggcaagggataggctcgttggtgacattgtgaatttcagatttgttttatccactttttttgctatttatttaaatggtcgatcaacttcccacaaactgaggaatgaattccacgagcctgttctgaaaatgtggacgtaagacaaacacgtgctcgtcctttaatggagttcaccagcacacttgttaaccagtcctgtttgctttcgtctttttttgtgcgtaataaagtcaactgaccaagtgaccatgaaaaggggctgtctggggctcctgttttttagctgctgttcttcagctccgaccatgttgctgtgtgattatctcaattggttttaattgaggcagaaactgaagctctaccaatgaactgtttagaaacaagacacacttttgtattaaaattgcttgcagtaacaaatattttgtatttcctgattttcttttcaactattaccttatctataaatgttaccctggggtataatcatgttgtaggtacttaaatgcattccgcaaatcaaaatatcttgatggataaattatagagcttaatagatcttgttttatttcatccttgttaattttgtttaatatggctgggcatggtggctcacgcccataatcccagcactatgggaggccaaggcaggaggatcacttgagttcaggagttggagaccagcctgggaaacatagtaagaccttgtatctactaaaactaaagaaacaattaggcatggtggcacatgcctatagccgcaactactagggaacttaaggtgggaggatcacttgagcctgggaagtcaaggctacagtgagccacgattgcaccactgcaccccagcctgggtgacacagcgagaccctgtctcaaaaaaaaagacaagctattaacatgaacatgtagga

SEQ ID NO: 6260 - DNA, 4604 bp, Homo sapiens
tggagtgcagtggtctagtaatagctcattgtagcttcgacctcctgggctcaagccatcctcccacctcagcctcccaagtagctggaactacaggcacgtgccaccacactcatttaatttttttcttttttgtagagacagggtctccattgtccaacgatctggctccaacgatcctcctgctttggcctcccaaagcattgggattacaggcatgagccacagcacccaattttaagtattttttgtttgtttgtttttgataaaaataaaacatttggaatagaagcatcttagtagggctacctttgtaaatggaacacttactaggcacctggtgctgtgctaggtgttagaaaaattatactggtgtacttgaccaccattggccatggatgggctagagtctcctcaggcacaagataccctgaggttctcatgtctcaggagctggccagttctgctaaagtggtccgccttgtctttgacaggtggtgtgtgatgagaacggctctaagggttatgcctttgtccacttcgagacccaagaggctgccgacaaggccatcgagaagatgaatggcatgctcctcaatgaccgcaaagtgtgagtgtcccagtccggagcaacaaccatcgcatgagccagccgtggccccacctcgctattaactggcacacacaaggcggctactggttctcggcccaagtgtggcctgctcctacctctccactccagggctggtgagtctccctgcctgagccgtggcagcccttttgactcgccaaggtgggcttcctgcccaagccatggcctgcctgccgcctctcccttaaaggcatctgtctgtgggttttgtgagcatcaacaactggggctggctggaaagcagctctaagctcactctgagtcggggtcttggccagcggcagagtggagagggccctggactgaccaggagctgtatactagcagtgtgaccttggctttcctgtgattcaggtctgtccatgggtccctcgctagtggttgatgccaaattgtccccgcggttctccattttctaacttatgactcagtgacctaatacaaggctggctccacagtaatacttggtgacaatgaaaaaatcccatccctttgcagaaaaacttcataacagaccttgttgctttgatgtggttgttactgtagaatgcagagagggggaacttaccaaagccatatggggagaagaagagacaataagtcttggctattacaagccaaaataatttttgtcctttgtgtcattcagtatgccagaggatgggttatctttataatgtctgtgtgtgcagtggttgatctacagatatcactaaaaagaaatacaaaaatgtcagtgcatggataaattttcttttaagtataacagaccaaaataaataaatttaaaaagcaaagggtgccccttcactccaacaatctcatatctaggattaaccactgttaacagtttggtttgtatccttccagaccttttctatgcatttacatagttgcacagaaatgaacattttaaaaacatggccatcaggtttcttcatgaaggcagtgtgatgtggtaggaatagccctggtctaagccaggagccctggggctggtcctcacaggatagtcctgcctttttctctttctgctggggacttggggtatctctgagcctccttggtggtggatggggatctcgtgttttaacctctcctgtcagtctttaacctgtattcctttgggtccctggacatcatgttttattcctctgggtaattactgttcttcatggtttcattttagatttgtgggcagattcaagtctcgcaaagagcgggaagctgagcttggagccaaagccaaggaattcaccaatgtttatatcaaaaactttggggaagaggtggatgatgagagtctgaaagagctattcagtcagtttggtaagttggggttccttgtctcctttcacagtctaccagacccatctgttttttcttaagagatgagggcactgctccagagatttgcttcaagtgagtttccagagggaagccttctgttcctgagctgtgctcaagatggtgttactaatagttctgtcctttggtaataggtaagaccctaagtgtcaaggtgatgagagatcccaatgggaaatccaaaggctttggctttgtgagttacgaaaaacacgaggatgccaataaggtgagtataccacaaagattgggaaaagcttttaagaggttgccccagagtatgggtagggtcttgctagcacctacctagagctgggacggtctgagtatctggtagtagatgtaccattactatactctgggatcatcttcctgggttccgcatgttaacttcatgtaggtgtttacaaagcacttggcacatacctgtcacctcagctatcagttgttgaaagaataggacagacgtttgttatgctgcaaaggtgagagaactaaagcccagtgagtgctgatttgataacagcacggcagctacttgtgggcaaagcattgtgccagaccctcaatatttatcacttaaatacccacaaaagcacctgcagaatttactggcagccggaatattatatcgccctaggctcatgtcagcacacttgtgtttatacacctgtactatttctatattatctggatcaataacccatttaaatattaacctcactttacagatgaggaagtttggatttgtgtgacagacttcagaggtggagtgaatttagtttttagtcctatagtagaaagaatattttttgggacttagacctccagaataagaccccatcgctgcaactttattttaaagacatatttttcctctctaggctgtggaagagatgaatggaaaagaaataagtggtaaaatcatatttgtaggccgtgcacaaaagaaagtagaacggcaggcagagttaaaacggaaatttgaacagttgaaacaggagagaattagtcgatatcaggtaaggtggtcttggcccagcctagcaatgggatttgctgtgaaatatttgcagaacacccctatgtttagcgggctttctttttgaggacttggagtgtgttcttcttcccattttacctaaaaagatgaggtttaaaaggatatatacctactacatatgactgattattatagaaccagaaacaagagatgggtttattcatcaagaagctctctattttggaagcctcagcctgttgcttttagccatgtaggttccttttacttaaatgagactcctttgtttggcatggcttcaagaagacccctgctggggtgggtgagtggtcaccagaacagctgtggggagaggtgacaaaaggtgagtgcactgatgatcctgtcagtttcagggcagtagtttcacaactttggacttgcatcagattcatcagcagagcttgttaaaacagatagctgggctccagccccagagtttttcttattcattgggtttggggtctggcctaagaatttcatttctttcttttttttttttttttcttgagacagtctcgctctgtcgcccaggttggagtgcagtggcacaatctcggctcactgcaaactccgcctcccgggttcgcaccattctcctgccttagcctcctgagtagctgggactacaggcacccgccaccatgcctggctaattttttgtatttttagtagagacggggtttcactgtgttagccaggatggtctcgatctcctgaccttgtgattcgcccgcctcggcctcccaaagtgctgggattacaggcgtgagccaccgcgtccggccgagaatttcatttctaacaagttcccaaagatgctggtgctcctggtctggggccacccttggggaaccactttcttagggaatatttgtgatatagaagtgtagttaacagtgatctttttccttcagggggtgaatctctacattaagaacttggatgacactattgatgatgagaaattaaggaaagaattttctccttttggatcaattaccagtgctaaggtattatactgcgatctggggattgaaagcagtggtattccattataggcttattggcatttgtcccattgaaggaatagcatttaaattatgttcatttctgaaagtagctactacgtttttctagcaaaatttctggatgcattctggagaatgacatttcattaggttaacattacactgtttcccaagcactggagtctggagaggaatttgacccagcccctccttgccaactcagagcacctgaatctttcccattccttgctgcctcgtgccggtgtggggacagatggtgctacagaatgagcagaggaaatccagacaggttgttttccatttgtcttggggcctgtctctacagctctgccacattttctccttgagaatgaaggtattttgaagattttggaggtgggcttgggaacttctaccctggtcttaaaaagagaggaaaggggagtggaaggtttttctatgtttcgtagtgtgcatcatttgcttgattttc

SEQ ID NO: 6261 - DNA, 4604 bp, Homo sapiens; identical to SEQ ID NO: 6260

SEQ ID NO: 6262 - DNA, 4534 bp, Homo sapiens
ggcgcccacaaagatttggtttccctctgccccggcggttgtaatcttaaaccgccggagcccgaggcctatatttatagagaaacgcgtgtccccgaggccgccgtgggcagcgtccggtcgcctcttaaaggatttttacccttcggaaggggattccccgtttaatttttttcctactttgattttttgaaatttggagcttcgcaccaggaccgcggagaagtgcaaagtcgcggggagggccgtattgtgcggagagccttttgtctgcggtgctgcggccgtgggagccggcccccgcctcccgtttccgtcccgtctccaagcccgccgactccagctcgtcctcgccgcgccggtgccacctgtgagccgcggcgcgggcccgggctccgaaggcgcccctttgtcctgcggcgggcccgataagaagtcctcctggcggggctcggggtggtggggggcggggagatgaacgctgcggccagcagctaccccatggcctccctgtacgtgggcgacctgcattcggacgtcaccgaggccatgctgtacgaaaagttcagccccgcggggcctgtgctgtccatccgggtctgccgcgatatgatcacccgccgctccctgggctatgcctacgtcaacttccagcagccggccgacggtgagtagaagctgtgcccacacgtgcgtgggagcccggaggaccccgggagtcgtcttctggcagggccctcctgccgaggagggcggcatcacgacagcatgttgccaccgaagctgggagcagggtgcggagattgagaacgcggacctggcatcagatgactcgagtttcaatcttgtttctaccacttgctaactgggtgaccttgggctacttattagtgttgctggtagtggggttggaaaccaaggagactgtaaaacaggattagagtgaagccactggcattccactgcgtgtggtccttgtcagtggggctgggctgttagagatccttgcttgtgcccctcacaggctggccaaaaaggcgggacgtttgaaacacaattccccgcgaaagttttacattgtaaagctcctgcccgctccgccacctttactaaccttgactacctgatgttgtgctgataaaggatcagtcagggcaggcaggaagcagggggaaggtttctgtgcgttaaactttcgcagagacttaggttagtgccacaaaagctgcgtgtgccaggccacctccttggtctgtgtgtttgccactggagtggagaagtgctttactctggacaaatggtatccaggctctgtgctgtagagtgtcgtggaggtagtttagggaagcgtcacttgaaaatctggtgtcatttgtcacctcagctgtaacagtgctttgcactagtcagagcccttttatttcatctaatctgaagaaaatgggactcctgagaaggagaacgaatgcaaaaagttggaagccaagttaggactcccagcacagtgctctgccacctcagattgtggccttagcgtggagcatggagagaggtatgctgcaggcgtggcaggagggaggccagaggaaacctgatcagaggctgcacgtgactccagattaaaagggaacaactgcagagatcattactgggagaaacaagccattctatggcaaagcatctccaggtccctagttttggggtcccccctttgttttctgtctgaggcccagagttactacctgcccaggttgcggctgagaccagagaattggacatgttgagagggactaggtattgctactgtcaatccagtgtgctccaagctgagttctgtccatggccataggagcgcaaaggtagctgagtgtggtctttttaagggataatgtaccacattagctgttgtctgccttactgacttttgaacaaaagtcgtgtcacttagagatagcagaagctattggtcagtgtgtctgccaacacatacttctgcaggacttctccctgctataaataagtgcagccagatttgtcagactaagccggcttgccttgtgcagtgctgtctggaaatagacgaggagctgttgttgaagtgggctcctttactgctaattaatgaaatagtttgcgatcccagctatctatctctgatagccatcacaagcaaagtcctctttccctggactgttcctgacttggatcggtcttgtcatctccccttttcccaactaccccccacacagatgaggcccaccttctgaagggggtggggaaagttgttggaaataatgagtgaaaataaattctcccggctaatgaaacagttgagcttgtggagcggcagagttggggaattttgtcccccctttaagtgagatgttgtcctgaggcaaggagcaggttccactgctctgaccctgtctaaatcccctcatggaggaggttctgggtgatgtcaccgttaggagatgccatcatagccttaaggaaaagtggccaccagatctgggcatccttgttgcgattagtgatgagaagtgttttggctggcaggtggtgttattttttagcttttggttctttttgttgttgtttgttttgagacactgtttcactcttgctgcccaggctggagtgcaatggcgcgatctcagctcactgcaacctctgactcctgggtccaaacaattttcctgcctcagtctcctgagtagctgggattacaggcacccgccaccatgcccagctaattgtgtatttttagtagagatggggttttcaccatgttggtcaggctggtctcgaactcctgacctcaggtaatccacccgccttggcctcccaaagtgctgggattacaggagtgagccaccatacccagcccagcctttggttctttaaattgtctctggtgtacacacggacttggttgggaagctaaggaagcattccaaggtgttggatggggaagttggttgagcacccagggtagctgaagtcctagaattctacagaacttccattaaggcttcaaaaggtgggtgcagggcctgccatctgcgcactgtctacttaggcagaaggtatggtggttttatccttgtgatagtacagagaacttttccatgtgtgatcagttgtgtccattttgatgactgatgcttttttgtttaagtcaatttctgttctcagaaattgaaaataaactggactgaattctgaattcagggatagcacctttttttttttttccagatcatttgctttacaggttttgtcacttgtctccataggtggattgcagactaaatgacttgataactttgatgcaatacctcactgaaaaataaatcagataatctagtattagtttcgtaattactagctagctgcacagcttagttaccctaaacataagtttgttcattttgtaaaatgtataatttcagctgtcccacctgagtcatggtgggtggtagtctgcaaagtctcttctaagtggtaaagcttagtcaaatgtgaggtattatcactggatcttggtgtcattaaggccatttagattatctttacttgtggcccctttatccaacaagggcacagacccagaagggtgtttagacttctgtcatgaagtagagtcattagctggaacttatgcttcccttactaacagtgcaggctggaggaatctgatgcccttttattttaatagagttgccttttatcaagagtgattaccttgaaaagtcctggagtaatctgttcttaggctgttggcctgtgggagctgacgttttctctccttattgaaatgtgtttctctcttacagctgagcgggctttggacaccatgaactttgatgtgattaagggaaagccaatccgcatcatgtggtctcagagggatccctctttgagaaaatctggtgtgggaaacgtcttcatcaagaacctggacaaatctatagataacaaggcactttatgatactttttctgcttttggaaacatactgtcctgcaaggtaaacattgattaaatgattttagcagaataattaattgattcttgaaaacaagataaataccaaacagagaactatcttggaattggggaacaagatatgggaattttcaaaatgctggacatggaatcctaaaagttcccataggtaatctcagggccatacccagcgtaaccagcacacgctttcatacccttgttctttactcagcctgaaatatccttcctattctttagctttggaaagcccacgtttttcttttgggatgggggaaagtagaggaccagagaagtgtctctagtcttgaggaaacttaatcactttagaagcataaattcactctattccttctacgtatctgttctatgctgagcactttaaaacttaaacggtggtggtgtatatgtttaatgccatactacactgaaaatctgttgtggccttggaaaatgttttgttttctgcatcaccgtggtttgcacccagatctcttaaaatgtg

SEQ ID NO: 6263 - DNA, 1133 bp, Homo sapiens
atgcctggtgtgaagatacatcacctgacatctaaggggatcggcccaagggaggaaatgaaagctgtgaaaaagatgctctgctctccccactcaccagcctgcctcagaggtccagcttagccacagacacaatctctgacaactcccaagaactagcaggaagagcaatataagaactagggtttattttagcaaagaaaacacgtaagagccacactggtagtcccaggagaggcccagcagcaaatgctgagaaaagccagtggctttttgcacagcctgcccatggtggaggggagcacctgagctggctcctgggcccacagctgtgcctgggaatagtccaggctgtgcctgcagaggagctgctccaagcagaccctgaggaagggcacatatcccaaatgctgcttgcttcaaacaggcaccctcggtgctgcctcctctgaggctggcagttccttcctggatatgcagggtcaagagcggagggggaagcagagagagtgccgcctcacacgtactccccacagtcggcgatgatcaccttctgctttggcttcccgtccttgctgccctgggcctttgtggcagaatagaagtgagggagtaaggccggagactaacagtggtttagggataccaacccctgcctgcccatttgcccacttccaccccggaacctgggcagcagcagcccctcccgctggacacagcccctggccatctctctcaggccacagagactctccagccctcacacagggctgtgctcctagggcctgggtaaggaggaggcccattcctggccacatacctcaatttgccgcaagacatctaggccttcggtgacctctccaaacaccacatgcttgccatccagccagtctgtcttgtcacatgtcaggaagaactgagagccattggtgtttgggccagagttggccatggatagtagacctgagggagagaacaaccatcagctccccgaaccctggctaccagcccttaaaggacgtctgtgcaggctgttgacagcccttcagccagtcaggctcagactcggggatgcacagatcacatgcaaatgcggccaccttatcttggattcagttaatagtcagtgaaat

SEQ ID NO: 6264 - DNA, 1225 bp, Homo sapiens
aagtcagagtgtttccccagaccataacaaagaacctaaagagaagggatccccagggcagaatgatcaagagctgaaatgcagcgtttaagagacatgtccagtggcctttggaaaggtggtggggatccagttcaggagggaggggtatgtttgtctcccagtctgggcaaaggagtgctatgcggaattctctgcatagcagaaaagctcccaccattttcttttgatgtggttttaaagtctcacgttctctataatagaaacagcaggtcttgtcagctccttgtgtggctgatgtgtctggaaatgatgtagttcaggaaagcattttttttttctttgaaccttaaaggttctattattaaaagcagcacagattccacatttttatacatgaggatcttctttgtggtgaataccaggattgactgcatccctttaaagaagttttatgtccctgactctggctaaaattatctaatttccagatgcttttgtagatgactgaagtatttgtgagccacatattgggagttctagatttgagtgaatggcaggaaagggccatctccattgagatgattaagtgaaccaaactagttctcagaattctacagagaaggagggaatcagactgaggaagctgtgacataggacttgaagaccaaagactttgaaatttgcgagctgctcatgtgtgagttattatcactgctgtctttctattgagttacaaatctatatttttattgaagtttaaataaagaaaaaatttacaagagcctctttgatccttaaaaagatatacaagtccatgcctagtttatacacagtatgctctgttatcaatgtgatagctttttctcaaatttgacactttttgtagatcatgctgtctgttcatttatgtagcgggtgtttatttaacacgttatagtccttgaagacatctagagagggtcttttattggagatctattacttccaattgaagccctctttctggagtgacctgagctgccagcaatgttaaacagatacttatttatatataacatcaaatatagcatttttagggtataattcagcagcattaactacattcacaatgttgtgcaatcgttgccactatttccaaaacgtttttgtcactccaaacaaactttgtgccctttaagcgttaactccccattcaaatacattttgtttgtgcagaatctac

SEQ ID NO: 6265 - DNA, 1128 bp, Homo sapiens
ccccttccagcctgccatgaatcagatatctttcccagaatctgggcgtttctgaagttttggggagagctgttgggactcatccagtgctccagaaggtggacttgcttctggtgggttttaaaggagcctccaggagatatgcttagccaaccatgatggattttaccccagctggactcggcagctccaagtggaatccacgtgcagcttctagtctgggaaagtcacccaacctagcagttgtcatgtgggtaacctcaggcacctctaagcctgtcctggaagaaggaccagcagcccctccagaactctgcccaggacagcaggtgcctgctggctctgggtttggaagttggggtgggtagggggtggtaagtactatatatggctctggaaaaccagctgctacttccaaatctattgtccataatggtttctttctgaggttgcttcttggcctcagaggaccccaggggatgtttggaaatagcctctctacccttctggagcatggtttacaaaagccagctgacttctggaattgtctatggaggacagtttgggtgtaggttactgatgtctcaactgaatagcttgtgttttataagctgctgttggctattatgctgggggagtcttttttttttatattgtatttttgtatgccttttgcaaagtggtgttaactgtttttgtacaaggaaaaaaactcttggggcaatttcctgttgcaagggtctgatttattttgaaaggcaagttcacctgaaattttgtatttagttgtgattactgattgcctgattttaaaatgttgccttctgggacatcttctaataaaagatttctcaaacatgtcagagtgggggcagcttatgccacctgagtcctcctcaaccacggaaaactatttcagggtagccacaagtgatccagagggctgcacttctctaaccatgttgctaacctggtcattccactctgggttcctgaaatgccatttcagacatgttgaaacaatgtaggctcagtactcagtgaacacggaattctcttgtgaattgcaaagagtgctgaatttgtactttagaaggcttgaaatcctggctccaccacttctgcagc

SEQ ID NO: 6266 - DNA, 1164 bp, Homo sapiens
ccattcttaaggaactgccgactaggactgatgatgcattttagctttgagcttttgggggttattctaccaacaaacagtccattggaaagaaaacagtccctggaattaacagatcagaatgttcacactggttaatctttttttaacaatgagcatgaaggtagcagaagctggtgtgtttccagatggttcttctaaccaaactaatttttcactgttgacaagcgaggcaagggttgcactggaccaaaggctgaggcttggccatctagcattccatacaaaattgtttcctataagcattccttttattctctattctatcctgggtctgcctcaaccgtgagataggagagtctctggtactagctgctgtagcagtgcccttcatccagggcagttaatggagtcttggaccctttctttctctgggatccctgcccagcaccttcctatagagatgactttaaaaggaaaaaaaaaaaaaaaaaaacccacatgatttcaaggagtctggcattcctgaatccttcttccctgccaggtgcctgtcacctgtcttcactgcctccttttccctgtcatgctcatcagcttatggcttctgtctaagcacctgaacagaggactgaaacctccactgcaggctggttttaggtcttgaattatgtaagaatcttgcacagcactgctaatgtaaatttcagttgtttttccctctaggacaaacacttaccaaaatatgcaacttttttttggtgggaagagagattgtcctgtgatttctacccatttcctgaggcctgtggaaataaacctttatgtacttaaagttatacagaaaatagaataaagttaataccaaacttgcttagttgtttacctgtgatattggctgtacagaaatgcaaaaaatactgaaaacaccaaggataagaaactactctttattttagacaacctcataaaattattttcacatcccccccaacttcttgctcttaatcctcatcttttagttgaagaataaggcttaagagagagaaaggaaaaaccataatggctaaacttagcagcaccaacacggttctttcatcaaggcgtagctcatcatttctccaaactgacatgctacagaaatgtcttccaaaaagcgttaag

SEQ ID NO: 6267 - DNA, 1320 bp, Homo sapiens
cataaatgctttgttttgctggtgatttaaccagtgcttggaaaaatcttgcttggctatttctgcatcatttcttaaggctgccttcctctctcagtacgttgccctctgtgctatcatcttatcatcaattattagacaaatcccactggcctacagtcttgcttctgcagcacccactttgtctcctcaggtagtgatgaattagttgctgtcacaaaaggagggaagtagcacccaaattaagttgcttaagagaggaaatgtacatcttgtataacttagggagcgaagaaaatgtaggcgcgaaagtgaaaagtgaggcagctagttcttcctattccattctcgaccaacctgccctttcttaatatgactagtggtcttgatgctagagtcaacttactctgttgctggctttagcagagaataggaggaaccatatgaaaaagatcaggctttctgacttccatccccaaaacacatttaccagcatactccaaactgtttctgatgtgttccatgagaaaaggattgtttgctcaaaaagcttggaaaatactacacactccctttctccttctggagatcaacccacattagagtgtctaaggactcctgagaattcctgttacagtaaacaaaactaacgtaatctaccatttcctacactatttgagcatggaaatcatagtccccactctgtgaaaacttaacgctttttggaagacatttctgtagcatgtcagtttggagaaatgatgagctacgccttgatgaaagaaccgtgttggtgctgctaagtttagccattatggtttttcctttctctctcttaagccttattcttcaactaaaagatgaggattaagagcaagaagttgggggggatgtgaaaataattttatgaggttgtctaaaataaagagtagtttcttatccttggtgttttcagtattttttgcatttctgtacagccaatatcacaggtaaacaactaagcaagtttggtattaactttattctattttctgtataactttaagtacataaaggtttatttccacaggcctcaggaaatgggtagaaatcacaggacaatctctcttcccaccaaaaaaaagttgcatattttggtaagtgtttgtcctagagggaaaaacaactgaaatttacattagcagtgctgtgcaagattcttacataattcaagacctaaaaccagcctgcagtggaggtttcagtcctctgttcaggtgcttagacagaagccataagctgatgagcatgacagggaaaaggaggcagtgaagacaggtg

SEQ ID NO: 6268 - DNA, 1133 bp, Homo sapiens
agaaggagaaagggagtgtgtagtattttccaagctttttgagcaaacaatccttttctcatggaacacatcagaaacagtttggagtatgctggtaaatgtgttttggggatggaagtcagaaagcctgatctttttcatatggttcctcctattctctgctaaagccagcaacagagtaagttgactctagcatcaagaccactagtcatattaagaaagggcaggttggtcgagaatggaataggaagaactagctgcctcacttttcactttcgcgcctacattttcttcgctccctaagttatacaagatgtacatttcctctcttaagcaacttaatttgggtgctacttccctccttttgtgacagcaactaattcatcactacctgaggagacaaagtgggtgctgcagaagcaagactgtaggccagtgggatttgtctaataattgatgataagatgatagcacagagggcaacgtactgagagaggaaggcagccttaagaaatgatgcagaaatagccaagcaagatttttccaagcactggttaaatcaccagcaaaacaaagcatttatgtgagtacctcaggcctgggcacctctttgcttgaaatatggcaagacttggaaaaatgtttgcccttagaatctatctcactactttagttagttgtctcctttgggcctgggcacagttctggcactgatctggaacagactcccttttctaaaactgaacttgaccacatcaaaagtttgtaaaacaatctccatggtaattaaacttgcattcaacaccatatggtaacagaagatggcaaaggataagattcagatcttagatctttccaagtagggcatgttagatgatagaaggattagttgcaagctggatctgagctcaggcttgggcatgaaggaaactgtctcccatgtggtttggaagagttaggggctccctgagctctattgtgaactatacgggtttcatccaaggaatggtatgatgtgggcataaaaccattcttcagacaactgaagatggtccccttctgtagccagaaacactagctgtcctgcattgtccatttcctttagccccaggcggtcctgcagaaggaaaggc

SEQ ID NO: 6269 - DNA, 1099 bp, Homo sapiens
tgggcgacagagtgagatctgtctcaaaaaaagctacttaaataatttgttctgtgatcacactaatacctttcttaaaatcacactatgaattttttttttttttttttttttttttttgagatggagtctcactctgttgcccaggctggagtgcagtggcgccatttcagctcactgcaagctccgcctcccgggttcacgccattctcctgcctcagcctcccgagtagctgggactacaggcatccgccaccacgtccggctaattttttctgcatttttagtagagacggggtttcaccatgttagccaggatggtctcaatctcctgacctcgtgatccacccgccttggcctcccaaagtgctgggattacaggcgtgagccaccgcgcccggccacactgtgatttcttatactttatggatgctactgatcccatagtgaaatcagcttggtaataacttagaaatttcatgtccttctttctagatgaattctttcctgtgtttttttttatttgctgtattaattggtcgaaaggagctttttgctgcatttggtttttatgatagccaacccactcttattggactattgatcatcttccagtttattttttcaccttacaatgaggtaatgtatgatctttaaaattatcacacatatgctcttgcctgcttcaaatctagagctttcaggatagtgaaaaaggaaatagaacagtacagttttaacaaatagatgaaacaaagtcttttagtcccctgattcactggtcagtatgacaaagtagcagaaaaattcaagcccaaataaataaacgtttgcatactcttaggaaagtataagtagaaaactagacttcagtggtgaacacctaaaaggactcggtagatggagattaactattggaatgttgtgtcctaggccacatattcaccagtgcttgggtaaaaatcttatgtgtatgaggggacaaagcaaacactaattggtacagctcagtaagggaggcttagtgactgttcctctgctccatgaccacctgcctccatatagcctgagggatccacccaaacccacaaaatcaaaa

SEQ ID NO: 6270 - DNA, 1155 bp, Homo sapiens
ttttaaatcattgagttttgtggggtttttttgtttgtttgtttcttttgttttttggaaaatccgtgtctttatctttttttcccacgtggtagatatgatcccattggaggtaaattgtagcttcttctcattcatgcagtaaataatacatcctttcactcagcagagatggccatattaaacacgttttgctatgttaaaagtggcagaacaggaaagacgaattaaaaataacattttttaagcgacataaggatgaaatactgatgaatctctgtgacattacagggaaaaaaatatagttttctatctctttcaagggcagaagagttttcatttttatttttgtaattttatctgtaagtcataaatattacttaatcaggcctgattctacttttgaaaattacagttcttgaaatgcagataatgtttactttgaaaacaaatgtcatgaatgatttccagtttttaaagctatatgtttcactgcttcatatctctgtccactttctgaatgagaacttattttgtgcctagagctctcactcactgataatgcttattaccttctgggcatttattccaaagtgggatcaactgtacgcctttggtatctgaccataaagtcttttgctccgctgacatttgggtgatgtcttcacatggaaatataataaaaataaaaatctagtttaatactgcattatttattttcctaaggctaaagaggagcagtcctatgcttttattcagcatcctttatctgtgacttcatgctctgataactgcctttccttccttctgtgcctttgaatacaaatttcagttctgcaaaagtgaaacattaaacattgccaacgcaaatgtatgtactttgtctttagtttgatatttgtgtatcatttttttaatttgtgtatcatttgttacctgaacatatgtttattacctgagaggaactgggtgctagcaatgaagagtggaatgaagaaatagccctaatgatgagtggtgtcagtgccaccactgtgctttacacagagtctcttcagtgtcttgctcctgctttgctccagagtatcaccagttcttgcagatatttccttggaagcttcatttggaatcattccttctctatttttataacct

SEQ ID NO: 6271 - DNA, 1354 bp, Homo sapiens
atgagacagagactctgctgcctacctcaaaagggcactgtaagattgaaggtgggcatcagacaaggtatcatgaagtgggccttgcaattgccattgctgtcatttttctttctcaacagggtccccagggcatcaggggctacccaggcatggcagggcccaagggagagacggtaagtgaatcttggggtgttctacaagagcttccaggagctgccttctggcccctggagttcagccaggactgacctgcaaccctttcctctccccagggccctcatggatataaaggcatggtgggcgctatcggtgccactgggccaccggtaagcctctttttgctcccctacccctgaggctggagctcctacagctacagccacagagtgggcatggctccccctgagcctgtgtgacctggattcctgcttgtctttcttgccagggtgaggaaggtcctaggggaccgccaggccgagctggggagaagggtgacgaggtgagtcctcaggcacccattgttcagtcaggacccctggggagtactgggcaggacaaggcaccccctaaggctgtgtgtgtgagagtgcatgagtgtgtgcgtgagtgtgaatgtgtagtgtgtgtgagtgtgtagtgtgtgtgtgtgtagactgtgtgtatatgagtgtatgtgtacagtgtgtatgtgtgaggctgtctgtgagtgtgtgtagtatgtgtatgtgagtgtgtgaggatatctctgagtgtgtgtgtgtgactgtgagtgtatgtatgtgtgtgtgagtgagtgtgtgtgtgtctgcccaagtgggtgacctgctggggaggaccatctgtgccaagagcccagtcagcccaaattcagactttaggcgaagccctgggatccagtcccatggtcactggggccagacaatgagattccagcaaatcagccatggggctaatgggatttggtctcgatcccagttctcttaactctttttttttttttttcccaattaatagacctgttgggggaagcggttttaagtttacagaaaaatggagcagaaaacacagttaactgttattattatttagttttttaaattattttcttttctttttaaaaattaaaaaattcttatacttttatttttctattagacagcagagatcatctagttgttttgttttgttttgtttttgagatggagttttattcttgttgcccaggctggagtgcatggtgcgatctcggctcactgcaacctccgcctccctggttcaagagattctcttgcctcagccacccaagtggctgggattacaggcatgcgccaccatgctcagctaattttgt

SEQ ID NO: 6272 - DNA, 1438 bp, Homo sapiens
attgctcaataagtcatttggggtttggcatcctgcccagccacttcccaaacatgaagacctctctgttgctttatgttgtacatgccccatagccatcccaacgtcctccccagtcctctcctggcaccagcaccttagaagttgttggcagaaggcacttaaactgtgggagaagtgtgcacacctttgagtcccttccctcaaggttaaagctcctgtcagactctcagaagggtctgtgggtgttgtatattaggcaaacaggggaaagcttagaggtccttctatatgtgttaataagctgtttctaagtgtttaaatttgaaaagcatcatgttctcatgatttatgggaatgaagcaagtactgaaatcaaattaaatactccctgggtcctgggtcagtttgaccctagccctggggtgaggcaagccccctcctatgaggatgagcaaaaatactactctcttcgccctgagttgctttctggatctggggcttcaggacttgctgcttcagtcagcctttattagcaccaaagactttatgaagatcccacacacagacacacatcccttcccgcctcccccctgccttcagtaggatctggctccgtggctggaggaccaacccctatagtgggaatgcagagcttaacgtgtactgcttgtgtgtgtgcgtgagtgtgtgtgtgtgtatgagtgtgtgttccgcctcccaccctctccccatctgctctgggtatttttgtttttgtttagttttaggtttacaacagagaggaattaatttatcagcagcctaaaactgttgtgtttttcttatggtttaaaaaacgccatgtcattgataactccctttctcccttcccttctcccggtctgctgatcactctttcatgcctgtgtatccagggtgctctgtttccccaccgttcccaggtgtacgaggcagagggccgggacagctttcctctcagtcattgttcaccccacttgaaaattcagacaagaaaactttgcttaaaagatttcatgtgtgggaaccacagttcctggctgcctttctcctgtgtatgtgtaaattccttaataaatattgcagggaaggactgtttgcttggccattactgtgcgtcactcttggaggagggtgcgttacacttaggttttctgttttccaaaggcaattgtttcacttcctgtattttagaaaattctgtacttctcatacccaagggtgaggcccaggctccagcagtcagaaagggggcctctctccactggcatctagagctgtgagctgagagaactccagagatcagcaccttctagagtcacagagcatcagagcggcatgctttccccccacaggtggagaaactgagacacggagaaaggacatggttggcaaatgtccactagagaaccctggg

SEQ ID NO: 6273 - DNA, 1228 bp, Homo sapiens
ctgaatcccttgggaaggatgacaaacccataagcttacaaaactggaaaagaggattggatatattatcacccatggagagattccaccttaaatatttatatgtcactgacctggctactcagaactggtgtgaactgcaaacagcatatgggaaggagcttcctggtttcttggcacctgagaaggcagctgtgttggacactggtgccagcatacacctagctagagaactagaacttcatgatcttgtgactgtcccagtcaccactaaagaagatgcttgggcaattaagtttctgaacatacttttgctgattcctaccctgcagtcagaagggcacatcagagagtttccagtgtttggggaaggggagggtgtacttcttgttggagtgattgatgagctgcactatacagccaagggggaactggagctggcggaactcaagacacgcaggcgccctatgctccctctggaagctcagaagaagaaagactgttttcaagtcagcctatacaaatatatctttgatgccatggtacaaggaaaagtgacccctgctagcctaatccaccacacaaagttgtgtctagaaaagccactggggccatcagtgctgaggcatgcccagcagggaggcttctctgtgaagtctttgggtgacctcatggaacttgtcttcttgtctctaacactgtcagacctcccagttattgatatcttgaagattgagtatatccaccaagagactgccactgtgctgggtactgagattgtagccttcaaagagaaggaggtgagagccaaggtgcagcattatatggcctactggatgggccaccgagagccccagggagttgacgtggaggaggcttggaagtgccggacgtgtacctatgcagacatttgtgagtggagaaagggcagtggagtgctcagctctacactggcgccccaagtcaaaaaagccaaatgaatagaaggtatgctttcaagaatgttgatccttcctgctcctgttgtacctaagcaaaagaggaccagtctctgagcttggcttttatggagagtgttcttattttggttcttttttttatttccacaacctctaaccacattcagtccaggaccaaggctcagggatgagtgggagagatgggttatactgtccctggagcttcatcatgattgcctgagaagacagatgctcatcatggctggaat

SEQ ID NO: 6274 - DNA, 1081 bp, Homo sapiens
tgtcctccctcttttattcttgtgtaatgatgagacataattaagggtcatctacaatggacaattttcaaggtgctgatgtgatgtcacaacctccgctacatcctgagtaagtcagtgtccccaacagcagatgaggctgggtctttcctcatttctgcttctgggatgacatcagtgggagagttgaagatctgagaattctaaaggaaatgttctctgatgggaggagagagggaacttatttcccttcaaagtagtttgcttcttaagaccactcctccctccagaatgtctttaaccagacatcatttcagaaggtggggcagctgcttccttaggaagagtgggcctgatagctcaaccaactcctttagcatgtaaactcacagaaggcaagaacccctttttttagactttccaaatgcatcctgcaaagagagagatagctgatagggactgacaagcacactgtttagataagaagcaattagccttttatatctgtgctctatacattttctatgtgcagcatctttcctaacttgttgtggttcccgggtggcaggtgcacagctgggagggactgccggctgtttcgtacaacattcttgccaattcccttgaggagaaaattcttcacatggcttctgcatgtacagtatttgggcagcaaaacatgattaaagtcagtttgaaaatggtttcatgtgttgctttctgtagatggttcttcattctagaaggaagaaaacagggttccaggtggctacaaagaggaggaggatgccttggttgagaggcaggggagagcagtacatttcagaaaaagagcatgaaagatatggcctgggcctctgactcctgtttgagaactctatggtcacagcagtgttcttgagccatgaaatctgactggtccaggcagcttcctggctctgtctccccggtcctctgcttccaggccctcaaagccttctacttccatagactccacaagggatatccaacgacagaggaaggtaagatggagctaaggccgcagctgtcgacccactgttcctttctttctgagcttttg

SEQ ID NO: 6275 - DNA, 2893 bp, Homo sapiens
tcctgtctcttcaagcctccccactccaccgtgccgaaggagctctgccagtgggcctgggcaggcagccacagagggcatgttatctgctaaagcaaacagtcctcctgaggccctgagggtggccctgaccccctcagggctcattcctggtgggcatgactcggtaaggaggttctgtgggtagggctgtttgctggaataaggagggctgaggctgagttgttccccgccactgttgaggatcccatctgacatttggggattcactgcatgaagttgttcatttggggctccagtttttgtgcatttccagaccagggtccctgtctgggagctcagacttagctgggctccagcagcctggctccggactctcgtctgccaccatcaccagctctgtctaagcaatacttacccctccgggcttccctgctttcctgtgccccactgctgccctctgcagagccatctgctccaggcacccacctgcctctgcttgctttctcacccatgtctggttggagcttctcacagccactcaaaccctgacttgatttgacaactgggccctgttggtggagaccagtgcctgaactggaccctgtgaaatctgtcccgtgggaatcctgaagtctgactcaggaatgcccagacctgtccctgtccctcctcagctctagggtgaaaggcgagaggttgcacaggacatggacagagcagcccttgggtttgtatctggtaggggagaaagcagcaggacagtggaggtgtgtggaaggcactctttccacctctctccaggcattatccccaggtgctgaaatggctgtggccccagcacctgaggcaggggtacgctacctggggtagcagtagaaaggtcttggggtctgaatgacttggggcctccattcataaccaaagttgtaggggcatggaggcagtggcgccttatggataggtcatctcagcccaaagggcctccttggctggcatggttctgtgttacgttgaagccagagtcttataacacctcccaagaaagataggggaagaagccagaaccccacctggcctgcccacaggacaagaagtgggtaagggcaggaaggaaatgaacggagttagctcccaggctcctatctctgcctgagcctctattcttatattatcagagaaagggaccattgggtgcatagagatggggaggaggccactgggctgaattttctctttaggcggaaatgctctccccaggcccattgcgttcgtcaagttcttggaaatggacaaagggctctgtcctcctcgaccctagtgggggatcaagaaggaaactccgttgcaaaagggtattttaatctcctgtttatgatatattcacctctagagcagtcactgtcagggtgttgcgaaaatactctacacctttgggatgatagggttgttagtgacccacaggacagtatagatgtttgtggatgtagcactgagtggtgatacccagaccagcagtcaccccaggaagtgggggctacccataccctcattcctctggtggggagctgcctgcagagaggcctgccactgggggttccaggccgtggtgacccttgcctctggggaagggttagcacaggggaggttctagctggaggaggggtctgatgtgctggtaacttgggctgacctacctacagtccctggctgccaaaactgctcagcagttgggccactccactattccacctctctaaaagaaggtaatttcctccccaaattgaccttggggaattattcttttaaccctttgcaccaaataagttactcatccccacctggattttaccccatgagggtaaagttgtgtgaggctgacacgtctgtgtgatgcagtgtggctgcacttaagggtctgtttctcagcatcatggatgcaggggcttgtctgaaaagccactctggacctagcctgtcccagaagaggagaatgcacaagtgtaactcctggttgtttgctggggtgggggagcatctgctgtttgaggacggggggtggggaaggaaggaacatgatccctccagaagtctcccaccctggggccaactcactgccatgttcagtgtcccggctccaaatgcccccttgcccagatgaaaccctgcagtggttacaggaatggagctctttgtcattccacctcctctggtcaggcgaggttcactgtgcatatggcagagacaggagtggccctgcagtgatgttgggttgtgggcagggacagtgatggatgactcagagcgtctgtctttgtatttctgctctgttcattctgtcccactttcttcatagactccttttccctgcaatgggtttttggtatgaaaaaggctccagtaaatggagccaagtcttggtttgacaaggggaacttgatccttcagggaagaatcatctccaaaatgactccccatctggtttcttctaccacccaattctactaggaaaggagcacttaggaggctcttgggatgcagcaagtcccaggcaatgccagcatttcatgggggctgaggcagaacccaggagctccaagaaaggccacccatagagctcatcctctgtggaatcactgccggttagaacactgaggtcaagccagtcctcccatggtcatgccacccaccagggaagcatgcctgatctcttctttactgccagccttgaggagagcagaagcctccatttttaaagacaataaagacctccaagggtacttctttggaaatgaaatgtagcacaatcttagcctacgttaccaggagccctgacatgcaaccagggtccctcttccatgccctgctgcccaggagttgctgagctcctctt

SEQ ID NO: 6276 - DNA, 1144 bp, Homo sapiens
gcagaaagatgcaatattttttgtttcctttttttccatttttttctctaaggaatcaatatttcaatatgttgagtgtgtgtccaatgctatgaaattaaaatattaaataacatatttatggcattttcttgaagagtgtggttgaagaaatatttctccttttgtttttcttttttttttgtttgttactgccacttctttttaggagcaaatctccccaggggtgtacggtatttcttgactctgggaacagctgctacccccaagacttgccacgttgttctgccctcagatggaattaggtgaatgtgtgtagctgctttttcactcgtggtcctctccccatcccttgctctgaccccagagctctgtgtatttgcatccagaggccatggaaacattctttgcatttaagagacagatttattccctgtggagagtgggtggattcattgccacactcttttctcccagggacccaggaaactaggactttgtgtgtttgctgcccacctcccttttattttttaaatgcattaaaaactgtgctagtctcctttgcatggacttcaagctgcatgaaatgcaataaatctcattttagataatttagagtctgggtttctgtgtctgggggcattcatggggccactttgcttggaaaggttcatttgccctcagtttgtgtgtctgggagagagggccacccttgtgagaaggagatgttcaaagctaagggaacttaatgctgtgtacctaattcaaactgaggtccttagccgatctttttttttctggctctgttgcccaggctggagtgcagtggtgtgatcactgctcactgcagcatcaatctcctgggctcaagcaatcctcccaccccagcctcctgaattgctaggactacagtcaggtaccaccatgcccagctaattttttttattttttatttgtagagacacggtttcactgtattgccctggctggtcttgaactcctgggctcaagtgatcctcccacgtcagcctcccaaagtactgggattacaggcatgagccactgtgcctggcctacctcggctggtcttaaaagtgagcttcatcagaatatatttgctgctcagagatgcttgcctgctgga

SEQ ID NO: 6277 - DNA, 1209 bp, Homo sapiens
gagcgatagctagatgaaaccgtacttttcgggatcctagtccatccaaagcagccgccttcggggcaggtgtggggaggagggaggccgacgaggagccaacgccgcgcgaccctccgcacttccgtcttggaggccagggtggcgctgccgccgtccctcgcccggaggcagagatgcgctggcgcatcaccgccaggagcccacagtgaaagaccatcggatggaaggcgacgcccagaactccaggagaccgctgtgggaggacgcgaggccaggtgacgaataggccaggcgtgagttcccaaacagcctcctccccttcaagagagtaagcttgggccacaggctgggacggaagcagaggggcagacacgccaccacccgcccggcctcgaacctacggcggcacagttcagcggaggcggcccagcggtcctgtcccgcgcctgcgcactccaggccccgccccgccccgcgccctccaggcccggcccgccctccaacctctgcgtgcgcacagcctagagcccgcctccgtgaaagactgccgggcgcatgcggtcggggttgttcactggctgtccggggctccgcgcgcgtcgccggcccagctctgtcgctgacgggaggatctgaagccggccgcaggtaggctgactccagggatcccgggggggatctgttctcccgcgcaggagtcagcggcgcgagctgagcccggcgccgaatagccccgccgccgcggtgacggacgtcgctcctaccaatcaggggcgaggtgactcggcgtcctgcccaatgggctgtgtgcctaacgggagtggggcgggcgccccggccggcgagctgccggctcccgcgcgcgggcctcgtggccgggcggcgctggggagaggggccaagcggggcgcggggcggcttcagaggctgcggggcctgcgctgccgcgctgggccgcgccgaatcagctcggccgggctcgtcggacggagaaggccgtaggggagtggagcggcgcccccccccacaccctccgcccttgctcttcgtctgcgaggaagcccggcagtcgcccatccattcaagcagtgcgggcctcgggcctccggcctcggcgcgggctcagccgcccggggctgggcgcggcagctccgcgccgtaggacgagggggcctgcgaactcgccggccctgggccccgcggctg

SEQ ID NO: 6278 - DNA, 1237 bp, Homo sapiens
gccaccacacccagctaattttttgggtgtttttttttttttttgagacagagtctcactctgtcacccagactggagtgcagtggcacaatctcagctcactacagcttcaagctcccaggctcaagtgattctcccacctcagctaccccccagttagctgagactacatgcacatgcccaccatgcctggctaaattttgtatttttttgtagagacagtgttttaccatattgcccagtctggtcttgaactcctgagctcgagcaatcctcctgccatggcctcccaaagtactaggattataagcataagccaccttgcccagccatgaattttttttaaaggacttttgcatccatgttcataatagattggccactaattttctattctattcttgagtctgttttagtagtttatctagaaaattgtccttttttctgttttcaaatacataatatttttacaaggtcacgtagctagtaggaggctgtaagcctggtgagtttttgcttttatttaataacttgcttttttctaaacaggtgatctgtgtccacgatgtctcatccatctaccgagtccccttgttgttagaggagcaaggggttgtagattattttcttcgaagacttgaccttcctattgagaggcagccaagaaaaatgctgatgaaatggaaagagatggctgacaggtttgcctgcaatgaggagctgggagtgctagcctcctttactcttttgtagggctggtgaagccgactctagccctagcacttttgtacttttgcacttctgccatccactcattagaagagcctttgtagtaagagatgttcagaaaggatcttagctgtcacgtagctgtggcacagatgaggagatcctgatagggccaggccaggtgccgggcctccagacaatgagttcgggttatgtcttaacacgcttgtctcttaccaactagatcagtgcagatgggcgtcctggtggcagcgggtgagtgtgcatatccaaagcccacacgaatggctgacagtggctggagcactcctgggtaccactccagagttctgagctgtgtttgggaatgtgtctcaccccacaccagaaagggatcacattaggacggggatgtgttgctgcctactccactacatccttttaaggctcggtgatgctgtcacattccttcagaaatcttcacttcgtgtcttagagcaatgggcag

SEQ ID NO: 6279 - DNA, 4897 bp, Homo sapiens
agaggctgaggtgggaggattgcttgagcccaagagttcaagaccagcccaggcaacatagggagaccctgtttctacaacaaaaacaacaaaaccagctgggtgtggtcccagctccttgggagatcaaggctgcagtgagctgtgatcacaccactgcactccagcctgggtaacagtgtgagaccctgtctcaagaaaaaaaaattgtgaacaactcagtaccaaagatagtgcagtggcagtattacaattatgtatactatctttttcacttgcaataagcatgttcttaagttactaagaaaagtccatagtttcatatgcagtttctaagttgatagtgtttacatacaattcattgtcacagtagcacaatgtatggggttaattcatggcttcagtgtcttggtaatggcccgttaggcgattattgcaagttggactggtagaaaaggggaattgcctttgtggtttgttcttttgtgcagtggagtgctggttccaggaggatttggtgttcgaggaacagaaggaaaaatccaagcaattgcctgggctcggaatcagaaaaagccttttttgggtaaggagctctgcagtgcagtcttcacttaagagtaggaaagagtggggaacggtgccacgtgggagcctatgaacaaagtggggggattactgaaacatgctgtctttgtggataggagctcaagtagaagccttcatgttttctctttagagacaaattcagtcttggaaagcttatttatgcttatgagctacatgtagatgtcgtggaattttgagagaatgaattgtgaattcctgtccatttaatgaacccagctgtttgtagcacacgtgaggttgagttttatatctgctcacttggcacaacagctgactgtaattggacaaaatgattttgcatgcctcctggtgctgtacattttagtaattttcaacttgaacaattataaataaaaacttaatgagagagggtaagaaaacttgaattttaaagtactgaggctaggcacggtggttcacacctgtaaacccaacacttgtggaggctgaggcaggagggttgctggatcccagaaatttgaggctgtagtgagccaagatctctccactgcactccagagtgggcaacagcaagaccctgtctggggggaaaaaagtactgaatagaatatcacttacttctaaaatcggataactttgcaaatctagaattttcatctactttacatgcagtttttgaaatctaatacaagtaaagtgtaacagcagagagtacttgttcatagcaggaagttatgagtttgcaattataattctccaaataaaggacacaaaggccattgcagaggctgctgggaaaagtaggagctgccttttcaatggagttttgtttgttttttccccccgactggaaggcgtgtgcttagggatgcagttggcagtggttgaattctcaagaaacgtgctgggatggcaaggtaagcgtgcattaagacactcattcaattcccgcttgtgtatttctggaggatatgaggcctgttgccgcctgggtgatcaggagctttggagaagggcaggcctgggttcctagcacctcatggtgtgccgtaagggagctgccttgcctcttgaggaacagcacggctcctccatgcaggaaggagggagcacagccagactccctcctttgccttctgcctctgtgttcctgttcttgagattctgtcactttgatcaccgtggccaccatcctgaagctggtgcctggtgtgaagtccttgtcctaagtgaggcttgggcagttattatgagaacctgggctctggagctattgaaactgggctcagattccaaccttaccgcttatgggtgattttaagcaatttacttagcctttatgggcctccgttttttctgtaaaatgggagtaataaaggtacgtacttcacatgattaagggagataatgtatgtaaatagtctctagtagtgcctggaaaatagggaaatgctcagataatatcagctcttcgcctagctgtgtattactatgtgacagacctccctaaagctcagtggctcccaacagcagtgacttctcatctcagtattctgtggtttggctcagtgcctgggtttcagctgcacgtggtgtactatctgagatggcacactcctgccttgtgttcagctgtgagctcggcccagccgggacgtcaagatgctgtctccacctagtggctcatcattcattaatccagcccaagcttcctcacacagggtgggcagctggactccaaaatgacaggcctgttatgcaggcacttatcaggcctgctgatgtcccgttggccaaaacaagtcacgtggccaagccccgagccggcaggggaggagaacacacatgggtgtgaagactgagcatgctgcactggggccaccctggaatggtccaccacagcccatttattctctgtagcccacccgacaaatactagattttcagaaagaccttgtaaattctgtggaaaataaagtaacctgaaggaatgtaaaagcagtttgactttataaagaacaagtgactctggtggccagcatatggtttagggctgggtttcattcaccctttccctgagaggctgcttcacagtgacctggcggtgtggcttagtttggtagacagcatgcccttgagtgctggcttctgagtcctgagaggcactgtcttatcacccgccaccccagagctggctttctggtctccctggatccttcacagccccagacctctgcctctcacttaggttcccaaatgggtaggtgctttggtgatgagcttacacttcagttgagactggaccctggttcaggccaggaggagaacagtgcccagcgttcacatagtaccaggaacttggtcctttgccttttggtctttagtggttttgctttggttagacggtaagttcaatgaaggttagaaaggttgagttgaaatcagttcatttctgactgagctattgagtgaaacagttgagtagggctttgtattagctgctgaagatgaaagaagtatagaagaaatagtacttgtttatctcagagagacaagagtctgaaacattaagacaatataaaaacttggctgggcatggtggttcaggcctgtaatcccagcactttgggaggctgagttgggttaatcacttgaggccaggaggtcgagaccagcctggccaacatggaaaaaccccatctctactaaaaatacaaaaaataaccaggtgtggtggtgtgcgcctgtaatcccagctacttgggaggccaagacatgagaatcacttgaattctggaggtgtaggttgcagtgagccaagattgtgccactgcactccattctgggtgacatagtgagactcttgtcttaaaacacaaacaaacaatataagaactgtcacaggcggggcgcagtggctcacgcctgtaatcccagcactttgggaggccgaggcaggcagatcacctgaggtcaggagttcgagaccagcctgaccaacatggagaaaccccgtctctactaaaaatacaaagttagctgggcatggtggtgtatacctgtaatcccagctactcgggaggctgagacaggagaatcgcttgagacctggaggtggaggttttggtgccgagatcacgccattgcactccagcctgcccacacttgttgcccacaagtgtgaaattctgtctcaaaaaaaaaaaactgtcaaagatacagtatctaattaaaaattactaggttatgccattagttttgattttcccattttgtactgattgactttccagagagttatacttaacgtaaaaaaattcacgtgtgtgtgggttgagtattttatgtcttaaaaatgctatttattgccggtctggtggcttgcacctgtaatcccagtactttgggatgccaaagcaggaggattgcttgagcccaggtgtttgagactagcctggcaatatagcctttgtctctccaaaaaatgaaaaaaaattagctggatgtggtagtgtgcccctgtagtttgaccttcttgggaggctgaggctggcggattgcttgaacctgggagttcaaggctgcagtgagctatgatcgcaccactgcactccagcctggacaacagtgagatctcgtctggggatgaggtcagggggatgctatctttagtttttgttctaatcactgatcttaaactgaggagggaagttgtgtttagagcttagcaatgaaactattaatcactttcgtttgtaactattttcataacaagtattttggtatttcagatgccaattctacagagtttgaccctacgaccagtcatcccgtggtgagtcaagtgtttgaacctccacagggcttagaagggtgtagaaggggcatttatgaacgtgattgatgattagagacaagaagtgagactgcttgagtccatcccaaagaaccctgaggttttgggcactcagacctaccagagaggaaaaacttttctttttcattatgtaattcctccctaatctttcattgaccacagaaagtttttaagacaggtaccagcccaggaaactggaggggattcctgattaaaattcttctccatccctactcccctcaactcccagaacacagtatagatactaatatgagaccctggcatgtgtacttactgtgtgccagccgctgctctcactgctttcatatgtatattttatattaattcatgggatccccagccatagtcctgggagaactgctgggttggagcactggttggcttaaccgtatccaaagattttccagg

SEQ ID NO: 6280 - DNA, 1361 bp, Homo sapiens
agcccaccccaggcacctcagtggggttccgggccacctcaggactccaagaggctgtgtggagccaccactcctagccacagctgccatgataagtccttccatgaaggactgaggagggagagtgggggtccagggctggtgctgctcttccctcagctctgccggggctctaaggtccctctatttatttctcaaccctggctggcctctcaccaggagtttaggctgaatgccttccacgtgatggaggaaaaggccaactctgtcctggtcttgctgtggcaccccatcgccccacagctcgtaccttctcaccagattcccctgaatccaaactcgtggtgcaaacctctaccttttttacaaaaagatcttattgttaatttattgtttctggcacttgggcaaaccctgtagttaatactcctcccacactagacactgggtttcaggaggagggagactgccctgctttggtcccagagaggccctctgcagataggcgtggcccctcttcagaggacactaccctagggcactttctctttgaggtggagagacccataaagccttgaccacatcactccatatggggaggagaaggatccctgtcaccttctcctctcttcacggggcccttttgcagccctaggcctcatctgtgggaagggagtccctggcttatactgcccccaccacagctccttgccctggccagaactgctgtcgaagaaaatcaggccggaaggccaagaaggcgctaagggggatgggagggcaggttttccaggctggagtcggttccacccactcgcctgtccacaggcttccttgtaagcaagtcagcagcacagctactcacgctgccatctggacttattttatgtcaatctgtttataaataaaaaccaatatagataccagtgtctttttaatcagttaacagccaaatcactacgcattcattggaccagtcattccccttctcttggtcttagttttctcatacataaaacgaggccgagcacgctggctcatgcctgtaatcccagcactttgggacgccaaggtgggaggatctcttgagctcaggagtttgagaccagcctgggcaacatggtgaaaccccagctctacaaaaaaaaaatacaaaaattagcctgctgtggtggcgcacacctgtagtcccagctgcttggggagctgaggtgaggggatggcttgagcctaggagatcgaggctgcagtgagccgtgttcgcaccactgtactccagcctaggtgacaatttgagaccctgtctcaaataaataaaatggagagcttggaaaaaatgattcctaagcgtccttctaatt

SEQ ID NO: 6281 - DNA, 1141 bp, Homo sapiens
atgcatgaatgggggttagcacatccatgaatgtagctgctagtttaaaaagagatttctcaaagaaataggaactccgaattcttaaatggaatgccatcattaagaagtgagagaaacatactggtagcagcattcagagactggtaaggatgtacctcatgggcctgcagtcccaaaagtggtttgggaccggggcatgacctttcctgggaattctgccccaatttacatctctctgattcagccactagataagaggaagcaaactttagccagactcttcttgcctcaccaactaagagaaacaaagaccaaggtatcacattctgccattagctgctacctctcccttccccattttcagacagattgagcccactttttgtgtcctcctctgctcttaagctgtttctcatcgtgggtgctcagcaacttgtctgctctcactctagtttctatttgcttccctgaaattagcctttaactatgcccagacaagccagagccttgcctaaacttctaattcctctgtgcttcttagtgtatcctttctgcctgcttgcctgcctgccttcctgcctgcttgcctgccttactgaccctttgccccacctctgatattatcatttcctgtgtttttctgattacttacctaaacctctgccaaagagctcgatctgtacaagagctgtcttttgctttgccctttggatctggtatttatgactcctgcccttctgcctggctacacgcttctgctagacatacataggtaccacctctgttatctgggtgcttactggccctccccctttcctatatccttgtctccacactaccctaccacttagagtcctggcccaactgaccatgcacttccgatatagcaggtagtcacccaaagctcagggagatttcatatcccattaagctttcctacctaagttgagactactacttttttctccaatgttttattttaaaaatttcaaacctacagaaaagttacaaaaatagaacaataagcaaccatgaactctttgcctatctttaccactttttgcagtatttacttcgtctgtttctcctaactatatatacacatataaatatacatacttgttgaatacctgtatat

SEQ ID NO: 6282 - DNA, 1197 bp, Homo sapiens
cacaccaatatactgaaatattccacaaagagacactaagaatatggtagtttaataggacgtagtagtcctaaaaagactaaaaagggattaaaagtccctacctggaagggtagggagttagagaattatagaatgagaaaacatttaattaactggcctatataagacattcttgtcctttttttaactggtatgggtctatttgatgcttcgttggaaagtaattttttccccttcatcttatctttcattgtttcttttgcatgaaaccattcttaattattagggaataattcagttggttgtccctggcccagctataaccaatctgaatccaaaacatgaattttggggttttactcttaatctgtctatacctcatgccttgtttttcccagtcctacacacctccaagcaacgagttcaagatcagtatgaaattggaagcacaggaccccaggaacaccacatccacctgtattgccacagtagttggactgacaggtgcccgccttcgcctgcgccttgatgggagcgacaacaaaaatgacttctggcggctggttgactcagctgaaatccagcctattgggaactgtgaaaagaatgggggtatgctacagccacctcttggtgagtaagtaaacccaaactctttctagccaattattaatagttagcgtccaaaaactgaacatcctattatgggaaagcctagggtacccagcttatcccttatttttcatatagtctcctaaaaaggcccacccaaaatgaaacaagctgcacaatttggacatctccatctctacattagcttatgatatccaggcttcttccaaattctttctaacaagaaatcacaccctttgttcttcttggccagtgcccatttacctgagagagagaatggaaggaggtcttgccgtttaacctatctcaaaaagcataaagctttcaccaaatcctatcataatgacaagaaatgagagaaaatctgccagtagaaagcatggctgttataaggatctcttatctcctttctcactaattctcacctggtccttggagttttctcgcttcgaatccattattacataaaaatcattttttaaaatttaagctaataacctcactaggtttttctttccagatcagattcccctccagcttttgcctcaataaatctgaggg

SEQ ID NO: 6283 - DNA, 1114 bp, Homo sapiens
atatagccagatggtgcaaaccttgaaggaggaggggtttttaaacacaagagtgagaaggtaatagtttttttacttttccttcctggaagcagagttctgatctctatctttattcaggactcatattaatcattctgtttgctctgaagagtctgttcttagtcttggaaagtgggagggcacatacctcatattgaatcctttctgctaatacttaatgacaaagggcagtggaggttttttcctctgatgatcattagtgggtgggtagggaacaatcagataaagcagtgaggatatacccatggttttctagacagagtatagtggaaagagcctaggctttggagttagaaacaccaaaattcagatctagactctgtcacttactagctttatgactgtaaacaaattatttagcctctgtgagcttcagtgtccttatctgtaaaaaatttatacttcataggatatcacaaatattacatgaaaaaatatatacacacataccacataaaatcacaagcgattggtgattcatagatacaaagtaaatattagttcctttcttccttcatttaaggggcttatgctctgctagctgaaatgaaccttttacatgcttacctaagttataaaatagaacatagtgagtactctaagggaggtagtagcaaagtggtaaagcagttcagaggagggagctgtcatttctaagcatttggaaacaaggttgggcttcatttcaaaatgaattttacttgggccatgaacaaatttcaatagagtaaataatttaggtagatatataaaatagggaaagcatagggtatggtatctttgttaaaaatagctaccacaggtttgagtattgtatttgtaaaagctaatagtaggaaatatggctagagagatgggctggggcattggtattaaagatccgaaactgtgatgcagtttggagttgattctggatacattagggagccacacattggatgtcttctttctctacctcagtttactatctgtaaaatgtataggcatcaattcagaaacttcaaatttttgtttgcaataaacgaaataagaaattccacacttgaaaaga

SEQ ID NO: 6284 - DNA, 2052 bp, Homo sapiens
ccccttacctataaaataaggatcataagagccactttttgaaggcttatggttgaattagtgagataatgtgtgcctggcatataggaagtacacagtaggggttagtttatttcttactttcttctctacccaagtcgctgctattattgcctctttccttccaggccatcacagagccatgaaccagcagcacatgatgccttcccaagccttccagatgcggcgttccctgcctccagatgacatccaggatgactttgattgggattcaattgtgtagggcttgtttctgcaagacaccagaccctaacgttacctttctgtgcagtgaagggaaaggtttaagagaatccagttgagaaaacaaacttgctaatcactttaccaatgttatcaaaattacttttgaagacaatcagaaggattttagctggataacttactgcttttatctgacccaagcaagtactacatgtttgtctccctgccagctgccctatgtagctcctaactgttgtgtgatttggacggctttttgcatatttgtgtcagtttgatgttaaccacaagtgccagactgatttttcagacggagcctattttgctgcaagcagtttatataaagatacatatgtgtaaatatatgtacaaaaattactgaaaggcttcagttttttctaattggattattatgtcttgaaagttattgtcagtttttattccttgttaggctattttctgcaggatgcttttaactgatgtaggaaactgaaaggaaatagattttttccaaaacccagttccccttatttaatcttttttagaaatgtgggtaatgaattctatctaataagtcaaggaaaccagaatttgacacactccaacaatccgaaggggcatgttgctcctgagcagcatgaagaactgaccaaattggttttgatgcttgggggatcatagagtatttatgtctgcttttctaaatctgcattataatagctctaaaatttgttgattggtaagaaattgggcattgcttggctctttaaacacatcagtgcttccacattcacctatgtatttattattcaaaagtgtcattttaatatttattgctaccttctgtgaatgcttagctcctgtcgggttcattaaggagaaatgtgtctgaaagcacagaactattattatttttttctttttttgagatggagtcttgccctgttgcccaggctggagtgcagtggcacgatctcggctcactgcaacctccgcctcccgggttcaagcaattctcctgcctcagcctcccgagtagctgggagtgcaggtgcacaccgccatgcctggctgattttttgtattttagtagagatggggtttcaccatgttgcctgggctggttgcaaactcttgagctcaggcagtctgcctgcctcagcctcctagagtgctgggattacagacatgagccactgcgcctggcccagcgttacttttcttgataagaatttacagataagacactcagagagacattgtgtcattctctatcatcactccttttaccatgtgaatagatttctctgtcttggcattcttgctgattcagacttattagttaaatcggatttttctggaatttgaatcagatttcatttgggcaacaacagcagggcagggtttctaaagcaggtttccccactcatctaggttgtcttgaaaggaggatagagccacttacagttttatttgcttcagtgtttaatgtagatattatgtggcctgctgtttctgttgtcttgtatgtctgtgtatgcatgacatttggtccctttctttgaaatgcagcccctcttacgggttttttagtggtggtggtttgttttgtttcatatcatatcacagtttgcatggactgattatcttagttttatgataaaactagaagaaatgagggtttttttttaatgaatagattttgaattgattctttagaccccccaaaaagtgtcagttctaatggggaaatatattccatcaagtcaa

SEQ ID NO: 6285 - DNA, 1267 bp, Homo sapiens
gtgctgggattacaggccaagccactgtgttcccctaagactttttaaactaaacatttaactgaaaagtttgatggttgagaaatcccacttaaatttaattccttagtttcccatgagattgacctggtaggtaatgaccattgtttgcttattaagcttttctttttccaatacagataacaatgaagatggtgccaaaactgctttctcctttggttaaagattgggctcccaaagcatttataatttcctttaagttggagactgaccccgccattgtaattaatcgagctcggaaggctttggaaatttatcagcatcaagtggtggtggctaatatccttgagtcacgacagtcctttgtgtttattgtaaccaaagactcggaaaccaagttattgctatcagaggaagaaatagaaaaaggcgtagagatagaagagaagatagtggataatcttcagtctcgacacacagcttttataggtgacagaaactgaagtaaaaagcccttataggatcaaaaattgttcagggctcttagagatggtgaaaactacaaaaaaaaccatggctttcatatggacagataaaatgaaagaaagggaaaaggcagtggtgtgtaggcaaatatggtttggcatttgtcttttaatgacacctgatatgatgtcattttgattttgaaattgaacactagaactgttaatcacctttaaaaagaagagcttattgggaattatatattccttaaaatatacatgggggcctgaatgtcagccatctttatactatagaaaaaggattatggatgcatgaatggtcatgctttggagatcaaatattggttgaatgcctatgtatgtcaggccctgtgctgagccatgaggattaaaaagatgaataaacatatcttgtttaggaaatggatgtataaaaaaatcaagtgcaataaagtgtgtgtccaaaagctgacacaatggaaaggatgttttgttttgtttgaaatttatcaaatatagtagtaggaaagaaggatacctccctgaagatagattgtagaatggtgagcttttcactgcatttactttttgcttcttattgtagattcacctcatgtttgggtaatagtttacatttcaagtattttaggactgcttttcagtttaacttaatatgtccttccacctgggaccaggcaggggccacttggtgatctctgtcctgagggatgcattacagtgtggtagagtatgggctagaa

SEQ ID NO: 6286 - DNA, 1174 bp, Homo sapiens
gcaacattaatataatcttttaatcatttctaattgttttttttttttgttggtttatgttgttcccggaaaaagacgagagtgtttcgtgtctaaaaaactcctagaatgacacgtggtttatcatggtttatttaaactgcctgtagattaataataataattctctggcagaccacatgatacaattacgttcttgttactttagctcattagctcacttgtttttattacccttaattccaaaattaagggattctttttcatttcgctttttacatgatatcgagaggtacgtgattgttgttccctccaaaattagcattcaaccagtggtgcttttggttttttcccgtttactatttgctggatggcaagagatctgttaatgtctcccaatacacaagtaatgtaaactagggcatgtactacactaaatgaagatcaccatgaattctacatgatcatctttatttttttctttacagtttagtcatccaacaagaagaaatatgaaattccagcaataagaaatgaacaaaagattggagctgaagacctaaagtgcttgctttttgcccgttgaccagataaatagaactatctgcattatctatgcagcatggggtttttattatttttacctaaagacgtctctttttggtaataacaaacgtgttttttaaaaaagcctggtttttctcaatacgcctttaaaggtttttaaattgtttcatatctggtcaagttgagatttttaagaacttcatttttaatttgtaataaaagtttacaacttgattttttcaaaaaagtcaacaaactgcaagcacctgttaataaaggtcttaaataattgtctttgtgtaaatttgtctagttttgctttagtttgtaagtatttagctatttataggacccttagcttgacccagtctacaaatagatgatgctcactggtaattccctcaggtaaaatgtctcaaaatctctaatcctttaagtggcatgcctgtgggcccatactaaaaattagaaaatacatactctgataacctggccatttttcattgaaggatttagctcatttgtaagaaagacttgagtgtagattttgggtgggtccctttggctgtgaggcattgtttaaaagggcattgctctagcctagacc

SEQ ID NO: 6287 - DNA, 2108 bp, Homo sapiens
acaggggactctaaggcgagggtggagagtggaaaggtggagtttgtacggcatcagtataggttcttaaaggtttccctcccacacaaagccaccctcctgctgctggttgagagcacctggaggtgaaggctcaggggaaagggaggcagggaagggccatgatgagatgtctctgcctttcccagcgccatcctttacctaaatggggacttcgatggcggaaacttttatttcactgaactggatgccaagaccgtgacggtgagtgctcccttgtccttgtccctgggagataaaaagtctgttttctacagctgatgttcccaaagtgcagtggacaaaaataaccaactgggcttcccagtgggcggtacccttcccccatccagaggggctttgagacgtgtccatcactcctctaaccagtcaccctttctctttagttctggtcttagggaagccatactgaagagctgccctcggtcgtgagccctaatgagcccatgtctcttctgagagtggattacagtctttgtcctgtgcaacccccctccctttctgtcccccttaggcagaggtgcagcctcagtgtggaagagccgtgggattctcttcaggcactgaaaacccacatggagtgaaggctgtcaccagggggcagcgctgtgccatcgccctgtggttcaccctggaccctcgacacagcgagcgggtgagagcagctcgagcgggtgagagcagctggtgctgtggtgacccgttcccagagcgcccttggtttgcctttctcttccccaaatcccattgccagtggctgagacacgaaaggagcacttgggacaccagctccaacgccctgtcattatggtcacattgccttgtcctccctgggcctgctgtgaacgggatccaggtggggaaagaggtcaagacagggagcgatgctgagttcttggttccctccttgggccccacttcagctgtccttttccagagagtaggacctgctgggaaggagatgagcctggggccattaaggaaccttccttgtcccctgggaagtagcagctgagagatagcgagtgtctggagcggaggcctctctgaatgggcaggggtttgtccttgcaggacagggtgcaggcagatgacctggtgaagatgctcttcagcccagaagagatggacctctcccaggagcagcccctggatgcccagcagggtccccccgaacctgcacaagagtctctctcaggcagtgaatcgaagcccaaggatgagctatgacagcgtccaggtcagacggatgggtgactagacccatggagaggaactcttctgcactctgagctggccagcccctcggggctgcagagcagtgagcctacatctgccactcagccgaggggaccctgctcacagccttctacatggtgctactgctcttggagtggacatgaccagacaccgcaccccctggatctggctgagggctcaggacacaggcccagccacccccaggggcctccacaggccgctgcatgacagcgatacagtacttaagtgtctgtgtagacaaccaaagaataaatgattcatggttttttttacttggtttgttcagacaatggaaatttgcccattctgtcccagaggtctcacttgataaaaattgctctaggcaggacccagtggcaggtgtgggacgagaagtcctggcttggcacctggctcaaccacttgctgtgcagccacaggccagacacttaaccttcagcacctcggggttgtcatctgtataatggggatcatagtcctccctctgctcaccttctggggcagctgtatggcccagatgcaatatcggatgtgacaacacttttgtaaacggtaaagctctgggtgaatggttgggattattgttaatcctcttctggcagggagcggcggtcagcagtgctctggcacgtcacccctatgtcagccacatgcttcctgctctgccgtctggcctcagtgtcctgtatctcggcctccctgtgcaggaagacacactctaggaaacactggaaatggagattcagctcctctggctacatccctgg

SEQ ID NO: 6288 - DNA, 1148 bp, Homo sapiens
ccggctgacgcgccgggattcgctgagggccggtggggggatccgggctgactgaaaggaaaagaggcggtgcaagcctcgtgggcatgcgccgcccggcttggaaggtggggcttcgcccgggggcgggccttcgccgggggtaggactccggccttggtggcgggtggctggcggttccgttaggtctgagggagcgatggcggtacgcgcgttgaagctgctgaccacactgctggctgtcgtggccgctgcctcccaagccgaggtcgagtccgaggcaggatggggcatggtgacgcctgatctgctcttcgccgaggggaccgcagcctacgcgcgcggggactggcccggggtggtcctgagcatggaacgggcgctgcgctcccgggcagccctccgcgcccttcgcctgcgctgccgcacccagtgtgccgccgacttcccgtgggagctggaccccgactggtcccccagcccggcccaggcctcgggcgccgccgccctgcgcgacctgagcttcttcgggggccttctgcgtcgcgctgcctgcctgcgccgctgcctcgggccgccggccgcccactcgctcagcgaagagatggagctggagttccgcaagcggagcccctacaactacctgcaggtcgcctacttcaaggtgcagacctgcctggaaccaggcggccggggtccttctggggagaggagtgttgcaggggacctgaggagcttgggggatcggggaagtgtccgcagggaggggaaagtggcctcctggctggggagctctcctcggagccggggagagctgctccctggcaggagaccttcctcgcccagttcgcatgggcagatgctaaccccaaaggtccagcctggggttagggcacaggccaagcaaaactcatggccattttgttccctgggaaatctcctggaaggaattaaagcggcagtttgggtctcccattctgatgtcattgtaagtgtccgagtgagaagctagtagcggtctacaatatctcccttccggttggttttccagtggtgcttttcctgctgtttgattcagcagctctctttcaggatgtgaggttgccacgtcgccagcaggggctgcctggccctttctgtgtgtgtgt

SEQ ID NO: 6289 - DNA, 1106 bp, Homo sapiens
gtacttcccccccccccccccccacattttggtgtctgtcaaacttggacacttctaaaagtcaatggcatgtcacagtttaagtggcattttttctttcttagagctacataaaagaatcataacaagctgggcgcagtggctcacgcctgtaatcccagcactttgggcggctgaggcgggcggatcacgaggtcaggagattgagaccattctggctaacatagtgaaatcctgtctctactaaaaatacaaaaaattagccgggcgtggtggcgggcgcctgtaatcccagctactcgggaggctgaggcaggagaatgtcgtgaacctgggaggcgaagcttgcagtgagccgagattgcaccactgcactccaacttgggcaacagagcaagactccatctcaaaaaaaaaaaaaaaagaatcataacatagcatcttacatttgatgaagcatggcacattgaaagtacaatcgattgccatcttgttaataaaatgtcagagggattagaggaaagactcttagatgatgcttgaatttctggcttgagtgtctgcattgaatagtggggatcccctcaacaaaattttcaggaggaggaggatatccctgttattttccagaataatcagtgatactctgtgatattgataatctaccttgttggcccttaccaaattactgggtgtgagtaacagctgactgtagctccctttctctaccctagtgctctggaaggaggaaaggagagctggcttgtatcttactttctcaagttatcagtccacaaacatgaagagtattagtgttacagatacaaagatgataactactgtcttatgagcctttattctgctaagtgtatccattatctcttttaatcttcacacaacccaccatcaatgaggtatatagtattcttatgttacacagcaggaacatctcagagattctgaaactggcccgtggttatacagatgggaagtggtagaggtcagattcagacacagtcctgtttgagtctgaccataaccttaatcctgtttgggccaattaagacagtcgtaaaagatctcagtatagagctataaagaagtta

SEQ ID NO: 6290 - DNA, 1652 bp, Homo sapiens
cttatccaaagtcctacagccaggatgtagggtcatgactccaaccaagtgtgtctgtgtgtctttcagcaactgtgtggtccctacgtcttcatcatcttcactgtgctcctggttctgttcttcatcttcacctacttcaaagttcctgagactaaaggccggaccttcgatgagatcgcttccggcttccggcaggggggagccagccaaagtgacaagacacccgaggagctgttccatcccctgggggctgattcccaagtgtgagtcgccccagatcaccagcccggcctgctcccagcagccctaaggatctctcaggagcacaggcagctggatgagacttccaaacctgacagatgtcagccgagccgggcctggggctcctttctccagccagcaatgatgtccagaagaatattcaggacttaacggctccaggattttaacaaaagcaagactgttgctcaaatctattcagacaagcaacaggttttataatttttttattactgattttgttatttttatatcagcctgagtctcctgtgcccacatcccaggcttcaccctgaatggttccatgcctgagggtggagactaagccctgtcgagacacttgccttcttcacccagctaatctgtagggctggacctatgtcctaaggacacactaatcgaactatgaactacaaagcttctatcccaggaggtggctatggccacccgttctgctggcctggatctccccactctaggggtcaggctccattaggatttgccccttcccatctcttcctacccaaccactcaaattaatctttctttacctgagaccagttgggagcactggagtgcagggaggagaggggaagggccagtctgggctgccgggttctagtctcctttgcactgagggccacactattaccatgagaagagggcctgtgggagcctgcaaactcactgctcaagaagacatggagactcctgccctgttgtgtatagatgcaagatatttatatatatttttggttgtcaatattaaatacagacactaagttatagtatatctggacaagccaacttgtaaatacaccacctcactcctgttacttacctaaacagatataaatggctggtttttagaaacatggttttgaaatgcttgtggattgagggtaggaggtttggatgggagtgagacagaagtaagtggggttgcaaccactgcaacggcttagacttcgactcaggatccagtcccttacacgtacctctcatcagtgtcctcttgctcaaaaatctgtttgatccctgttacccagagaatatatacattctttatcttgacattcaaggcatttctatcacatatttgatagttggtgttcaaaaaaacactagttttgtgccagccgtgatgctcaggcttgaaatgcattattttgaatgtgaagtaaatactgtacctttattggacaggctcaaagaggttatgtgcctgaagtcgcacagtgaataagctaaaacacctgcttttaacaatggtaccatacaaccactactccattaactccacccacctcctgcacccctccccacacacacaaaatgaaccacgttctttgtatgggcccaatgagctg

SEQ ID NO: 6291 - DNA, 1178 bp, Homo sapiens
cgcctcccaacccaagccctgtgtcccgtcaggctgaactgggcttcgtgctctaggcagcctctccttctctctcctatatccaaagagttctagtcctctctccccttcacccgtcaccactaccataaacccttactgcttacttatagcttgcccaggcattgttatacatactctagaaatagtaattcagttgttcttcaaaataaccccattaggcagacaccataattttccctgctctataagaaactggggcacaggaatgttaagcaattaaagcaaggacacacagctagtaagtggcaaggctgcaatgtaactccggggagtctggccctagtctgtgcccttgaccattgtggaagatggacacagtcccagatgggcacctaaacaccctttcactcacctacaactgccacctagctggcagtgtgtggtctcactttggagctgagtcaagctcagtcatgtaccaacatctcaggtttcccacacacagttgcacaatctcttacaccatcacaccctgtcatatcacatcacccctcaagcccttcagttagattcatggcttgttggtcatttagtgtcaactctgcacctccaccaccgtgctgggcaccagcaacatggatgcatcagacagaccatctccgtgctgaggtttactgtacagggagcacacggtaccttacagttagtcttctaaaggcgatgatggaaatgcgagcaagcacagtgggagcagggaaggaagagggagagggtgcttcgcccttagagcagggtttctcagcttggcactgtgatgtttctgctggtgttgtagaggcctgtcccatgcattggaggatgtttatcagcatccttggcttctgccctctagataccagtagccagtgtggcaaccaaaaatgtctctgggcattggcagatgtcctatggggtaccaaagccgtctctgtttgagaaccagttgcagtggagtgggaggggtggttctcgggaggaaggctttccagaggagtatctgtgcatgttctgaaaggtgattaggcccaagcaaaggtgtgaggtgtctaggtcgtatgagggagtcactgcgtgtgccttgtgagtcatagttggggtagaggagacactttattgcaagagctgagaagggcttc

SEQ ID NO: 6292 - DNA, 1232 bp, Homo sapiens
ccattttgctgacaagcaaatggaggataggggagaggtggtacatgggggacttagcctgctggaattcacagagcaaacaggcagatgggctggaatcagaagccagcggcttcagctccaaatccagggtgcttctcctatctatatctgtgctattcctaccaagtaatttgggccccctcgcataggagggctggttcctgggcctcccagtcagagagtctagaaccaccagaccctaggcatggctccaccagggaaatgagacccccaagaatccaaagcctctccctctctgagacctggctacagagagagaagatcatacttcccctctctccccaggaaatggcccggccagcccagtatcttgaagtcagctaggctggtttgggcacctaaggtcaggaattggccaagtttcctgggagaaagactggtgtggtgccaagagtcaggcaagatatctgaacacagaaacttgccagtccaggccctgccctgtagtaacctgctcccagacacgcctataacagtgtggtttgtttctccgcagaagctgacgggtcgcctcatgctggccgtgggaggagcagtgcttggctccctgcagtttggctacaacactggagtcatcaatgccccccagaaggtgagtactgtgccatcgttggcttatggacaccagcctgctctgttgcacatcacacatgcccacagtctcacgccaccacctgaattagagtcatttatatgaacgcactgtactgtctgcctctccagccagttttctggccctgatcatgtcagagactcttctcttgctttggaatcagggtggcagaattctagaatctcaggtcccacagaatcctggggtcttgtataggccctcttgaccaaccccccacccaactcagtcatttaataatatgtttgatgatataataaactcaaagcaaagctcaatacaataatgctgcatttccgtggcattctggggctgcagagggttttcatgggcttgtctcacttgatgctcactgcagcactgtcaggaggcagcaggcaccactcccagcctgcaggtgtgggaaacggccagagagaggaaacccgcccaatatcacccagctaagtcagagacagagctggtatccaacacctgcctgccaggtggtccttgagcctgcactcatacccatccacaggcagcacacttcctttat

SEQ ID NO: 6293 - DNA, 1276 bp, Homo sapiens
cctgggcaagacctcctggagtctctctaacaaataaatactactttccatgcagtagacgctgttctaaacactttacaaatattaactcacttggtctttctacaaccctacgaggtggtactgttactatccctagtgcaccgaagtcacccagcggccgagtgagaactccagtccagctttccacccgctactccgcgcatcccagcttgccttacagccgggtaccggctccaccattttgctagagaaggccgcggaggctcagagaggtgcgcacacttgccctgagtcacacagcgaatgccctccgcggtcccaacgcagagagaacgagccgatcggcagcctgagcgaggcagtggttagggggggccccggccccggccactcccctcaccccctccccgcagagcgccgcccaggacaggctgggccccaggccccgccccgaggtcctgcccacacacccctgacacaccggcgtcgccagccaatggccggggtcctataaacgctacggtccgcgcgctctctggcaagaggcaagaggtagcaacagcgagcgtgccggtcgctagtcgcgggtccccgagtgagcacgccagggagcaggagaccaaacgacgggggtcggagtcagagtcgcagtgggagtccccggaccggagcacgagcctgagcgggagagcgccgctcgcacgcccgtcgccacccgcgtacccggcgcagccagagccaccagcgcagcgctgccatggagcccagcagcaaggtgagtcgcgcgcccgcgggccctcccgccaggaacaaaggcgcagactcctgcccgccttacgccggccagggcctcccccgccgccccgctgcgctgtgcgcccggggcgggccgcgcgcctctccgagcctggctcggtgcgggtcccgagcgcagcgccccgccgggccgctggccgcagtggggatgggcttcggatctagcgggccggagggcgccgcgtgcgtagttggcgccggcactgagcacatggcctccttccgggggcgccgcgccgtccacgcggccctgctggggctggggacacagggcccgggagcggcacgtcgcacacgacctcggcagcagcagcccagcctcggcccctcccggtgcgggggagggggcccgagcgcggcgcccattggctgagcgggccgagcccccggcccggccccggccccggcgcgcggaggagtcaggagccgcccccgctctccgtctgctcccctagcc

SEQ ID NO: 6294 - DNA, 1227 bp, Homo sapiens
actttttgcgttcacaaatgctaccccaaagatgcaccgtggtgttcagaggaggctaaccaaggaccggaggagaggcgaggtggtgtggctgttcaggatcagagcactggaacccagcaggaccgtgtgcctatctcagttccaccatgccagagccgtgtgacctggggcaggtagcaacgtctctgagcctcagtctcctcaccccctcatccctccacctcacaggtgaagagtaaccctgagacactgcccttagcaatgtgcctcccacgaaacaccctggagcattgatggtgatgatgaaggggtggagggaggtggtgggtcctacagtagaagggtgaaggcatctcagccagaaggagctgggttcaagtgctagctcaccccctgtctggctgggtccccttagacgagtaactttacttctccaagcctctcgctcctcatccgggaaaatagagacgatgataccttcctcacaaagtggttgggaggattcactgaatgggtggcatgaaagtccccagcacggtgacatctccctcagcagatgtttctgctctgtcccttcacatgtggcatgagctcctgtgtctccctgtcaacgagtcattcggaaggaaaggctggttactttgaatagacgcatagctcactactgaggagaagtcctcaccaaggactgttggaaagaagacctgtgtgtattcatgctcgagtccagaccccaatctgaacccatttgaagtgcctccctccctcctgcccctcctccctgtcctcctcctcctttttcttcttcacagtgatgttgttctggacccactgaacttgctgctggacagcacttagaatggtgccctaatgcctggcacatagtagatacttgaatatttattaagtgaataaataaatgctatagaataaaactcagtcctttttttaactggtggagctaagtcattatttcctgcatttgtgaatattttaaaattacaaaataaatttatattgattctagaaaaataattagaaaatacagttgattaaaaagaaaaaataacagttccatgcaatcccattgtccagccttaaccactggtgttaatttgctctacaggtccttccaggcattcttctatgcaaatacatttaaatattaatcaagcatgttgtttggtaactggctttatttttcttttcacttagtcatattct

SEQ ID NO: 6295 - DNA, 1178 bp, Homo sapiens
gctcccaagcttcccaattccgtcccctgccccgctgccgcccgcggctctccttccccttctaggaacggctcaagcgccttgggcactccatcgggttctgcaccgagttctgcatcataaatacgactctcgtgtaggatttaagtgtgaacttctgcaggttctcggaccctgaagcacccggggccagacattccgagctcgcggcggtggaaggcacgcaaaagggcgaaccgagacgactccaggacgctgaggcagcgcaggccccacccggccccgccctgccccgccctgtcccggccggctttccagtactagtcctctggcgccggctcccagcccctctcgtacccttcaaatcgcgctccgccgctagactctcgtgatagctgagactttccccggaaggcccgcccccttcgccggagaggccaatgggctagggcaacggttgcgacggttggattttgaaggagccaataggcgctcggagcggagagtttaagaggcgtaagccaggcgtgttaaagccggtcggaactgctccggagggcacggtgagaggtggtggggctgagccgaggtggggccgtggccagggggagggggtgctaggccggaaggggctgcagccgagggtggccctgattttgtggccggccaggagcgaaggggtccctttctgtcccctgagcaccgtcgcctcctttcctccagggctccgtaggcaccaactgcaaggacccctccccctgcgggcgctcccatggcacagttcgcgttcgagagtgacctgcactcgctgcttcagctggatgcacccatccccaatgcaccccctgcgcgctggcagcgcaaagccaaggaagccgcaggcccggccccctcacccatgcgggccgccaaccgatcccacagcgccggcaggactccgggccgaactcctggtcagtgaggtgccaaaggaactgagtgagagcagccttcatactttctccctggggagcctggtcagactgtcttctctttctccgccccaggcaaatccagttccaaggttcagaccactcctagcaaacctggcggtgaccgctatatcccccatcgcagtgctgcccagatggaggtggccagcttcctcctgagcaaggagaaccagcctgaaaacagcc

SEQ ID NO: 6296 - DNA, 1118 bp, Homo sapiens
ctgtttcatagaaatccccatccatcaagaaatatgaaagttaaggctgtaatatgaaatattacagtcactcactcctgtaatcccaacactttgggaggctgaggcgggaggatcacttgagcccaggagttcaagaccagcctgagcaaccaggggagaccttgtttctacaaaagaatttaaaaattagctgggcgtggtggcatatgcctgtggtcccagctactcagaaggcaagtggtgatggcgccactgcactcctacctcagcaacagagtaagactctgtcccaaaaaaaaggaaagaaaaaagaaaaagaaatatggaggttaaagccaaaatgtgtaggttggttctctttgcctcttttaccacccatgccattacgctaagtactcttcctgtggacaaaaaggcttcctgtgctgctccccagttgagaggcaggctacttcagagcttgatggttcttaacacttcaacatccttaccccaaccattcagcatagagaccgaggacctaagcgagcctgagtttcagagcacccgtgtccctggcattccagaccctgggccagagatctctctgacagatgtctgccagctcagaggagaggcccatggtgcccttcatagcgtcatccaggtgggaagcttgggtgagggtagaagaggtgttagagtcctgcctgtgcagagggacaggattctctcctgggcggggggtatgcatgtgtcctgctctagggtagggagtagtatcctgttgaggggtgactgacattctaacctccttctaaaccccacaacaggagaagttcctagagatcagtcgtctccacttccgcacagtgccttccaatccccactacttcttctattgccctccatccagcaggcgagaagtgagtggctctcttccttacctctctcgtgccctcaacccagaggcccacccagaccctcttgagtcttggttccctgaggcctggatgtggctcttgtcttgccttagatcaagctgtctaaggcaagacaagtgtaatcccacttgcctaggatgaggcaagtgggattcttgcctcatcatcttgcttcattcttttgcctaggat

SEQ ID NO: 6297 - DNA, 1202 bp, Homo sapiens
ctttcctcaagcaggagctgcatgggaagggactggcttctgccatgttcagggttaggactgcagttgactgaggcacagcttggggaaggggagctggggtggctggagaactggtggtgccaccgacctgataccagactgggttcggggtgaagaggatggttatttgggatatattttgccccaggtgtccagtaggcaactggattttccagctaatatttatagctcaattaacatgtgctggtcttgggctgagactgttaaataacttctagtgtaattcttgcaacaaacctatgagggcgatgctattataattctcattttatggatgaaggcacagaggttttgagagtaaaactcaagtgtccatagtgacataacgagtagtttggcagaattggaacctagtgctggctacctccagagccagcactcctaacactgcctctagtatacaggggattctttgagtttggcatgatagggctgctatggaggtagctggatcctctaccagtgtccccaccttcccaccatggctgtgtcaaggtcctgagatcacggatgagctcgtgcgagttctatgtcggcgcctggatgaggccacgctggacgtcatcacagttatgcttgttcggaactgcaagctgacaccagctgatgtggaggtcagctcccctctaggcaccagcatccttcccagactcagccacaggttccaggacagtctaggctggaacttctgcattcagctctgccctcttcttcccactctgcagttcatccagccccctggaagtctcccctcagaggtgctgcatctggccctacccacctcctgcaggccctggcttccagccctggcatggtacctacggcagaacttgctcatcttcctgcactctcccaagtacacagatagcaacagccggaaccacttccaagtgagatggcactcatctctctccacactcatgtgcacccctgccccctgccccacgcacttactctttcctaccgatacccctatatgtacctttgcccatggacctgggtacacccatgcccccccggggaccattattacccgcctgtgtcttctcatgctcccatatctacctgcaccacattccccactgtgggcacccatccccgagggttttgtccatttgcttgctcttagtgctctgtgg

SEQ ID NO: 6298 - DNA, 1122 bp, Homo sapiens
aactggtctccacctaccaccacctggagtctgtcatcaacacagcctgtttcaccctctggacccgcctcctctgagggagtggactggaccactgaatgtcactgttccttgaatcatgggcctaccagattgcctgccagaggcaggactgaccagcccttctgggccccagggcaagccagacactgagtgacaccaaaggctttgtaactatgtcttgagggtctgctgccccagcctggcagcaggaaccgccctccccaaacacccacagccactgacccatccaggactccagagagtcaggtcaaccccgaggaccccttgggcccttctggggtactcctttcggcccccctggtagagtctcgggagttcacacagggtggcaaacaccccctagagctcctctgcctgaatcctgccccctagcctttgaccactgtcagccacctgtgtcccttgagccttcgggtcttcacttcccacttggacatcactgctggacattcccatcgagatgacacctgggttccaatcccagctctgcctttgaagcacttgtggccaccgtcaagtccctttgctctcggaccctgggtttctcatcctttaatgaggtgggttcagaagctctcccatcttcacagcaaccctggcactggcttctcaatgggagggaagcagcagagaaactgaagtgttagacactatgtgtcccaccaccccattacagagacatatgacaatgttcagcaggtcatctttaatgcagaggaggagatgggatgtcactcgctgtctggaggcacgtgggtggtgtgcgggccctcactggccagcctctgggtggccccgcctatcccagtatgaacgtagccaactcaagccctctactgtgtctcctgcagggagagggaggcctcggcacctcagcccacaaggagaaaacagcccctgtccgggtccctccagagctcccttccccagggccacgcctcacctcgaggctgatactcacagcccacgaagcctttgtagccttcatcttccagcagttgaaacagataggggaaattcagctctccggggctgctgggctcccctcggcctgggacc

SEQ ID NO: 6299 - DNA, 1116 bp, Homo sapiens
gcaggactggcagcctcatcctgtgggcaggctatgagttagatggaccttgtcaagtccttccacttcactcacaagctggtgtgaccttgggctttgagtaattccctgaatgtctcttggcctctgttttctcatttgaacttagagatgaagaattcctctaggtgctgttgtcaagttccatgaaacggattggtgttgatttttctgcacacttcccaatccccagacgtgggcaggaagcaggcagcagggcagggtagacgtgggctggacctgggcccatctgtgggctcctcactcctctggggaaggcagtggttgcacagggggcttgagcctcagagaaggtacctgttggggatgaaacccgctcaaatctcctaataggcctggatatggagggtgaacgcctggccctctgggttaccaaccctcagggttatgaggtgctagacaggaaaagggtgggccctgatctctgcctctcgccagccaggccaaattggggaagttcagtagtcccccagtttttagcagggttgagtgggctttctagggactctgtctctgggctgtgagtttgctgagtcctgctgcccgttcctctcggctgggctgcgtgttgtgggaggcccagtgtgctagtagcccatggcaagccctccctttagcctgtgtcctgtctgccttaacaccaggctttgttttggtaagtgctttgttttggaatcttacccaccggtgggatttgggtggccctgtggggtggggttactacctcttttcttcaccttccccctccattggccccagccagtggggtctgcaggagtcctgactcacctccctgattctcgtcacccccagccccactgagccccctcctcctccccagagcagagccagtgacctgggacacagcttcactgacactcagtctggctctgcctgcttgctcacacactgtccgtgtcggcctaactcaggcctcaatttctccatgtatttaaggccctttcttgtgttttattttacctgatttggctttgtgtggctttccttccttttatactaatgcttctctctgatcttatttgcattcaaattacc

SEQ ID NO: 6300 - DNA, 1217 bp, Homo sapiens
tctcttctggctggcagcccgcccctctctggagagagggactctgaggaaaccatctgggagtattcacagaactcccggagggcttacgaagaatccctggggtgggatgtcgtggagatgcctctgcaggtctagagaatgccaagccctgtagacactgcagagcctcgcagatctagaagctatggagggcttagtgagccttatagccaggagtccctgaatgtttgaaatccttcagtcctttctcatagccagtgtggcaacagcctggttagggtggggcagcttacacacagggctgcttctcatgggctggtggggaggagtggcttcacggtgtctgttactctgtaggggcagtgggttgggcaggtgtgggctctgacacggaaggtgagccttgatctcggcccagggagctgacatcccaggccacagcctcagggctggccggcatgctccaaggcccctcatgacccccatgctctgctctgccagcttctagaagccatcgagcaaggcggagaggagcagcggcggcggcggcggcaggcagaacgtctgaagccatatgtggctgctcaactggatgtgctcccggagacctttaccttgggggacaagaagaactaccggggcttctacaaccggcccctgtctccggacttgagctaccagtgctttgtgcttgcctccttgaaggaacccatggaccaggtctgcctgagccggcttggctgtcagcaccctgattccctgggcctggcctgagacgatgccagtctcaaacaccacaagaccccaggtctttatcagtttgggggcttcgagatcctggggcagcactaaagacccaagatctgtcccggggatcctaagacgcggccctgggacccagaggccagacctaatgtggctccagggacccagtcctgccaggtccaccttgtagggtctgggagaccaggcccagggtaacccagacccagagccctttctccaggattaataggcagagggtggggggttctcacgctgagctcacagcctgctgttctccaccgggccacagaagcgctatgcctccagcccctactcggatgagatcgtggtccaggtgacaccagcccagcagcaggaggagccggagatgctgtgggtgacgggtcccgtgctggcagtcatcctcatcatcctcattgtcatcgcca

SEQ ID NO: 6301 - DNA, 2608 bp, Homo sapiens
aaacaaaacaaaaatgctgcaacattgcctgtgctgcctgggggctcaggggattgatgagtaagatgtgttctttcattcggcagctctctgctgagccccagtggtgtgcctggctctgggcaaggttgcacagagcaatccttatggggtgcccagtcaggagcagagaaacatgattgggatggcagatggaaggcaggtagatgtgggggcctgagagaatgacaggagagagatgagccttcagaggctctttcaggctcccccgcacactgcctgatgtagctgccagggtccagcacctgctcttggccagcagaggctaactccatggctgcagtgtgagtgtcagctgtgtagtgggggtgtccactggcgcgacccacactgaccagccccctatcctggcaggaccagtatcagctgtgctaccgtgcggccctggagtacctcggcagctttgaccactatgcaacgtaactaccgctcccctctcctccgccacccccgccgtggggctccggaggggacccagctcctctgagccataccgaccatcgtccagccctcctacgcagatgctgtcactggcagagcacagcccacggggatcacagcgtttcaggaacgttgccacaccaatcagagagcctagaacatccctgggcaagtggatggcccagcaggcaggcactgtggcccttctgtccaccagacccacctggagcccgcttcaagctctctgttgcgctcccgcatttctcatgcttcttctcatggggtggggttggggcaaagcctcctttttaatacattaagtggggtagactgagggattttagcctcttccctctgatttttcctttcgcgaatccgtatctgcagaatgggccactgtaggggttggggtttattttgttttgtttttttttttcttgagttcactttggatccttattttgtatgacttctgctgaaggacagaacattgccttcctcgtgcagagctggggctgccagcctgagcggaggctcggccgtgggccgggaggcagtgctgatccggctgctcctccagcccttcagacgagatcctgtttcagctaaatgcagggaaactcaatgtttttttaagttttgttttccctttaaagcctttttttaggccacattgacagtggtgggcggggagaagatagggaacactcatccctggtcgtctatcccagtgtgtgtttaacattcacagcccagaaccacagatgtgtctgggagagcctggcaaggcattcctcatcaccatcgtgtttgcaaaggttaaaacaaaaacaaaaaaccacaaaaataaaaaacaaaaaaaacaaaaaacccaagaaaaaaaaaaagagtcagcccttggcttctgcttcaaaccctcaagaggggaagcaactccgtgtgcctggggttcccgagggagctgctggctgacctgggcccacagagcctggctttggtccccagcattgcagtatggtgtggtgtttgtaggctgtggggtctggctgtgtggccaaggtgaatagcacaggttagggtgtgtgccacaccccatgcacctcagggccaagcgggggcgtggctggcctttcaggtccaggccagtgggcctggtagcacatgtctgtcctcagagcaggggccagatgattttcctccctggtttgcagctgttttcaaagcccccgataatcgctcttttccactccaagatgccctcataaaccaatgtggcaagactactggacttctatcaatggtactctaatcagtccttattatcccagcttgctgaggggcagggagagcgcctcttcctctgggcagcgctatctagataggtaagtgggggcggggaagggtgcatagctgttttagctgagggacgtggtgccgacgtccccaaacctagctaggctaagtcaagatcaacattccagggttggtaatgttggatgatgaaacattcatttttaccttgtggatgctagtgctgtagagttcactgttgtacacagtctgttttctatttgttaagaaaaactacagcatcattgcataattcttgatggtaataaatttgaataatcagatttcttacaaaccaggactctgtctcagctgtttctggaaccaaagagtctgggccaaatcagtagctaggatgggttctggagattccctgctcctgaggagacggggagggtaccctaagtatttgtgccagtgtaggctcctggcatggctacccactttcagaaaggagtggttataaaccctgaaaaccaggccaccaagagccagccaggccagagccaccagtgcatgtgaagagcaccctaggccggggagcataccctttgcctctctttccctttaagattctgtgggttgcactatcggggcattgggactgcccctctcccactaccttggaggagagggatggccctgtggcagtagagactgaatgtatggaaattggttagtgagatctcctgtaattattgcaatgtggataatggacacaaaaaacagtgtgtccatctggcccctggacacacag

SEQ ID NO: 6302 - DNA, 1252 bp, Homo sapiens
ttcacatagtggtcatttttgcagtgagaacatttaacatccaccctcttaatatttttcaagatctttagattttctagcatgggctaggtagccaggtctctgctgagctcagacttgcattacctgcaggagactttggaggaaatggcagctgccccttactgagtgtctgctgagtgccaggcggtgctcaggagtcttatttatgagccctgtagatctgtagtagcatcttctcattacagaggaagaagctggaggccaggaggctgagcaaatagccctggctcacagtgcccctcagtgacagagccaggattggaagccaggtcccattccccgcccatgttccttgtgctttgccctctgcctttcatcaggttcacatgtgcaggaggaacttggctctgtctaatgtgtatgtgtgtttcagattattctgactccactgaagtcaaatttgaagagcttaaaaatgtcaaactagaagaggaggatgaggaggaagaacaagcagcagctgccttggatctttctgtgaatcctgcgtctgtagggggacgccttgtcttctcaggctccaaaaagaaatcatcttctagcctgggctctggctcttcacgggattctatctcttctgattcagaaactagtgagcctctctcctgccgagcccaagggcaaacgggagttctcactgtgcacagttatgccaaaggggatggcagggtcactgtgggagagccatgcacgaggaagaaaggaagcgccgctagaagtttcagtgagcgggagctggcagaggtatgggctccaggcagtggtgtggggtggggagctgccctggaggacaccctgtcgggaggggatctgtgtgggggagggaggtggatctgtgtgatggaggtgctgcaggagggcaggagagaccctcagtcagtgcctctagccagcagtggttgtgtcaaacaaaagcctggggtggcattcactctcccagcttgttctttgctgggagttgcttttctgttatccctgtggctactgattccaagaattgcatcaatgcagcctgagtcacagcagcagatcctcctcagcccacttggatcacaatgccttttttttttttcttgagatagagtctctgctctgttgcctagctagagtgcagtggcatgatcttggctcactgcaacctctgccttccaggttcaagcagttctcctgcctcagcctctcgagtagc

SEQ ID NO: 6303 - DNA, 1172 bp, Homo sapiens
ggctctcaagatatcagcaggaccccaggcccaggaaacactgcagagcgctgagctctccctgctcagccccccagtcagggagagggagcagccttgcaggaccaagtcacgcctctgttctgggctctggcaggatccagagtggccagcacctgctcagtcctgtgctgtcctgcaggcgctgcaccagctctactatgatcccaacattgagaataagaacctggctcagaagtggctgatgcaggcccaggtctccccacaggcctggcacttcagctggcagctactgcagcccgacaaggtaccagagatccagtactttggggccagtgctcttcacatcaagatctctcgctactggagtgacatccccactgaccagtatgaaagcctaaaggcacagctcttcacccagatcacccgctttgccagtggctccaagattgtactgactcggctgtgcgtggcactggcctcactggctctcagcatgatgcctgacgcttggccatgtgctgtggcagatatggtacgactcttccaggctgaggactcaccagtggatgggcagggccgctgcctagccctgttagagctgctgacagtgctgcctgaggagttccagaccagtcgcctaccccagtaccgcaaaggcctggtgcggaccagcctggcggtggaatgtggggctgtcttcccgctgctggagcagctgctacagcagcccagctcacccagctgtgtgcgtcagaaggtgctcaagtgtttctccagctgggtgcagctggaggtgccgctgcaggactgtgaggcgctcattcaggctgcctttgctgctctgcaggactcggagctcttcgacagcagtgtggaggccattgtgaatgccatctcacagcctgatgcccagaggtgagctagtacccactcacccagaagacaacctctttggccagccacacatccatccatccatctgttcaataaacattaattgaatgtgtactgatacctggtcctatgctggagatacagcaaggaaccaaagaagacatggtccctgtcctcatggttcagacagggaggcagacattaaacaactaattatcagttattcaattaaaatatttgactctcttttccttctctcaactagtcaccaagtc

SEQ ID NO: 6304 - DNA, 1201 bp, Homo sapiens
tgagggagctcctgctttgccaggctccaacctcaacactacctccttctcttccagaggctttggctactctcctgcgcccacggtacctggacctgctagtctccagcccagcttttccccaaccagtgggttccctgagtccagagcctatgcccctagagcgttttgggcgccgcttcccccttgccccagggaggcgtctagaagagtatggtgccttctatgtagggggctctaaggccagccctgacccagaccttgacccagacctgagtcggctgctcttggggtgggcaccaggtcaacccttctcctcctgctgtccagatacagggaagactcaggatgagggtgcccgggctggacggctaagggcacgaagacgatatctggtagagagggccagagatgcccgcgtggtagggctgctggcaggcacactgggtgtagcccaacaccgtgaggcactggcccacttgcggaacctgactcaggctgctggcaagcgtagctatgtgttggccctggggcggcccacccctgccaagcttgccaacttccctgaggtggatgtctttgtgctattagcctgtcctctgggtgctctagccccccagctttctggtagcttcttccagcctatactggcaccatgtgagctggaagctgcctgcaaccctgcctggccacctccaggcctggctccccacctcacacattatgcggacttattgcctggtgagtagtgggggcattgcctaagctggaaacctggggcacggagtcagggggtgagtatggattttctttcctcctccctttcaggctctcccttccacgtggctctcccaccacctgagtcagagctgtgggaaaccccagacgtgtcactcattactggagatctccgacccccacctgcctggaagtcatcaaatgatcatggaagcttggctctgaccccacggccccagctggagctggctgagagcagtcctgcaggtaaatgtacaagtctccactcccagctgagctttttctccagatgcagcgcactcagactgagccccctccctctacagcctcattccttagttcccggagctggcaagggctggagccccgcctgggtcagacgccagtgacagaagctgtgagtggaagacgagggattgccatcgcctatgaggatgaggga

SEQ ID NO: 6305 - DNA, 3228 bp, Homo sapiens
cgggcttgcgggtggcgaccctgcctgcgcaggtgcttggtctgggaggtggttttagcgagggaatggcagaaaatggaggcctaagcagaggaatctgtctacacagctgtactgtcacctgggggcagcctgaggacgccccttcagggaggtggcccttcagctcggcagctactttaggttgaagaacttctctctaccgagcagcccgtaaccccctttttctccctcactgctgcaggagtctgctacaccatttttgatttgggcttccgctttgatgtggcatggtaagggagggcagggggaggattccccttgaagcttcttccctgcagcctctcttcttttctctggtctgagtccctcccccacaccactgcctgcctgggacatggacctttgggaaatacgcggtcagttgttgcctgtagaactggtggtggggttgaagggggtttgaggggttaagattttgtgctccgcttccctgctagagctgaactgctttcttctctgcttccacaacaggttcctgacggagacttcgcccttcatgtggtccaacctgggcattggcctagctatctccctgtctgtggttggggcagcctggtgagtattggggtggtgggactgggggcaggggctgagtcatggcaggtggtgtcactggggtcttaggcatgctgagggcagtgacagcttgggctctgctcatcagttttttatccttccaccaggggcatctatattaccggctcctccatcattggtggaggagtgaaggcccccaggatcaagaccaagaacctggtcaggtaagtgtcagggtccttggacttttgtcagaaccagctgtgttggcgctgcctgtgtgtttgatctgacatactgtttctgacaagccaccttgtgggatgggatgttataggggaaagattgctggggacttactgggcaggaaggacggtttctttctcatttctttctcctttccactccttacccctaatctctaccactaccagcatcatcttctgtgaggctgtggccatctacggcatcatcatggcaattgtcattagcaacatggctgaggtatggaaggccagggtggtggcgggaatccattccagtgtgttctacacattccttagagattggatggggtgcatcaggatggtttctgattacttttcttcttccctcagcctttcagtgccacagaccccaaggccatcggccatcggaactaccatgcaggtgggtggatgggcgtatgaatgcaaaatgctgggacttcatgcctgcttccactctcccccatcccagcttgggccatcattttgatattctctcacctactttttctgctttgcagagtggggatggtgattggccccattagcccatatctcccccattcctggcttagcctcactgcacccctctctatcctcccaggctactccatgtttggggctggcctcaccgtaggcctgtctaacctcttctgtggagtctgcgtgggcatcgtgggcagtggggctgccctggccgatgctcagaaccccagcctctttgtaaagattctcatcgtggagatctttggcagcgccattggcctctttggggtcatcgtcgcaattcttcaggtgatgaatccccttgggaagcctctgtgtccttgtccccaacctagccttaccctccttctggagaagctgaagtgctctccttctctacctataactatagattcccccaaacagcttccacctcctcatttccatcttctggttttctcctacaggggctctctatttttgtctctgatttggtgtcactgacaacagccctgttctttttcccccctttctaatgcgttgtatctgtatagcacttagtcctccctctttctgttctctcattttatctgccatgcttttcatgtctccagtctgtatttgtgatctagactagaatggaattttgtctgtctatatcagtctgtcatggtgtgtttgactgtctctcggagctatgtgtatctccctctcacatgcctgtcagtaggacaccattgtctaaattgtgtgtgtctagtctgtctgacagtgtgtgagtttgtgactaaggatcagcctgagggtctgagtgtgactgtgggtgcttgactgagttgattcttagtgactagctttatccatatgccacttctctccgtctgtcccacagcgtaactctgtggttgtctgtccctgtctgccttgtctgtcacagtgtgtccatcctggttagtcatatatctcttgtggtctgtccatccaaccatgtgctagatgtcatcttctatcatttgtcactgccttacctattcctctgtccctgcctgatttctcctgttctttttttgcagacctccagagtgaagatgggtgactagatgatatgtgtgggtggggccgtgcctcacttttatttattgctggttttcctgggacagctggagctgtgtcccttagcctttcagaggcttggtgttcagggccctccctgcactcccctcttgctgcgtgttgatttggaggcactgcagtccaggccgagtcctcagtgcggggagcaggctgctgctgctgactctgtgcagctgcgcacctgtgtcccccacctccaccctcaacccatcttcctagtgtttgtgaaataaacttggtatttgtctgggtcagtgcagcttctgttgccctcttgcgtcaccgttcacagaggaagggtaaagaggcctgtacgcctcagcctcatgccaatcccttgtcagctttctgactgcacacttctgatctgcacagagcttgctcctaggtggggaggcacgggtgctgggtggactctaacccccaaacagacttgtttggggatgagggagtgtgcagataggggcccctgggtgtgtttgtgcctgtagtccttctaggcccgtttgctcagggctctgactgaccaccatgcccgaattgtctgacagcatctacttacctggttgtacagtcgggcaccatcatctccgtccttgtgaggcctggagcctaggcagtggtctctgcctccagtgatggtcctgtccttctagcagcagcccctcccagaaacctctactctgatccttgttcccagggcccagggcagctcctcccaccccatccaatctcgttttct

SEQ ID NO: 6306 - DNA, 1151 bp, Homo sapiens
gagagcctggaggagccatgcagcgagggggctggtagatccccagagactgctctggagagtggcaaaagggcaggtgcttgttggtcacaggcccagggttgacctgctcctccccctacccagcatggtgaggacaccttcaaccgggccaagctgcttaacgtgggcttcctagaggcgctgaaggaggatgccgcctatgactgcttcatcttcagcgatgtggacctggtccccatggatgaccgcaacctataccgctgcggcgaccaaccccgccactttgccattgccatggacaagtttggcttccggtgagggctctcttctcagctggacccagccctcctgcccccaccagacgcaggcccacttccagcccccgagccccgcttgctcctggctgtggcccagaccccactggcgaggctggatcctccctggaccccattggacattccccccgacctggtctctggtccttcccctggagtccccttgggacccttactgacacctgccttcccatgccacaggcttccctatgctggctactttggaggtgtgtcaggcctgagtaaggctcagtttctgagaatcaatggcttccccaatgagtactggggctggggtggcgaggatgatgacatcttcaaccggtgagtaagcacgcggtggggaataggctgggtgggggggggagggggggtgcagactgggtggggttctttgcccttcctggagcctgttccagtctgtccgtccccatcctcaggatctccctgactgggatgaagatctcacgcccagacatccgaatcggccgctaccgcatgatcaagcacgaccgcgacaagcataacgaacctaaccctcagaggtgaccccagcaccctcaccccttactccccagaggcaacttcccaatatccccaactcttgaccccaagtggcccaatccctgatcccccagtgggggacctccaagcatccttgactccaaaaaggtgactcccagtgccactgattccctgatgtgatccaaggcccctcaggactgctggcacccctgatcgttgtcccccaacccccagcccagcctcagcccaatatctctgacctctggcctgattcctagaggtgaccag

SEQ ID NO: 6307 - DNA, 3011 bp, Homo sapiens
accacgagagatttgctttgagaacataaattcctctaggcgctgggagagtggaatagagatgaggggcctggaggcagaaaggctgtctggaaaaagttagtggtggaattggtggaagacatctgagagcctggactcatggtggtgaggagagatgccggagatactaggagagatgacagatttgggtggttgggaagactgcgaaggagtggttgaaaatggttccctggtatctggtgtagaaattcatccgaatgggaatggaggaatagagagggtgaggagtttagttctggaatgtggaatttgcagattcaggttatcagagaaagggggcaggcagggatgcctaggggacatttatgtatttggttctggaattcaagggaggcgtaggctggaggtacagatgagagatgccagcctgctacccaaccatgccttcctttttacagaatcaccgaagattcagctgtgaccacgtttgaggctctgaaggctcgggtcagagaacttgaacggcagctatctcgtggggaccgttacaaatgcctcatctgcatggtgagtagaaaagaacctaggggtgcccttggtcaggcttccacgccctctgggggagttggagagggtgggcctacctcagagtgaccccttctctgccccctcctccctaggactcgtactcgatgcccctaacgtccatccagtgttggcacgtgcactgcgaggagtgctggctgcggaccctggtgaggtggcatgggggtcggggaatgggaggccgctccgggcactgcccagatgtctgtgcttatgcctgagcctgcctgggggaagtggggagcatggcgcaaaggagaacagagccaggagccaggatatttacccgcaggatatttacccccaggctcgctgcctctcctccccaactgcaggtttaggaacttctccccctccatgagttcactgcattctcccttccccgccccggtccccgaaggcccactgcatcacacagactggtgaggcctggggtcaggaggaggctggctgtaggtaaacaggaccagggccttggcccctccccctcccattactaagctccttctgctcctgcccctgttcttcgctcaggagcagccattaaaatgtcgcccggagacagtaataaaaggctcggacgtgggctctgtgtcctgatcaaaggccgcgtgtaatctcgttagggctgcggctgccacagctggacccagccttgttctcattactggggctcctgctgcggggctggccaggcggtttgatcctggcgtccccccaacacaggagcgtgcctgcctgctcacagaagctgcctatgcgtccccagcctgggctgacaggaccaaggtctcagcacacactggtgcagagagacatggctgcaggcccaggtgctcacatgcgcacacatggctcattgtgtagaccagagccctccctgttctccctgcagggtgccaagaagctctgccctcagtgcaacacgatcacagcgcccggagacctgcggaggatctacttgtgagctatctgccccaggcaggcctcgcctccagcagccccacctgcccccagcctctgtgacagtgaccgtctccctttgtacatacttgcacacaggttccccatgtacatacatgcacatactcaaacatgcgtacacacacacacatttacacacgcaggactctggagccagagtagaggctgtggcccaggcactacctgctggctcccacctatggtttgggggccatacctgttccagctctgttcccagggtggggcagggaggtgggggttgggggagtagtggggcacggctcctaagatccagcccccatactgacagacggacagacagacatgcaaacaccagactgaagcacatgtaatatagaccgtgtatgtttacaatgttgtgtataaatgggacaactcctcgccctctacctgtcccctccccctttggttgtatgattttcttcttttttaagaacccctggaagcagcgcctccttcagggttggctgggagctcggcccatccacctcttggggtacctgcctctctctctcctgtggtgtcccttccctctcccatgtgctcggtgttcagtggtgtatatttcttctcccagacatggggcacacgccccaagggacatgatcctctccttagtcttagctcatggggctctttataaggagttggggggtagaggcaggaaatgggaaccgagctgaagcagaggctgagttagggggctagaggacagtgctcctggccacccagcctctgctgagaaccattcctgggattagagctgcctttcccagggaaaaagtgtcgtctccccgaccctcccgtgggccctgtggtgtgatgctgtgtctgtatattctatacaaaggtacttgtcctttccctttgtaaactacatttgacatggattaaaccagtataaacagttgctgcctgtgtgttatgtgtgtggggtggtgggggagctaactaggggaggtgggctgaggcagttaaggggttaattcctggtggcaggatgggggaaaggacttagctataggtgtatgacactgtgcagggttggtctgctctggggccgtggagcatttggtttggaggggggtggggctggggatctgggctcctgactattgatgggtaggggctctaggttaattctttatcgatgcagaatcgtcagctcattaatcacagaagaggtcagagcttgggggtacagaggggatgcaagctctatcccccaacctaggctaggagtggccacaagcttgggtacaaacacaagccccaggcctctatccctttctggtcccctgaaacataccagagaccacagtgggatcaccctatcagcctcccaggcttttgttctattctccaaatgtatctctagtgaccatcatcccagtgta

SEQ ID NO: 6308 - DNA, 1357 bp, Homo sapiens
acatagcgaaacccccatctctactaaaaatacaaaaattagctgggtgtggtggcacgggcctgtaatcccagctacttgggaagctggggcaggaggatcacatgaacctgggaggcagaggttgcagtgagctgagatcatgccactgcactccagcctgggcaacagagtgaaacttcgtctcaaaaaaaaaaaaaaaaaaacaaactgcacagaattttaggttttagaaaactttgcttgcccaagctaggttctgcatgcacactacctgtgatatcagtttggtgaatgaaatcaataacctggttgaggagacaaaaagacgtttctgaatcaccaactaaccaactaacagaagacaacttgtgatgaatggcacagatgagcattgctagagcagctcagaggtggaaacttgctgagaatgggctgggcttagagggtggagtgtgaaggcttagctgaagcagcaagatggcacacatggggaccatgaagaagctggccacgagcagtgcagggcccaggatgcttggcagccgcaaaacagctgaaaaaggagacaaaggtcttcatgtctggcactgagctggttaggttttcttctgtaggcagtggggaaccttggaaggattttgaggagagcactgtgactaagacatttctgttctagtggcattgtggtgtagtgaaaaggtcactgggctaggagtatgaaaacctggattctagtctggctctgccactgctttgtgttctcaggcatgtttctgcccctcttcgaagtttagtttcctcatctataaagtgaggatgataataatgtctacctcacagggttgttgtgaggatttactcagcacattttttggactgcttccaaaatgctagacacttattgggtgctagggatacagaggtgaaggagacagactcttggactctcttccatggagcttaataaaataatacatgtagctgggcacagtacctgtaatctcagcactttgggaggctgaggcaggaggacctcttgaggccaggagtttgagtccatcctgggcaaatacagcaagacctcatctctactaaaaataaaaaacaattagccagtcatagtggcttgcgcctgtggtcccagctactccagaggctaaggcaggaggattgcttgagcccaggagttcagggctacagtgagccactacactccagcctgggtgacagagtgagaccctgtctcaaaaacaaataaataaaaaagataaaacatgtaaaaagcttgcttagcatagtacgtatagtagagatatttaggtggtatatttgagaaataaaaggattgaatact

SEQ ID NO: 6309 - DNA, 1188 bp, Homo sapiens
agccgcacccacatctcatcctaaacgaccgcagcagcctctgaaactagtctaaacacgcccagatctgccgacgccgcagacccccttcccccagcccagggtcggaggcgagtcgccgggggtcggcagaggtcagcagcctgcgagaccctcctaggctcgtggccctaggcgcggcagctgacacgtaagtctcgtcgcccgacgttgtttcggcgctcagaaacaacgtaaagtaaaggggcggggcagcgttttacaaaccgaaccgtgaatctttgcggtttctctttccagccagcgccgagcgatgggtgagtgtcgctctgcattgaggcgggtgaagggaggttgagctcaatcaggccccatcctgcttcacagcctactgaggagtccagacgccccgacccccggccagggacagccacgaggagtggtggccctcgggtttcggccgcccagcccgtctctgggggctgcgaaggctctgggctccgggttccgggccgcgggctgcgggctccgagcggcgccaacatggctgccgcgaggaggaggccccggcctggccgcacgtgtatgatgacaactcggtaatgctgcatactcccgagtgcgcggtggggaagccaaccttggagagctgagcgtgcgaccggcccggcgcgggggtctccgggagctggcgagtcgctagcaccgagtcacagtggctcaagcttccttccccgcttccacatgcaggcatctctcgggacaactggcacaagcgccgcaaaaccgggggcaagagaaagccctaccacaagaagcggaagtatgagttggggcgcccagctgccaacaccaaggtgggtgcgagcgtgggcctgtccgcctgggaggtcgccttcccccgctctccagcgtgctcgggtctttccgtgtgacagttgtgcgttctttcttgggctctgatttctctgtagtagggcctgggtgtcctgtccccctttagctgttggataagtaagtaccaaagagggaatgctccctcaggcccccaaacctggagcttaggatttcagagagaaggatactgtgtggggacttgagcttctggagagggtggcgcctcgcgtcatagtcagaagcctagtcttgttttttttacagaggcttaattttcagcatttggggtca

SEQ ID NO: 6310 - DNA, 1188 bp, Homo sapiens; identical to SEQ ID NO: 6309

SEQ ID NO: 6311 - DNA, 1200 bp, Homo sapiens
ggtgggaggatcacttgagcccaggagttcgagaccagcctgggcaacatagggagaccctgtctctacaaaaaatacaaacattaactgggcatggtggcacacacctgtagttccagctacttgagaggattgcttgagccgggaggtcaaggctgcggtgagctgtgattgcaccactgcactccagcctgggtgacaaagcgagaccctgtctcaaaaaaaagagacaagttgttttttcatgtatcaatcttgatattctccctcctctgtcctatttcctcccctgtcacctgcagtctttccttcagttccttctcatttttctgtcacttcatttctctaccagcaactattgaaaaataactccacatctgtacctactgtgtgccatgcaatttcctaagtactttgcctgcatttattctaattctaccaaggtagtcactgtttctgtttgacagatgaggagctggagacccagagagaataactaatgagcccaaggcacagactaagcattatcgactcttcctttctgcaccacaatgcatcccagttcacctgtccatatctatctttgtcaactaaggtttatctttttctctgccccattttctcccctgaggagtctttattctctttgatgctccattttaaattatccgtgtttctttctcttgctttcttatcagatctctctgggttccttcctcctcccatgcctccttcctctcagcaaacccacttactatggagagcttatctctgtcctcttcttcccttccatgcggcagccttcggcctaatcttggtgaaataaacactgcagtacaggcctggcaaaagagtggggagtaggggagagtcggagaaggagaggctgggcacggtggctcacacctgtaatcccagcactttgtgaggccgaggctggcagatcacctgaggtcagcagttcaagatcagcctggcgaacagggtgaaaccccatctctactactaataatataaaaattagccaggcgtagtggcaggcacctgtaatcccaactactcgggaggctgaggcaggagaatcgcttgaacccgggaggcagaggttgcagtgagccgagattgcaccattgcactccagcctgggcaataagagcgaaactcagtctcaaaaaaaaaaaaaagggaaggaactggcag

SEQ ID NO: 6312 - DNA, 1248 bp, Homo sapiens
ccacgctgatgaagacagcagaacacggaggccccgcgttcccgccgcgagagcaggagagaaagattacctcccgcgagctctagcgcgcccggctttccggcgcactccagggggcgtggctcgggtccacccgggctgcgagccggcagcacaggccaataggcaattagcgcgcgccaggctgccttccccgcgccggacccgggacgtctgaacggaagttcgacccatcggcgacccgacggcgagaccccgccccatccccgactgcctgaaccgcgccaggagacggaccgcaagtccagcgtacccacagacgactcaggcgggagacgagcggtgtcatggccgccgacagtgacgatggcgcagtttcagctcccgcagcttccgacggtgagcggcttcccagaggtagccttcaaagcctctgcgctctgggagaggggaaggcctcgggctcatagttctagaggctcctcaagcttcagaggactgctccttccgcctgaactagccacgaggagactacaagttccgttgtacaccgcggctccggctgcaaaagcctggagcgttgggagcatggggctgatggaggcatggcgggagatgtagtctggagctcataacggttagtagtaatagttgtgattcagttcagtggagtggattgagcgttgtgatccaaaggaaggtaggacgtattgggagctctggtgtggggcactgccaggctctggggcttactgggagctgttgcttgtggcgctggggcaccatgagaacagtagtatggatccctgtgggatattaagggagctgagatcctcaagccctacaaaatgtttcctgcaggacatgggaaaaaagaatcaaaggtcgtctagtccaactttctcctctacagattgtgaaagcgaggtgggaagtaatttacccaggctcatacaagccagtagaagactcaggcttcctctccccaaattcagggcattctccactccaaggcctgtgtgtagaacacgtgggttacaaaggcttgtgggaaaagctaccaatggaaactaccccccttaccaccatcaccgtggcctagcttggtgtctgttcccctgggctctttccttaagcatgaacatccatcaccctcctaacccccaggtggtgtcagcaaaagcacaacatctggggaggagctagtagtccaggttcccgtagtggatgtgcaaagcaacaacttca

SEQ ID NO: 6313 - DNA, 1173 bp, Homo sapiens
ccctaagggaggaaattcggatgtggggccttctcctcttagggttgtgattgccaggatcccaggtccagaaacaaatgggaggggaaggagatgatgcagaaagtactggcctttttaagagctgtggcttggcatactgcttcccctctctgagtctgtttcttcattggtaaaacagggccatggtatcagctttgctttcatgagtgaaaacattctgtggtaaaatgctgcttgtatttgttatgactagtgagagtaacccagacttgattattcttcaggactcttggagaaagcacctggggtgaagcgactaagctcactggatgacaagatcccccacaagtcaccatgcccaagacgtaccatctggctgtctcgaagccagtcagatatcttttcccgtaagcccccacgtacagtgagtgtcttggacccatactaccggccacgagatggtgctgcccgcacccccaaagtcaacccttttagtgctcgccaggacctcatggggggcaagatcaagttttttgacctgcccagcaagtctgtcatctctctggtatttgacctggatgcaccagggcccggaactatgcccctggctgactggcaggagcccctggccccacctattcgccggtggcgttccttgcctggttcgcctgagttcttgcatcaagaggcttgtccatttgtgggccgggaagaatcgctatctgatgggcccccaccacgcctaagtagtctcaagtacagagttaaagagatcccaccattccgggcatctgccctaccagctgctcaagcccatgaggctatggactgctccattctccaggaagaaaatggttttgggtccaggccccaggggaccagtccatgccctgcgggtgcttctgaggagatggaggtagaagaaaggccagcaggctcaactccagccaccttctccacctcaggcataggcctgcaaacccagggaaagcaggatgggtgagggggtttagtccctgcctcaccttggggatggaccttcagctgaaaccatatggccccctaggtgcacagccttgattcttccctggagcctacagagcaggcaggctaggccaagccaggctcaacttctgggctcccagtgcccattggctgtgtatgacggga

SEQ ID NO: 6314 - DNA, 1099 bp, Homo sapiens
ttaaaccatgcttgttccattactatggttcatcacgggagaagtgcaaaggctgtgacttcttattggtgtcttatctctacagcagaggagtactgcaattcagctttctctgggtattgttaagcattggcattaggccatgcttataagtgcatccttgcttttgctatctttggagaacttggtgtttatgttaattttagccactcagaaaagatcaaaattagactgaacagtgtttactctgtattggtagctatgacatggaggcaggagaataaagtatgggattggaagtttttttcattcaggtattcctaatgcaccaggttctaaaagtagcttctaggagacatctgtattgagcatcttggcagttagtggttattgtgtcagccatcaacttgcttctttttgtataggaaaatataaagcaaggaagtctgtgtcaaatgctaaccatgactccgattttccccccaggaaaatatgttgtgttcttcttttaccctcttgacttcacctttgtgtgccccacggagatcattgctttcagtgatagggcagaagaatttaagaaactcaactgccaagtgattggtgcttctgtggattctcacttctgtcatctagcatggtaaatctcttggtctatttggcatgtgaacttttttttttttttttttttttttgagatggagtcttgctttgtcgcccaggctggagtgcagtggtgtgatctccgctcacttcaagctctgcctcccagtttcacgccattctcctgcctcagcctcctgagtagctgggactacaggcgcctgccaccatacctggctaattttttgtattttcagtagagacggtgtttcaccgtgttagtcaggatgttcttgatctcctgacctcgtgatctgcccacctcagcctcccaaagtgctgggattacaggtgtgagccactgcacctggctggcatgtgaacttttaaaacagcaactgggaagctttggcaatagactttcaagtattgccttctcattgaagggagtgcaaagtctgactttctcttattgctctcatgacctggcagcaga

SEQ ID NO: 6315 - DNA, 2782 bp, Homo sapiens
aggctggtctcgaactcctgacctcaggggatctgcccacctcagcctcccaaagtgctgggattacaggcgtgagccaccgcgcccagttcatcttccatcttttcacctccactgcatagatgtgcctgttatatttctgagcccccttcccccagcattgaccttggggtggtgacagtagaaggctgaaaccaacatagctgaaacctctgcttctctcacctggcaggtaaaagcagctgttaagtatgcccttagcgtaggctaccgccacattgattgtgctgctatctacggcaatgagcctgagattggggaggccctgaaggaggacgtgggaccaggcaaggtaaggactggggttgtaaatagaggtgggataagagaacttagaagctgaagctagggctggggcccagctggagggaatctggcatcagcttccttccagttcctctcccagagttgagggtgggtgagaccacgtgctcatggctcttctcactgtgggccctgccccctgcactaggcggtgcctcgggaggagctgtttgtgacatccaagctgtggaacaccaagcaccaccccgaggatgtggagcctgccctccggaagactctggctgacctccagctggagtatctggacctgtacctgatgcactggccttatgcctttgagtgagccttgccagagcctcatctggggaatcagggggttgagcaggatggtgttagtaacttattgtaagtcacagcagcagagcaggataggaacactcatttgcatgccaagctgaggagcttgacatgggatcttagcctcttctgctacagcagcttagctgtagctacaggagtttaactctggaaaaaggaaggcagtctcacatggtgtgtaccccagggtatgcacctgtaaccctcctgctccctttattcatttagaaaaggtgctgacttttctgttgagcacctggggttacagtaataagtaagtctcagcagaagatgtgagaagagctcaccattagtgccgtgccctgtgctggaagaagggtggataactccctgaggatgagttaaggaagacttcctaggggagaggagatatctacgtctaggaagaggagggggcataggcattccatgtaaacttaacacctgggttacgatctggaaggatgaaaaagcatggctttttttggccaggcgcggtggctcacgcctgtaatcccagcactttgggaggctaaggcgggcggatcacgaggtcaggagatcgagatcatcctggctaacacggtgaaaccccgtctctactaaaaatacaaaaaattagctgcgcgtggtggtgagcgcctgtagtcccagctactggggaggctgaggcaggagaatggcgtgaacccaggaggtggagcttgcagtgagctgagatagtgccactgcactccagcctgggcggtaaagcgagactccatctcaaaaaaaaaaaaaaagaaaaagcatggctttttaaaaattcttggccctttgtcctctctgggattggagtttgggacatagagtggctggatgggcaggtagggtagaagcctggcatttgtgtccacacttggtggggctgtctctcactcaggcggggagacaaccccttccccaagaatgctgatgggactatatgctacgactccacccactacaaggagacttggaaggctctggaggcactggtggctaaggggctggtgcaggcgctgggcctgtccaacttcaacagtcggcagattgatgacatactcagtgtggcctccgtgcgtccagctgtcttgcaggtaaggacagcaagcagatgagtggtttaggggttgtctgctcaagagcatgagggagcagacgatggatctgcttaagggagatagctagcaagttgtcagagtgttggtgcagaagtcctctgcataaaggtgggcattgaagcagtgggagagaatgaaattgccgatgggaaatggtgagaaaagcaggctgaaggggagtggaggagtcagcaatagggggtggtccagacatgcatgtctgggatgggccaagcaagctgggtgtcaccacttcatggtgatgggttattctttggctcaggtggaatgccacccatacttggctcaaaatgagctaattgcccactgccaagcacgtggcctggaggtaactgcttatagccctttgggctcctctgatcgtgcatggcgtgatcctgatgagcctgtcctgctggaggaaccagtagtcctggcattggctgaaaagtatggccgatctccagctcagatcttgctcaggtatggggcagtcttagggagagggccctgggttgggaggcaagggttaagggatttcttatttcagtgtctgggtgaggctgaggatcttgccttgtgatctggagggaggccactgtaggcatatttcccatttcagcagggctcaggtgctccaggagcttagggaagctgcatggggaacaaaatagtgcttatgaatactgaccccttttcctcatctgtctaatcccccaacttaggtggcaggtccagcggaaagtgatctgcatccccaaaagtatcactccttctcgaatccttcagaacatcaaggtacttggtaatgggttctatcttctttagctctttgggacattttcttggccctgactctacctggctaaaaaggcagtgttgtggaaccccagcttctgctcacaaagctggctttc

SEQ ID NO: 6316 - DNA, 1111 bp, Homo sapiens
ttgcagtcatagtgtaactttttttttttttttttttttgagacggagtctcgctgtgatatctccctgacattgtatttaaaaaaacctgtgtgttatagaaggttatatagggaaataaaagacctagtcccttaaccacaggtagtttgagaggctctgtgctagaccatttggtcagaatgacctcttaataaaactattcgatatacatgactggctgtgacggagtttgtagataaggatccaagaccatttcaagattctaggcaaatggcccagatagcttacaacctgtagctgaaagcactgccctttaagttgttcctcatccctgtggttatagctgtgaagttgccacttattttcagccctggatatttgagtgagtaagaattaaatgaattaaatttgataatgtaagtaagtaaataatacttgagtatttaataaatgacagctcttttattcctttatatttttctgaatttattttattttcaggcttaataattgcctccagttttacattttttcccctttaattttttattacagaattgaagatgttcctgctccttctacatctgcagataaagtggagaggtaagattatttacatggtagttagattcgtatcagaaacataaactaagagcaatataactttaaagttatttttattttttaattaatttatttttgatagaggcaaggtgtcgctttgttgctcaggccgaagtgcagtgtgcaatcagggctcactacaaccttgaactcctgggctcaagcaatcttcccacttcaacctcctgagtagctaggactataggcacatgccactacacttcgctcatttttaaattttttggagagatggggtcttgctatgttgccaaggctggtctcaaactcctagcctcaagcattcctccctgcctaagcctttcaaagtgtaggattataggtgtgaactaccaggcccgtctcacctcctccccctgtaacgtttccatcttgatatggctatggttttttgtttttctttatctcagatctacacccgtagtgactatgtttcttaatcagaggtgggcataataattaacta

SEQ ID NO: 6317 - DNA, 2852 bp, Homo sapiens
gagatggggtttctccatgttggtcaggctggtgttgaactcctgacctcaggtgatctgcctgcctccacctcccaaagtgatgggattataggcgtgagccaccgtgcctggtctctggtaagtttttaatctcgtaatcatacagaactttctcatgatttgccgtgaaaatcttgctagagtatttttggctatttagagaaatcgggtggatacaaagtttgggaaatagtatggtcctattacaaatggaatgcatataggtcttgttcttttgacaagagacatgcttttcaggcggctggatggaggaatatgcttatttccttcagtgctcttgcagtcttaatttatattactaaagttttgatcattgcttccttgaatatacatagttttgtattgcctgcgcttggcttacacttcttgcttttataatataggactgtattttctgtcttagaaaaaattgctaggttctagccatcaaacctttggtgctttcttttgttctcctagaatggagaatggtgtgttgggaaacgccttggaaggtgtgcatgtggaagaggaagaaggagaaaaaacagaagatgaatctctggtagaaaataatgataacatagatggtatgtggagttgcatgtgacattcaagagatgcgacgttgtatatttcttgtatacagtggtggaaacggggctctacctgtcctggatggtctctcctaagatgcttggggtgatgatgcctgcatctggtggagattgcagtggggatagctgtttactgaagctgacagcagatttttgaaagagaataacttattttctcaagtaaatccagttatttcgattggggttttttaaatcaaaaagataaaagcaagattaaattggtgttttaaatactattacaaccttaagtgtttttctgatgcaaatttttttaaacagcctgtgcagttcagttattttaatagcagtacttttagagcccttgtacattttttatgtgtgcgaaaattatataatttctaagctgaatttggctgctatagttttacatatcagatgggggagaatgaaaagcttggcatctcttacctaactggtaatcagaatgctcaagtaaaacaatacctagtgtaacaagcttgggtttcttttgcagtaagttgctctgctagccgggatgctccctttccttttctctagggggcagataatttttaggccatctgctgaaacttggtaggctttttgagggtttaaagggaatgtatttttagtttccatttatgcctttatcattaaactcgaagacatgtttatgcttcatgttctttaaccatgtagaggaagcaagggaagagttgagagaacaggtttatgacgccatgggagaaaaagaagaagccaaaaaaacagaagacaagtctttggcaaagcctgaaactgataaagaacaggacagtgaaatggagaagggtggaagagaagatatggatataagtaaatctgcagaggagccacaggaaaaagttgacttgactctagattggttaactgaaacctctgaagaggcaaaaggaggagcagcaccagaaggaccgaatgaagctgaggtcacttctgggaagccagaacaggaagtaccagatgctgaggaagaaaaatcagtttctggaactgatgtccaagaagagtgcagagaaaaaggaggtcaggagaagcagggagaggtaattgtgagcatagaggagaagccaaaagaagtttcagaagagcagcctgtggtgactctagaaaagcagggcactgcagtggaggtagaagcagagtctttagacccgacagtcaagccagtggatgtgggtggggacgagccagaggagaaggtagttacctctgaaaacgaggcaggaaaggcggttcttgaacaactggtaggtcaagaagtaccacctgctgaagagtcaccagaggtgacaacagaggctgcagaggcctcagctgtagaggctggatcagaagtctctgaaaagcctgggcaggaggctccagttctccctaaggatggtgcagtcaatggaccgtcagttgtaggagatcagactcctattgaaccacagacttctatagaaagactgacagaaacaaaagatggctcaggactagaggagaaggtcagggcaaagctggttcctagtcaggaggagactaagctgtctgtagaagagtctgaggcagctggagatggggttgataccaaggtagcccagggagctactgagaaatcacctgaagacaaagttcagatagctgctaatgaagagacacaagagagagaagaacagatgaaagagggtgaaggtaaccgggatatgcaagagctgcagtgggtggagtacattctggatttgactcactaattatgggtaaaagtcagccttccattcaggattttccgtctgcctttggattaggaaagggctaaatgaaaaggggggtagtttaacaaggtcgtgatagtcaagtaagttcaatcaaaagcagcaagtcttctttagctggcttataaactaacacttttactaactgcaaaataggccttctgtgtgatttctgagacttggctagctatcagtaacttgttgcagcatactagccaataaagtgggatggaaaaggtagatgaggggtggggtaggtagggaaatagtgggctaggctggcagagaatgctgaatggatgttcacttgcatgcctctggattttaaaattattgttcacatgactccttttctgtgcgttgggaagcagctacagagcagtagaatccactg

SEQ ID NO: 6318 - DNA, 1408 bp, Homo sapiens
attcaagaaatactttgtggtcactgccctcttaatatagggagcaaagcagagtttgggtgacttgtatatgcttcctatgactgaggcctcagttatataagacagaatggcttaaactaggctcactcatgcccaggttctgtttgtcttccaggctgagaatcaggctgaaagccgggcagcagtggaggggacagtggaggctggagctacagttgaaagcactgcatgttaagagggggcacagccctcctcccaagggaaagtgtttttgtatataatgtattttttcacttttggaggattctttttgtataacttcaataaagattgtaagcaaaggttgaggctttgatggtttttttcttaattattggctgaatctgccttggagcactgctggttttatatattagccaaaggttttgttctggccttctgtactgatctgtgttcctgatcctaattcctatctgtctaacgtggaggtgatcaagtgtggctgtaggcctttgttttccaatggtgctatattctgttttcaaacacttcactgaacccagctgtcttgcaaactttcagtggtgctgtccctggatgggggctacaaaaacaagaattggtgaagatcttgctcttcagtgctgaaaatggatgatggactttggctgtgagccaggcctaggatggttcttgtcctatatccacctagtcttcacctggggctataattctgtcctggaaaaagaactctgaaaacctgggtcaggggaatgattcctaaggaaaacggtctgcatttgagctctggtttgaaagtagccaaggggactgatggtggacactccagatgtggttggaagcatatgtggggaggctggctggttgagttttgttattttctgtatagaaaggttgagatatatcaacacttggaattgttacccatctgcagaattgacttctcaaataaagatgctaaaaatctccttgtctggaattatgtttaaagatcttaagtggggtcttaggctgcttttttgagatgggatcttgctcttgtcgcccaggctggagtgcagtggcgtgatctcggctcactgcaacctctgtctcctgggttcaagagattatcctgcctcaggaggctcccaagtagccagcactacaggctaatttttgtatttttggtggagacgaggtttcaccatgttggccaggctggtctcgaactcctgacctaaagtgatctgcccactttggcctcaggaagtgttaggattacaggcgtgagccacttcacctgactgcctggagcatttctgtgtgcgatagagggtttcaaaggcagaaacgagcccaccagtccaaggatgctggtggtgagggcactagtattaatgtt

SEQ ID NO: 6319 - DNA, 1861 bp, Homo sapiens
gtgtgcgcctgtaatccaagctacttgggaggctgaggcaggagaatcgcttgaacccaggaggcggaggatgcagtgagccaagattgtgccattgcactctagcctgggtgacagagcgagattccgtctcaaaaaaataaataaataaaaagaaataaggactttcaagccccatcccagacattctgaatctgaatctgcatttttgaaagatgcgtagatgactcgtaaattaaaatttgaaaagtactggtataagagatctcagagggtctcttagaagcaccccccgccccacattctacctagaattgaattgaggcctggcctttcccagggcttatgggtcagtacagtcattgatatttttttcttttttctttctctcccatgctaaccatagctgagaagaaatggctttggaaagaatggcttcttgcagagccgcagttccagtctgttctccccttggagaagcacttgcaaagcagagtttgaggactcagacaccgaaaccagtagcagtgaaacatcagatgacgatgcctggaagtaggcatataaatgctcacagttaaatctgacccagtaaactctgtgtgtttagggagtatacaaaagaaatcgttcttttccttttcttatgttgttgaatacttcattcacaagggaaataatcatatcccaaagagagagcaattggcttgttttgcttttgttattgttcttccctgttatctgctttatagagagaagtttgtgtggtgggacagattttttaaacacactcacacacacacacacatacacacccagtatatatggggcgatgcacaggtaggagctggcagtgcagggaagaggagacactggtctgcagcaacagcttctactaccagcccttggggcactcacccctgtgatcaagcaatcattgtcaatgacaaagtgactattgaagttataattgtattaaattaatgctaataatttggatattttattttatttttggctgctcgggtaactttagcccttaaccaagcatatgtgggtttttttggttgtttttttttgttttttttttctttttcctttttgggtacagctgtaaaatatttggatataggaaatgttgtgttattcttgcagccttgatattcagggtggattgtaaaatataaatttttgtgagatttcaaagattaagattattttgataacattatttacagatttaaaagatgtggttatcacaagtctcgagggggaaactactgcataaaataactaacttggaataaatattttgcatcagtttggattgtcttgtgtaagaagtatattttctttaaaattagatgagtggattcttttttaggggaaatatttttagaagttggggggaaatgtgaattcagacacaactgtttctctattttagcagatacttttttgatgcagaaaaacctgtgcaataaattaccagtaataaagtcagaaaccaagttttttttttttcctgaaactgttttttagtgcccatgtatttaccagtgtacgtattttaagggaagtctgttctgttttcctactaaataagaacttggagtgggggttgggggagagttggacgatggtagctgaatggctagtgaaggaagcaggttttttcattcaacaaatactttttttttttttttgagacggagtctcactgtgtcacccaggctggagtgcagtagcgatctcagctcactgtaagctccgcctcccgggttcccaccattctcctgcctcagcctcctgagtagctgggactacaggcgcctgccaccacgcctggctcattttttgt

SEQ ID NO: 6320 - DNA, 1112 bp, Homo sapiens
acactattttttagcagttgcatgagtaagagtaatgagatttgtattttaaggactttgtcatgtggatgttttggagttgactgctcagatcttttatagggctttaatatttttgatctattaccttgatgacattatttgtccacacttgagcccatctgtctttctagctatgaccttgttatgaacagtatttgcactcggtgcaaatatccatgtcttacctaattaagcaacatcatagtgccataactcaaggaagttgaatgaggtgaacatagatacagctctttccccttccccccctttttaaatgtaacaaatactttttatgttccccttccccccttccccttttcccctttccccttttggaaacgtgtcaggaaccaaatagtttaagatgagcagttgaggggactgagagagtgatcgacacagaacctggcttcttcgtgcttcatcataagtcgtgctgccggccaggttacttaagcacccttttaacaaggaaaccttgtgggagatccagctggccgactcgagttcagaaacaggaccacagaggttacactctggggtaaatattctccatatgtctaacttggaaagaagactctatgtatatgcatcatgaaaaataccgactgctttctgatgtaattaattttggagaatatcagtggggtggtttgaagacaccaacagatctcaggaaaactgatgctagttggtatttgaagaaattaatgtgaactaaatataaaagctcttgagaggttgtatcgtccttctctaggaagatctttttttcccccatcttgaggcagggtctcactctgtcacccaggctggagtgcagtggtgcaatctcagctcactgcagcctcaaccttcccagctcaggtgattctcccaccttagcctccagagtagctgggaccacagacgtgtgccaccacacctggctcctttattattatttttgtacagatgaggttttgccatgttgcccagactggtctcgaactgctgggctcaagcgatccacctcggcctcccaaggtgctgggattacaggtgtgagccaccgtgcccagccaagaaga

SEQ ID NO: 6321 - DNA, 1096 bp, Homo sapiens
aatcgcttgaacctgggaggcagaggttgcggtgagctgatatcacaccactgcactctagcctgggtgacagagcaagactttgcctcaaaaaaataaataaataaaaataaccatcagatctcatgagacttattcactatcacgagaatagcatgggaaagacccacttccatgattcagttatctccctccaggtcccttcccacaacacatgggaattatgggagctgcaattcaagatgagctatgggtggggacacagccaaaccatatcaccctgtctcccacccatgccagcagcaaaggggctagaatcagagtctccagcaccaggatattccatgaagctgtctcctctgggacctcagaaactgccagatgggagctggctagctagagcagggaactgaatcctttcctcatggtagcctgggcttgttgcagggggagactgtgccactctgctgaagaatattggggccctgcctgtggacatggtgcgtctatactttgcggaaactgtgctggccctggagtacttacacaactatggcatcgtgcaccgtgacctcaagcctgacaagtatgtccacagtctgtgtcccttgtccagggtctccctcttgggtctccagataaaatgttggcaagcacagtagctctaaatctatccagatggctaccgggaaaacatgctcctgtgtgtgtccatctgggcctagttctctagccccccgaccaccccagatgcagatcattgcctcaaggtctggctggaacactataaggcttcggtgacatggaagagtcattgaggagccccactgaagaaaccaagcaagaacaaaagaataagcacatctagtagatggctaaacaagtgtcctgacgtttactgacatctactctgtgccagcactatattgtgggtttttaaatgtagtccctggcatgtagaacttaagtctacagtgggagacagaaatatatgtatataggcttcttctcagagggtattagtcaagtggaaaaaggaagacctgctttctaaagcaggagagcagaatgtgcagagtcacacaggtgcaagaga

SEQ ID NO: 6322 - DNA, 1151 bp, Homo sapiens
acagccacagcctttccccccgatctcccactcaaggctaccgggtgacccccgatgctgtgcattcaggtacgaagggctccctgcagatcagtgacaacccctgggaaataggaaagttcctaggccctgtgtgcttctgacagatcccactctgagtctctcatttagcccaccccctgaaagatcctgtagtcttggggaggaattaattgatggggaagggggtagcttggtttctgggacataacagggctaagccctgtcttgcccttgagtcacttctaacagctaacactgctctgcttttgtctgtctgtctgtctgtctctgtacaaagtgggagggaattcatcacagagcagctcccccagctccagcgtgcccagttccccagccggctctgggcacacacggcccagctccctccacggtctggcacccaagctccaacgccagtaccgctctccacggcgcaagtcagcaggcagcatcccactgtcaccactggcccacaccccttctcccccacccccaacagcttcacctcagcggtccccatcgcccctgtctggccatgtagcccaggcctttcccacaaagcttcacttgtcacctcccctgggcaggcaactctcacggcccaagagtgcggagccaccccgttcaccactactcaagagggtgcagtcggctgagaaactggcagcagcacttgccgcctctgagaagaagctagccacttctcgcaagcacagccttgacctgccccactctgaactaaagaaggaactgccgcccagggaagtgagccctctggaggtagttggagccaggagtgtgctgtctggcaagggggccctgccagggaagggggtgctgcagcctgctccctcacgggccctaggcaccctccggcaggaccgagccgaacgacgggagtcgctgcagaagcaagaagccattcgtgaggtggactcctcagaggacgacaccgaggaagggcctgagaacagccagggtgcacaggagctgagcttggcacctcacccagaagtgagccagagtgtggcccctaaaggagcaggagagagtggggaagaggatcctttcccgtccagagaccctaggagcctgggcccaatggtccc

SEQ ID NO: 6323 - DNA, 1287 bp, Homo sapiens
ggggcctgtggagattgtttcggaagaagaaccacttcctgatggtgggggtcccggcttccccctactcgtgagtgacccttttctgccctgggaaacaggaggcctagtgagatccagggatatagctaatggcttcttctctatacattcttgtattattttcccagagtgaagaagccaccctcagtcaccccaattttcctggagccacccccaaaggaggagggagccccaggagccccagaacagacatgagacctcctccaggaccctgcggggctgggtactgtgtacccccaggctggctagcccttccctccatcctgtaggattttgtagatgctggtaggggctggggctaccttgtttttaacatgagacttaattactaactccaaggggagggttcccctgctccaacaccccgttcctgagttaaaagtctatttatttacttccttgttggagaagggcaggagagtacctgggaatcattacgatccctagcagctcatcctgccctttgaataccctcactttccaggcctggctcagaatctaacctatttattgactgtcctgagggccttgaaaacaggccgaacctggagggcctggatttctttttgggctggaatgctgccctgagggtggggctggctcttactcaggaaactgctgtgcccaacccatggacaggcccagctggggcccacatgctgacacagactcactcagagacccttagacactggaccaggcctcctctcagccttctctttgtccagatttccaaagctggataagttggtcattgattaaaaaaggagaagccctctggggatgtcttgtgattgtgattttgtgtgtcaggggggtgctggagggaagtggtggagagaatacttgtgttggatggtgagttttccttactgtcctccacagagtttatcttccatttggggccatttggccaccaggggatgcctgagtctcaaactccaaggtttttccccaactctaccctaggacagcttgactttagccccgccctacttgaggcttggagcagccaccctacctcttccccaccgtttaaccaccagccgggttcctgcttatcttgcctgggccgggcacctgtccccagagacagagcaggagagaacaaaaagggatactggggagttggaagaggaaatgagagagcaggtgtgcatagtaggggtgggaaggaagtggatgggacaggactgggcaggcatcattcaagagacgggctag

SEQ ID NO: 6324 - DNA, 1182 bp, Homo sapiens
tggaactggtagggtgagatggattagatatccaggaagcagtgaattcctggtctatatctctgtagccccatcccttgtcttgcccctcccctcatgtacctgatgtccagctgacagagagaggaggatgaatcctctgagaaaacatctgccaaggccagcaggccagcattccctggagagaaggggagaacgcctatcacctccacccaagaacaggggacaagggtatcccaacccaactatggctggcagaaccagccctgctggttcctgaagccccagcacagaaatatctgtattccaactcccacgttcccagtggagaggtctttgcctttatccagtgagtttttaggtcaaaggcctagctcctttcccctctccctccccagggtctggcccccacccaggcggttccctggcagccggaggcccttcagtgtggagttgcccttcatagcagcaaccatctcaggcagaaattgggctgggcgcttctcaaacagacggcagaaggagaaggtaatctctgtcaagaaaaattatagtaaattctgatggctgcattaggactggtgctgcccctcctgccccagttggccctagcaaggggtattaacattatagaggcccaaaaagaggaaggaatttgtctagactccaagcaaggctggaactaaatcagaatccaaactaaagactgaacctaaatgttccctataagaaggttctctgcatggacaattctccattcacttccttctttccctaacactggccaccctctatgcgggggtggggatcagagaaaagtctatgaggggagcctggcacagtacatttattttgccccaccaccaccattttgtccacctctgaaaggtaagagcaacttttgggtgaagcactctaaaagagcgatttctcatgtttagtagaggaggaattgaggttggggcttttagaaggaaaatcatgcaggttctatatccattttatagctgaggacacaaggccaagaaaggaacagtggtttgctcactcagattatggcagaaccatagtgaagacccaggaaatgtccaggttctgaataaggaacttaccttgcagagtcagattctgtagcaaaaagagcacctcgctctgacagtcagcgagattcatgtcatggaa

SEQ ID NO: 6325 - DNA, 1289 bp, Homo sapiens
aatattaactgaaccccccgccccgcctcccatttattttcctcctagcatttcccattatcacaggttaccttatttatgtgttcattttaactcattaccctgtaagtttcttaagtggcaggcatgttttgttacagttataactcactcagcacttagaacactacctggcatataggagatgtcctgttgaattaatatgtaatgttaatgtcactgatggggaggtacaagtttttgtggaaagataggagggacagatttgtgtgtggataggggcttgtttagagaaggcttgcaggaaatgacagttatcagatctaaattctaaaggaagaataaaagatgaaaaaagtggggagttcactaggactcaagtgctgcttgcctatgtgagaaggggagtggtgagaagaggggcagtactgtttcaggtcttgaaggaccttgtaagccatgacattaaagctgccaattgattacctccttttctttcccccatctaggtggcccacaaactctttaacaacttgaaataaatgtgtggacttaattcaccccagtcttcatcatctgggcatcagaatatttccttatggttttggatgtaccatttgtttcttatttgtgtaactgtaagttcacatgaacctcatgggtttggcttaggctggtagcttctatgtaattcgcaatgattccatctaaataaaagttctatgatctgcaaacctgcccgtcttttttttttaattgagaatttttttttttaatttgatattttcttttagttttgagggggtggggagcggcaaggaggacagggtcttactttgttggctaggctggaatgcagtggcgcaaacagctcattgcagcctccacttcctgggctcaactgaccctctcaccgtggccccaagttgctgggactacagcatgcatcaccatgcccagctaattttaaaaatattttgggccgggcgcggtggctcacacctgtaatcccagcactttgggaggccgaggcgggtggatcacgaggtcaggggttcgagaccagcctgaccaacatggtgaaaccccgtctctactaaaaataagaatattagctgggcatggtggcgggcacctgtagttctagctactcaggaggcttaggcgggagaattgcttgaacccgggaggcagaagttgcagtgagccaagatcgcgccactgcactccaggctgggcaacagagcgagactccgtctcaaaaaataaaataaaaaatatatattttc

SEQ ID NO: 6326 - DNA, 1198 bp, Homo sapiens
tcgatctcctgacctcgtgatctgctcgcctcggcctcccaaagtgctgggattacaggcgtgagccaccacgcccggccaggtcccgaaacttaagcttcatttgtttcactgcaaatctgcttctgcctacaagcctggtctcattttcctctacctaaggatcttcctccatgcaatttcggcctaggaggcccttcccgccccttttcgcctagctaactctttcggtactcaaccaccaactcctaatcctccctggtcccccaagtgggctaggggcttcttgggagtccctcgcactgctctaagcatccaggcagagtcattattccgggtgccaggttgctctttttccagcagccttcaggggactcctggctgggcggagtctgtagaggcgcgcggagtcctgggagagcgtcagatgtatttcctttcccttttttcgctcgtgtcccgccgggtggcgctcaccacctccccggaacacgcgagtctcctgtcgcggttccggtcggaattaccccgtggagcacgccgatatggctgcgctgacactgaggggtgtccgggagctgctgaagcgtgtggacctcgcgacggtcccgcggagacatcgatataagaagaaatgggtaaggtccggctgggggcgcaggagggaaaagtgagggtggaaacttctccagtctttccgtttcccggccctctagaacgcctagcgtctttcccaagcactccacggaacgtccttaggcacctccctctctcgtcttttccgtcaccgcctctgtccgcactctatgtcccgagcgttagtgtcttccacttgttacgtctgcagtctcctgactccgcccaagttgcgtcatcaccttcgccttcattcttttagtgatgtcactgtctcttgttccccagctgtgtccacctacctttctgtcccccactcccccttttacttccctccctcccctccccctttcccttgcccattcttcccccacatgacttctcctttcctcattgattttccagcccggtcgccctcacccctcggaaaataccatagcgaccttgcctgcactcctgggtctccgccgccttgcaggaaaggattcagccccttcctcaacctcgagctgcctctggcgaccgggcaaggttacagcgaccaccctgtccatactgccgg

SEQ ID NO: 6327 - DNA, 1173 bp, Homo sapiens
ctcaagtgatccgcccgccttggcctcccaaagtgctgagattacaggtgtgagctaccgtgtctggccctattatttccattttatacataaggaaactgaagttcagaggggattgctgacttgttgaaggctgatcattatgggttacagagaagacttgaaacccacacgctcaactctaaacttactgtgacttcctcatttgtacaatcatcacaagaacatgcattcaacattcttcggacaccagcctctgtgctaggcgaccacaacactttgaagacagaagcagtcctgtgtactgtgcacctctgccaatatctgtttacaggagatagctgccatgtccctgtccaccctcccttttctctcctggcgattgcgatattggagttttaggacacagccagagcacttgtcatttgttcctgttggacaccatttttaggattatcccaagagctctggctgtttctgctcttcctcccaacatgtgcttatccacaaatctgagcactggacctctgcaacttcatccaagtcacccataaacctatggatcacagcagaccaaggaaagggcgtgacctacacccttaacagacagacacataaccgagttttgagcttcccagccagatgtatctttagttcacatttctctggctgggcttagctgggccctcccaagtttcctacacatagatttggggtggcggccctgggcacctcaggaaggtgaagccacttgggatcgggctgtgtatgctcagcacccagcatggtgcctggtactcagtgggtacccagagaaggcttgttgaatggagcaatgggtgacttgttattagggaacccattttggtccattctgattacttcctcttctcacctccaatagggaattttccaatcagtccctgaccctttgctcctttcacatttattgtatctacctccatgatcttttttttttttttttttgagatggagtcttgcactgttgcccaggctggagtgcaatggcaggatctcggcttactgcaacctctgcctcctgggttcaagcgattttcctgcctcagcctccggagtagctgggattataggcgcctgccaccacgcccagctaattttttgtatttatagtagagatggggtttcactatg

SEQ ID NO: 6328 - DNA, 1159 bp, Homo sapiens
ggcaagaaaggtgcaagaaagtgagcagtctgcctgtgagtgagcacagatgccggggtgtgtgtgtgtgtgtgtgattttcactgtggggtgtgtctgtgagagctagctgccttacccctccttggcacatagtaggccttccataaatgttggatggatggataaatagattgggaccatcagaccatgggaccatcagaccatgaccactgtaggagtgatgacagctcagcgtccccactcagtgtatctgaccatgtgtgtaagtgcacaaaaatgtggttgtagatgttgctctacattcaaaccttccaggctacactcttccatcagcatgagtcctggagagctgggggaacgtaggaagaggagccttgccttgagttcctaaaccgacccactgcagacacaggctctgattctcttacccagagatgcccatgagctgacattttactcatccctctgcctccaagaaggcctgtattatacgtgtcctcctgggggttggagatgatccctcaagtacacaaaggtcccctggcccttcatctgggaatcatatactccactctagctcccagaatctacagacctggctcctcggatctgaagcccagcacaaaataatctccccgtccaaggagcttgtggaacttgaattgggaactttggagtcttgtctcccatcccagcacattgaggatgtagttggtgaatggactcttccaggcatggagatcctccatcctaaaagtacctgcctccttcccagccatccctgacacattccagccagttggatctcacagcacagctatccacagggagactgggatgttcacgcagcactccattactcagtacctccatacccagccctatacgcagacccacaggtggggaaactgaggcaggaacagggttctgccctcccagagcctccactctgggatgccagaatggaaagccagagggaacctgagaatcatccagtcttactgtctcaatgtacatacggggaaactgaagccaggagaagaagagggagaaactgtccagggcctcacagggaggcattcatggagctggagaaaccagggatcctgaccgcagggcccatcaattgctacatagagatacacatggaaagagg

SEQ ID NO: 6329 - DNA, 1122 bp, Homo sapiens
gactccaggtatcgatgcctaaaaccctgggtgactgccacacagagaagagggcataagccaccaagatctctgccttgagcatgggggactatgcagaagcggggcctttttcatgggtcccaatatctgtgagggtcgctgcagtgcactgcaaagagggtctgaatccagtctccattctgcactgattaatacttatgtggccttgggctagcagcttcacctttataagcacttctgttttatcatatctaaagtgacaatcagacacatcaggcgaattgttctaaggattagaggcaaaaggtgtgaagggcccagcacaaggccttgctcataaatggaaggttcttcgtgttgttgaatatttgaaggaatgagggctgtctgaactaactcttgcagaattcataatttccaggattgggggtctgaggacttctgtgtgaatgttgaaaagaggagggacatggggtggggctagagagggaggtcaggataagatcatgaaaggccttgagcagcgtcctgctggaaagttaggacttaatcctgaaggcccagggattttttaaatggacccagttgttgaactctccttggagttgtatacaagagtgtgatgtgagcatctctgcaattgcacatatttctggggagagtttaggtcgtaacttttatcatagtctaaaaagggttggtcagtgacccccacaagtttgcaaagccctgctttaggtaatgggaaaatgtggaagatgatgtatattccagcaggggagagccacagtcagatttgtgcttcattagaaagaaaagtatggccaggcacagtggctcatgcctgtaatcccagcatttaggaggacgaggcaggtggatcacctgaggtcaggagttcaagaccagcctgaccaacatggagaaaccctgtctctactaaaaatacaaaattagctgggcatgatggcacatgtctgtaatcccagctacttgggaggctgaggcaggagaataccttgaacctgggaggtggaggttgcagtgagccgagatcatgccattgcacttgcctgggcaagagtgaaactccgtctcaaaaaggaaagaaaaaaagaa

SEQ ID NO: 6330 - DNA, 1133 bp, Homo sapiens
aattgcttaaactatctaattttggggttttttttccatctaaaatagggataataatatctacctcataggattattgtgagaattaaattaacttcactatagtagaaaatatcaactaccatccttttctctacttcccttgcccctcattaaagactaatacaagttagcatttcagatgtgtagatcattctttattccagttaaaagaacaaactttatctcatcagttctgaaactttaagatgcagtagcatcacctaaagtgcttttaaaatgcagattctcaggcctcaaccgtacaccacccccccacacacgtactaaatcaagaatatgtgcagaaggtactgggaatctacttgttaatatgtgctccaaatgattctgatgtaggtaattagccagccacactttgagaaccactgccttatctattctttacaaaaatgtacattgccaggtctttctttcctgtggatgctaactataggatatttaggttcctctgttctttgtctcccatagtggccccctttgcaaactccaaatacattatatttatttattcttgtgtcttttttcccccactagactgtgagctccttgagggccaggacttatctctgttcgcagtgccaaggacatggcctggaccatagaagatactcagttttttgttgaataaataggtaatatggatttcaaccaaaacattgtcttgtgtatgtacctgcatgtaaatactctagatttaaaagaatctcttaatacacatagatcgagaatttgttgagtagaaatatttgcaaaccaagataccaagttatacacagttctctgtacctcacctaatccactggcattaccttggtggaccattacacagtacaacttaacagctgctcacagagcatctattctgcagccactatgttaagtgctggacacagaaagatgagtagagtatgattcctgctcgcaggctctgttttagccactgcctgtttctctcttgcctctgattcagtgcctcacacctacacctgattatagtttgctttgtctagttcttggatgttcatactggtacttctttcttctccaaccagtttggaagctggagccac

SEQ ID NO: 6331 - DNA, 2957 bp, Homo sapiens
gagatggaagatactcattcctggagctaagggtagctttaggtatctagcttcatcaggcatattttagaaatggactgcctaatatctatttacctaacaacaaaacaacccttacttacccatcagtcctctagtcctccaaactactgtagcagatactttgccaccttttaacttgtttgaagaagctatataaaagttatttttttaaagaagaagaccattttacttatgatgttcagaaatctatgatttcctacaaccagtaagatcttacattttaaaattgccagaaaaaaaattaaagccctctttttttctctttcctttttttgaggggaggagaccttatcttttaaagctgggaaatgtatatagagagagaataagccacttttatatttcacttaaatttgccttaaattagctgcactttatagagactcagaaaatgtcttttctttaaaagataggccttttctgtttgtaaatatttaaatgaaagaaagcattgtgcatattgtgtggaaagtaggaagaatggttttgaacaggatatgaacaaatgacttattaaaaattgctgatctggtgtaggtggcagctgaaactacatccatgtctccataaggtatccctcaaaggcccaggcgctgccagggggtttgtcctggtagctggaggaaccgatttcagggagtagacactggagacaatactgactccaggcatggctcatggaagtaggattctggttctttgttcctattccctcagctaatcccaacctgggaatcagagaagtcttggggatttttctcatttttagtactatttcagggtttatgagcataaaaagttatccattggggagctccattttccctgctgagtgagctagattgccttccccacccacccacttaagtctgtcttaaagccgtagctggctcccaccaccagtaccatctccatttgaatggcagggctaaattcccccagccattatctcacactgaccacccagagctttagaagagagctgtgcttctaattttgacccagaaaaccataccccttgagattttacctagaggctaaccaagagcctaatatgtttctctgggggatgactaaagccaaaaaggctgtgagatgaaacatgtgaaataatattcagtttccttaccattaccagctcagaagtagctagaggctttctacccaaaggatgccaaagtatagcagggcaggcctggagctagggccttcacatggtggtagcaagtttttcaaatctaatacaatcaagtacaatacttcctttaaatgcttctgtggacctggcatgaaagatccctagattgaaaggaataatacctccatgtctcctgtatgttgagtctagaattgctgtgttgttcttagaagcagtctttgggcaacaacttgaaaggggaaaaaaaaactacaaaaacttaactttggtataggccaagtcagggagaaagtagagaaagctgtcatgccacagacttctttagtggagatcatttcctttttaactttgttcaggttgcccttcaccatggatacagtccggtacccttaaacatttaagggctgttttttttttctttacatgatgttcagcttggtattaaccaaacttaaattttttttccagaagtattaaaatttagttaaagcaagatgaagtcttttcccatgaatgtgtccccttatctcattatagcttatgctcagtttcactttcttggaaaggttaaaacaaattagcctggcactttaggtaacttgaaaataactctcacccttctgactgccttccatccactctcaccccacacctttttttaatatatatacacccttacagattttctaacaaccaaataaaattctagcaataaattgaattatactgctatatttgtatatactgtaccataaatagtatgtctgtacctggaaggtatttttttgagaactgatttatatgaaatatacttgagggtaatgtagcttgtcctttttagtttcaaattcttattcataggcagatactttgaagacaccttaactctttgttgtgtgtattttcccttgcatcagataactatacatggagaaatccattttgttttttggtttatcttctgttcttcctaccttgtgcttgtctgactagtatcacccctgagccagtatacagtaccatcctctccccctaccaagtttggcagaggtgtttatactgcattctcagatctatgaatatttttgtcatcctgcctgagaaagtacatcttccaggcaaaagtagggtatcttgaactcctttcttctgagttgagcagactcactggcttaagcatcccataagcctattatttagtgtgaatttgggacttttatttgtatgttgtcttaacttactaagcctgtgacttgtatttagctgtagtcaagcctcaccagccatatctcatctctgagaggaagactggatagtgagtttggttttggttttggttttaaacccttttaccttttcagtctggcagctcctactgctgctttcctaagttactcaaagcactgcttcttggtccttgttttcttttgccttgtactatcttgtataatgtttactaaaagagcctccccataaatcagagaggcaaaaaggtagcatataaaaagaagaaccaaaagaagagaaaacctgacttctagatgactgtggtgtcatctaaaaggcagaggtgcctgaccctcaggaatgtgtatgatgcaacagagctgaagaatgggttcccttcacctactgctggccattgtcccttctgttggagattcctttctttatggttgctgttcataaccccttcaacacccccccttgctggtcctgccggtcacagttgagg

SEQ ID NO: 6332 - DNA, 1200 bp, Homo sapiens
aaatgcccaagccagtggttacatgactggctgcctttttaatgtcaaagctcttgagtccagtggaaacaatgacactgtcccaggttgagaccgagttggtccctggaaagttacagtgatgctatagtttctctgggagcacaggcaatggggcaaaggagaaatggtttctagagagttcattcctttaagagattgagaaatagactaggaggatctcagttccctaatgtaatcttggtgctgctggcctagtgcatgctcaagctgggttctctcagaacctagcacaagactggttagcctgtacattccctggcaatacttactgattaatctgtggatgcattctgggggaggctagaatgttctaggacaatctcagatagttaagtagacctaataattccttgttgcctacactaaacttctttcctcttaacagaatcagcacttcttgaaggagactcctggaagcaaccagatcattccgtcaccttcagccacatcagaacttgacaataaaacccacagtgagaatttgaaacaggtgctttttatctctggcttaactccctgtgaccacagtgcactgcagaggcagccaaatagtttgggcttagtgtttggtgtctcagcaggtgcatcctgtatttatttgcctgcctgggagctgagcagagaggaatgtgtgttggtatctcggggatccatattgctgtcctttcccttctttggcactttgcagtttttccctgcatgtcagtcagtggagtaaattccttttcttatcttgaaagacatagaatgagcagattatcctgaaactctttatgaaaaaatagctatctgggcaggttaaagatgaatggatagctaagtaatccagagtgatggctattttgagccacagtaaattctaagaatgttagaaagcatatccttgaaaatcaggattttctaaagtctaaagacgaaaaggcaagagggggaaaaaagactttgagttcagaatcacattaaagagaatagaggaaatcttcactcagaagaattcctgtcctgagtttaatgccctttaaaacctatagttatcattctttttaaagtagcaatcagtactggaggatgtcagtaaaaataattgaatcttatactaaacaatgcactacttgttatggtattgttacatgagcc

SEQ ID NO: 6333 - DNA, 1471 bp, Homo sapiens
agatgtgagccaccgcgccccgccaaatttgattatttttaataagaacttagctgtatggtattttaacagtacctgcttttaaaattattatcatctttttcctttacaggtttttgatgaagttgtgcagatttttgacaaggaaggctaattctaaacctgaaggcatccttgaaatcatgcttgaatattgctttgatagctgctatcatgacccctttttaaggcaattctaatctttcataactacatctcaattagtggctggaaagtacatggtaaaacaaagtaaatttttttatgttcttttttttggtcacaggagtagacagtgaattcaggtttaacttcaccttagttatggtgctcaccaaacgaagggtatcagctattttttttaaaattcaaaaagaatatcccttttatagtttgtgccttctgtgagcaaaactttttagtacgcgtatatatccctctagtaatcacaacattttaggatttagggatacccgcttcctctttttcttgcaagttttaaatttccaaccttaagtgaatttgtggaccaaatttcaaaggaactttttgtgtagtcagttcttgcacaatgtgtttggtaaacaaactcaaaatggattcttaggagcattttagtgtttattaaataactgaccatttgctgtagaaagatgagaaaacttaagctttgttttactacaacttgtacaaagttgtatgacagggcatattctttgcttccaagatttgggttgggggcactaggggttcagagcctggcagaattgtcagctttagtctgacataatctaagggtatggggcaaggatcacatctaatgcttgtgttccttatactctattatatagtgttattcatgattcagctgatcttaacaaaattcgtagcagtggaaccttgaaatgcatgtggctagatttatgctaaaatgattctcagttagcattttagtaacacttcaaaggtttttttttgtttgttttctagacttaataaaagcttaggattaattagaagaagcaatctagttaaatttcccatttgtattttattttcttgaatacttttttcatagttatttgtttaaaaagatttaaaaatcattgcactttggtcagaaaaataataaatatatcttataaatgtttgattcccttccttgctatttttattcagtagatttttgtttggcatcatgttgaagcaccgaaagataaatgatttttaaaaggctatagagtccaaaggaatattcttttacaccaattcttcctttaaaaatctctgaggaatttgttttcgccttacttttttttcttctgtcacaatgctaagtggtatccgaggttcttaatatgagatttaaaatcttaaaatgtttcttattttcagcacttacatcatttggtacacagggtcaaatagggca

SEQ ID NO: 6334 - DNA, 1181 bp, Homo sapiens
ctggctctgcaatgatcaagttctatgaacattgttatttttccagaaattcatctgagcagccaaaaaaaatcaccccgctggctgtctaaaccagtaaggttcaggaataagtccagcctccccactccacccacaaccaccaccacccctcacagcgcccccttcaatgacccagctgggcttgactgctgcctttgggtgggggaacttctgaaaggtggaggaggagtgaactggaacccaggcctgcagcccagcccagagctccttcccgctctgccccactccctgaccccaggggaggaaagggttcacgagaactgattgaccccctacttggctctttccagggagcatcggctatcctcaccctttctccaagtgggagctgggctcttcctttccggagatactctggatactccttcactttgctggatgaccttgggcaagttcctgtccctctctgagccttcacttcctcatctgtcaaatgaagaccttgattcctgcctgggcagttctagggctggagggcaggggtgacatggacaatcttgggcctccatggagatgaggtgcttggctttcttcccaggacccacaggctgccatgggattgaaagcatgtggaggtgggaaaggtgacagagtagcatgcctccaaggcccccttcatcccagtcctgctgtggggaaagtgggctttgaacgggatccaagtctaagatgtttccggtgagctgccagggacaaagggctctcagacatcttgggtccccagtggctggggtgggcaggggctgattcagccaaaggaggctctagcccagaacagaggaagccagagcccctgccccattcttgagcctcacagagcttgtccccgagttgattcactgtgcaacacaggcttcagattcatgtatttgaaaggtattcatgatgttgttctcttatcacctctgcccctcacctctgtgaattatcatgaagagtcctttaagagtataaatagaagacaaagaaagatgctattaatgttattttgccaaaaatatttttgtagcataatatattaataaaagatattatgaattcaatggcttagtgtttctgtgtgacagctcctctcttcctgccagggaacgttcaggaaaattgcctttgctgtgagg

SEQ ID NO: 6335 - DNA, 1149 bp, Homo sapiens
ggttaatttattataagttgtaacacttggctagttttgtttgtatatgtcttaaaatgttttcttatgatatttaagtgacagttaaagaggtatcaaggtaacttgtgtagaactattctttgatatattgtcatgtttgttgtgaatattttttcttactgcacagtagaaaaataaaaacaactgagtctttattttaatgtaactcagattggggaaaacaaaacagagctaagggaacaaaatgactgagggagcactctcccacgtccagtgcactgatcattttagtatgtttgtgctttgtacggttatatatttaaaacgaaaacaaaacaaaaaaatacaagggttcatgctcttccctgggtaatagaaacagttactcgctatgcataatctagttgatagttaaatttgctattgcttttcttgtcttgttatataaaatcttttcaatacaagtttagtcttaatggtaataaaacgttatggttatttataacttgtgcttattttgtgcattttttcccatgctgaacccactaagtgcatgtagacaggactgttgttttcacactgaaaaggcaaactttgtagtagtcgttgtagtggtagacagataacgaataccaaggctgcatcatagactcctcctttaaattttttttctgtttttttttcctcttttcggttttggatataacaccagatttcagttcagagaacactcgttcaacattcagggaaagctttttacgtcacctgctatgaatgaacgtagtttgctggcaaagttttgatgcatttgctaagcattagtgggaaaggcatgccaaaatcttctctataatgtgttcaatcttgggggaaaaaaaaaggaaaaaaaatcttaggaccaggcagttgtatactttagttattaatgaatgacttcatgttaatcttgctagtttagatgatttccaagggaaagtattgtaaatgtttttttttcataatcttgttgtgtttgaattatttgtactttatctgtccagacaataaatgaaagtgtgtagaatggatttgacttcccaaatttttaaatgtgtttatttaaactttttttctgtaccatcttcagatttccccaatatttttatc

SEQ ID NO: 6336 - DNA, 1146 bp, Homo sapiens
ctgcgacagcagcgcaggctcctgcggctccttagctgtgctcatccggctctcagtggatggcaggataatccgagagtcttttctgtgtctccccagccctcacttttaaaaaatttaaatattcgctctaacaaatataaatttaggatgtataaatctcttggcactgagtctttgggacacacatatatatcgatacaattgtaaaaaaaaaaaaaggaaacaagttttaaggtgcactttcctcgttgcggtatttgtcgctctctttgttgcttatgccgataagcatgggtttccttggtgcagtgtgtttttatatatgtataaatctatatataatctatacatatatatatacaagccagtgtataatgttataaaatggaattctaagttattaattgtaatctgtaggtgacctcggtattaacgtgaaaaacattcaaaacaagcaaaaaaagggacaaaatggaaaaaaattagactatgcgcgcattgtacttatcaggtttagagattaaatatattggaaactcgggatgaatcctgcccacctgcccctcttgcctgcggctggtctgtccctaaggagccgtcaaggtgcgcactgaagcaggaacagagcgacgtgtgactgagccagaaccgcccgctcgcgggcccatcctcgcctcccgggactcgccaaacgccctgactgaagggcccgcagcggaaaacgctgctgcagagcagcactttgtgctttcctttgcatagatatgagctagaaataaatgttattttctaagaaaacaatgccgaatcccgtcccgctcctcgagaaatagggggtgggggtggggcgctggggaaggtcgtgatttcccactcaggccgcggcgctaaggagacgcttgtccgaggtcccgtgggatctccgaccctcggggctactgggagaggagacttcctgtggtactcggaagacctatcccaccagagtggcgcggggctcacaactcccgaaggacccgcgaccgctgagcagagggaacacagtgtgtaccccagcttgggcacccttgcggaggggtcaccttgccccggctcttagtttttggatcgtcggccccagtcttcacagggatcttgcaaggc

SEQ ID NO: 6337 - DNA, 1142 bp, Homo sapiens
tcccagcactttgggaggccgaggcaggtggatcacaaggtcaggagttcaagaccatcctggccaagatggtcaaaccctgtctctactaaaaatacaaaaaaaattagccaggtgtggtggcgggagcttgtaatcacagctactcaggaggctgaggcagaaaattgcttgaacccgggaggcgggggtttcagtgagccgagatcacaacactgcactccagcctgggtgacagagagagactctgtctcaaaaaaaaagactaagaaaagaatcctatgctgtcagccccagacagcatttagggtatgcttcctgcttttctatatgataatcacttctgtattatgtcagatatgtttgaaaactcaatatagcaagattttacatattgatatcaggcaggctgtctaatttaacataactaataacacaatgagttctttgttgaagtactagtaaatctattaaactacaaagcaaaacttactttgtattttgtctccttttagatttctcactatgtgcaatagacactttggcagtgttgtggcacaaaccattcggactcaaaaaacggatcagtttccgcttttcctgattattatgggaaagcgatcatctaatgaagtgttgaatgtgatacaaggtaaagtacatgtcacaaggagagtaaagccttcctggtatgtgataactttatagtttttccacccaagctgacaatatttctattagtaaatatctttgcatttgaaaatatagaatatcctgaaaaatgtcttcaaaaaatataggtgctataaaaaataatatgctgcatgaaaatctaaaagaaacatcttaataaaattgcacaacccttggggcacaggatgttcaagttaaatgttcagaattgctaaattgtataatctatcaattaggacataatcagttgtcaagtgtgacatttctatttatattgatttattgttataatgttgattaattggaagaagtacttatctttagttatctagaaaatccagtcactgtatattgaagattgaatttttcacagtgacaattgtttcttcttatttgtatgattccatgtttagggtgcaaccctgaagcatgaagctgtgggatgcctg

SEQ ID NO: 6338 - DNA, 1194 bp, Homo sapiens
tgatctcctagcttgtaagcaaactgagatgcactatcccttttctataaaaaataagttaatgtgtcaagaaaccaactctattaaggtggggtttaatattaccctttcctatgtgttttatctaattattttggttgttaatatggtgataatggaaagtcaagttaaattttaaatattaagaattctgatttattgagattgaattatgccaccacgtttatgtaaaaatgaaggtggcaccgtggtgagacctaatgagaaatagttactcagttgtaaaaattttgatttattctctttcttctgacctccttgcctcttgtcttgaaccatagcaaaaggatactgcatctctcattactgtagtgctgaggttattgaagttatacaaaacacatctcagtctctgtttcttggaaaggtatctattacatcctgctagctgactgacaaaactaagcagggagaataaagataattgtattttatgttttgcacacaaacgcagaatttgtataaccatatgacttcatagttgtgatctcaaaaaagaaggaatttctcctttgtttcttgcagttaatgtaagaatactttaaatctctaagcttctgaagtgttagaggtagagatggtctagtaaagatgtagtagtaatgttttatccatttagcatgtgtttattttttcatatgtactcaaaggtgacttattggttcacctcagtgatattacagctaaaaaaatcattcattagcaaaaggaaaagtggtctcaacctaacatcagaagtgtttcttattattattttatattgagttgaatattgaactctaacagttttctacatacaaaacacagtgtcatgaaggttattcataattgcattatagaggaatgtagtatgtcataagtactttgtaaagatttgacattcaactgtagtatccatatgttgcttaaatttccttatgagccccatgatggaaagacttaaagatgaatttgagaaaaattgaaagaaattagattatcaggttctgttaaattgttacatgtatcttgcttaaatttctgtttattaatttatatccacccaagtacataaagcaaatttggaggaaacaactgaagttgtgcaatattttctgataattgctttttttattcttgtgttttctacttaaa

SEQ ID NO: 6339 - DNA, 2385 bp, Homo sapiens
tgttcatcgatcttttaaatggcagtatccctctgaagaagatatgatcgaatgggccaagagggaaagtgagagagaggaagagcagaggcttgcccgactaaatcagcaggaacaagaagacttagaactggctattgcactcagcaaatctgagatatcagaagcatgaagaattctcttgttctttggcaacaatatagtattcttcttcctgaatactgaaactatttacaatgtgtatcaaaactacctgtgagcatgggaatacaaaaggtttgagattcctgtaaatgtgacaaaattttaggattttttttttttcttcattacagattcgtctttttttttttttcttataaaagccgtaacccagtcagacaaattcaccttcacttaggcccctgttctggtatacatttactgtgagcttttgcctgcctgtgctattttacttgtaaagctagagcacccaagcttctgccttctggaatatagagaaatagtttcaccctgcactaccctgttctgtagttattctgatgatagccagtgaggttcttaaagtttgcagtattctcccctgattggaatggttgagtgagggtaagggaaagaatatcttatttcttttatgattggtgcaaattggctaaagtgcatttttaaatttcctctacttaatttgtttttcagagataaggaaaaatattttgcacagatttactccactatggaaaagggatgctgtaggttgaaccattatagcctcagattcgatcttttcctaactaaaaatattaaagcctcatgtgtgaaataaatttttaaaaagatttatctggatttagagaattttagatcaacagatacctctcagtgtgtttgctaattaataaaaatcagtttcttacaaataaagtttgtaagaaaatgttcattttaagtgatagatagtggagaaaatttatcacctaaaatatacccatcagtataaggcaagcaaaagtcttaacatggcagccattctgcctttgccgtggccctgtcctgtttagttcttagtgggttaatttttgtacttttgcagaagaaacttcagcaagctagaactggaaggtactttaatttttcatatatatttgtttttttttttttaatgaaggctcatttacttgaaatgtaaaaactttcactgaatacaaatagaaaaagtgatgtgttttatatcatattgctttttgtccatctttgtggtttagtttatttactcacttcatgtttttcacctataaaattgtcaagctagcaaaaaaactcttgtttttttaattgggagagaagagacctgccagattatcagacctcttcatgttaaaagaccatctcctgtaaaactgacctagtggacaagctgaatttgaaatagactgtgaagtaagctgtaacttgtcattttaattttgtttaacacggttactgacttagatgatgtattaaataccaagataaagaaaaatgcacctaaaatctaattagaattctctgggtcaacaagtcaaggtggtattgatctgtgttaatctgagtaacttattgcctagcctataaataaattccaaaatatccaattcatttcttcttgaaatggtgcttgttttgttttctttccattacacaattagactcctacagtttaaaacaaactttaaaccactatcttgcactgctaacttttttctacctttgtaaatagaaacatttctgcataaaagtcatacatatgaagcaagggctgaatcataatcacaaggcttaattttgataaacgaatccagtgacctaaggattttctgcaaaatttgactgggagttgtgataggtggtatttttgtttattttcttcctcttactccttaggataaaggtaagttgacttgaacaactttcttttgcactgggaaaataagcaaatgtttaaatgcttcaaaaaaattttcaattaaactcaaatattaaatatctataacttataaacaccaactttcaatgtaataaatgtatcctaatcttatgtatgtttaactggattacatagatttttatcttttgttaaaatgtgtataccccgtggaccaacataatattaaagtatgtatatattatataaatatatatgtatatgtgctcgcttgtgtaggatgaatgtcttagagtcgtttgtggtattttatgttgttgactctggctccagggcctgtgcttgaaaaggacagataagtattgcccagagctaagtggcactacttacaaagttttaaatgtcttctacatactgattcatgtttatttgagctctctttatagaattttctcttaaagttt

SEQ ID NO: 6340 - DNA, 1585 bp, Homo sapiens
tgacttcgtagttgataaagcacttttattatccattctcccatttaacttttataatactgtgtgaagtgagttacattatttcattttataaatgaggaaacaaattcaaagagataaatgacttgccagggccaaaatccagagctagatcttgagtccagatcttgtactcctctcatatttcttctgaaacatttaaaagtgtacattggttgtcaaatgtcaaacattacttacttcatacttttttcctccaatctttatttcacagttgttcaggggatgaaggaagctcaggaaaggctgacgggtgatgccttcagaaagaaacatcttgaagatgaattgtaacatgaatgtgccccttctttcatcagagttagtgttctggaaggaaagcagcagggaagggaatattgaggaatcatctagaacaattaagccgaccaggaaacctcattcctacctacactggaaggagcgctctcactgtggaagagttctgctaacagaagctggtctgcatgtttgtggatccagcggagagtggcagactttcttctccttttccctctcacctaaatgtcaacttgtcattgaatgtaaagaatgaaaccttctgacacaaaacttgagccacttggatgtttactcctcgcacttaagtatttgagtcttttcccatttcctcccactttactcaccttagtggtgaaaggagactagtagcatcttttctacaacgttaaaattgcagaagtagcttatcattaaaaaacaacaacaacaacaataacaataaatcctaagtgtaaatcagttattctaccccctaccaaggatatcagcctgttttttcccttttttctcctgggaataattgtgggcttcttcccaaatttctacagcctctttcctcttctcatgcttgagcttccctgtttgcacgcatgcgtgtgcaggactggctgtgtgcttggactcggctccaggtggaagcatgctttcccttgttactgttggagaaactcaaaccttcaagccctaggtgtagccattttgtcaagtcatcaactgtatttttgtactggcattaacaaaaaaagagataaaatattgtaccattaaactttaataaaactttaaaaggaaatgtgctgtgatggcctttttgttattggaaaaggagggagggatggagatcacttcaggaagaaaactaacctagaggacctaatctaggagtcctaacctaggactcctgctccttcacctcccacattcaaatgagcacaatggctcctctcttttactttttaaatacctgaatttcctctgtccacactatcactgttttagcacggggcaggctttttctctcttcgactatttattgctatagccccttaacttgcctattggctctaatattccctcctcctgcaatcgatccatatcactcccctgtttaaaacctttcctggctggacacagtggctcacgcctgtactcccagcactttgggaggccaaggtgggcgaatcacctgaggtagggagttcgagaccagcctggccaacat

SEQ ID NO: 6341 - DNA, 1190 bp, Homo sapiens
gagaaggatgttctccatatagagtttagcgagtgcctaatccctccttttgtaagattttgttccctcagcttgaggaacaacttcatcttcaactttttatttctccctgatgttacagtttggtagatttcaaactggaatagctagcatgtgcttgctaaataattttatgccagccttatcctgtatcctagctgttcttaacagcaggtacaaaaatgcctgtttttcagcaaggttgaaattgggaatgtccttttgaatcagaagaaaataggccatagactcatctcccagcacaaatgggcattctatgaaatggtactggccctaggaggatttcctcaaccactctcctactcttggccttgaacctacctctgggttggatcttactattgtagctgctcactataccctcctgcatgcttagaataatgctttgaggggagcactggtaaaacacagtatttatttttttacctcctttaagaggacttggaggtaagttgcattcattcactcaagtttccctcttgctgtctaatagaagcttactttttgctatatcagcatttgttacagccaatatttaaggacaaaatttagaaaatatatcatttcctggcccatcatcaaactaatacagcttaaccttgcagctaccaacttttgtgtcaagctagatatctttatttgatatctaaggtgcaagaccaacaatatattaagagatctgtagacatgaaggcaaagctcttgtattttttttcatccaaacacctcaatttattttataaattcgttcatttttcctgttatgttttatataatatatggactaaacaaaataaaataacagtgcaaaagaggagaatatttcctcttgtgcttttcttgatgttgtgtacagaatttccttttatattattcctctaccctccacctgtaaatgaatgttagtgcagtaattgtttgaaataatgcctcatccagtgttaggtcagtagctccacagtctacacagtccagaattctttctctaattgtcccaaagggggacattgtggaggcagagttagggggaaccacttcaagtggttagggacagataaataataggcagtatagcacatgaaagaaaacacacacttggaagccaggagacttgtgtcctagtcaaaact

SEQ ID NO: 6342 - DNA, 1184 bp, Homo sapiens
ccccgaattagaaatctaatatccttggaatatttaattttcaaacgatagttagaaatgttattaacttagtcataagcttttccagtgttacaagcaaacttattgtaattacttatttttttccagatgaaacagtttcttctactttattggatacaaagtggaataagattctagatcccccttctcaccggctgtcatttaaccctactttggccagtgtgaatgaatctgcagtttctaatgagtcacaaccacaactgaaagtcttctccctggctcattcagctcccctgaccacagaggaagaggatcactgtgctaatggacaggactgtaatctaaatccagagattgccacaatgtggattgatgaaaatgctgttgcagaagaccagttaattaagagaaactatagttgggatgatcaatgcagtgctgttgaagtgggagagaagaaatgtggaaacctggcttgtctgccagatgagaagaatgttcttgttgtagccgtcatgcataactgtgataaaaggacattacaaaacgatttacaggattgtaataattataatagtcaatcccttatggatgcttttagctgttcactggataatgaaaacagacaaactgatcaatttagttttagtataaatgagtccactgaaaaagatatgaattcagagaaacaaatggatccattgaatagaccgaaaacagaggggagatctgttaaccatctgtgtcctacttcatctgatagtctagccagtgtctgttccccttcacaattaaaggatgacggaagtataggtagagacccctccatgtctgcgattacaagtttaacggttgattcagtaatctcatcccagggaacagatggatgtcctgctgttaaaaagcaagagaactatataccagatgaggacctcactggcaaaatcagctctcctaggacagatctagggagtccaaattccttttcccacatgagtgaggggattttgatgaaaaaagagccagcagaggagagcaccactgaagaatccctccggtctggtttacctttgcttctcaaaccagacatgcctaatgggtctggaaggaataatgactgtgaacggtgttcagattgccttgtgcctaatgaagttagggctgatgaaaatgaaggttat

SEQ ID NO: 6343 - DNA, 1148 bp, Homo sapiens
ttctttttttttttttttgagacggagtctcactctttcgcctaggctggagtgcagtggctcgatctcggctcactgcaagctccacctcccgggttcacgccattctcctgcctcagcctcccgagtagctgggactacaggcgcccgccactgcacccagctaatttttttgtatttttagtagagacggggtttcaccgtgttagccaggatggtcttgatctcctgacctcatgatccacccgcctcggcctcccaaagtgctgggattacaggcgtgagccacctcggccgtcctcaatcatttttccaagtgtttagaaaagagccagaggcattggcatgttttattttctacaataggtttttggctcaatgcagtgacagttcacagttgaattatacagactcagtgtgatctattttaatctttgctgtattgtaacacagatttctgtgcatctttttttaagagtaaggattgataggaatgtctttatttttgtgtttttattccatctgtagatgtgaacaggaagtgctggtgtttcacaaccaagggaatgcatgcagtgggtcagtctgagatagtcattcttctacagtgtttaccggatgaaaagtgtttgccaaaggatatctttaatcactttgtgcagctttatcgggatgctctggcaggtaggaatgctttatgacttagtctgctccctttgtagatgacaaaaaaattttgaattcaaatacaaaataatagtcttaactttggacttaagcatggcaggggactttgatattagtggcaagttgaagctttccatggtttgaagaaattataaattttagtattgtacctggtatagtttttattttacagaggctggaatcaaagctgtaagagaatctggtgacctaaatgtaagaatattttctttttagtggcctggggtcaggatattggtacctggtagaaggaagcatatttgtaacttacttcttgtttctttggttaacaatatttatttaatcatagtgtaaatgctaatgaatattcaaatttcaaaaacaattagcatacatgactatggcttcaaaataaattgtaaatattaactgtaacaacttaaaagtaaaagcatagaggt

SEQ ID NO: 6344 - DNA, 1649 bp, Homo sapiens
ttctgatgttcctcagtagaactgggaagagaaggtaaccttccaaggtttaactatctatctatctatctatcttcaggaaaccctttctaaaatctttgtgttttcactgcagtttagactgacttcttgtgctttgcacccctgtgtagccgatggccagcaccaggagaggagtcaggccgcgactgtgcaggagatgactttcccagctttgctggcttcagaagcctttgtacataagagatgctgctacccaagcaccaaagacctgttaagcatgtgcactactgaccacgactctggtctttcctgttgttggcccctctggggctctacagaaacaggctgggttccaggagcccatctccccgctgtctccccctgccccgagtctggaagagggcaaggacacttccattcctctgtaccatggagtcctgcagccccttaacccctgcgtggcaactgtgtacagcttacccctgcctccagttgcaccacttctagatgtgcctttaaaagatctaactatgggatgggagaacttgagggtgatcgggaacctcccctgctgagggtggtgtcagggttccgtgactccagtgggccagtggtagcctgtcccagacaactccgtcaccccagctctgcctgtgcctttatccctgacagctgctgcactagccttcctgcttccctaaggacttagtggagggggaaagttgtttttggtactacttggtgggaagtaaggggaaggttggatcttgggtttggtctacccacccaagagaaaagactgttaactggaagaaaaaatatatatataaaattttatgtagacacgtttatttatctaggaaactaagtctaactcattgtagggattttatactcaactatacagagtatccaccaaagtcctaatctaaagtcctgctccctgtcactttttaaaagccagggtagcagtaacatgacaaacggctgctgtggcttcctcttgagagaggacagggaaagcctttcctcttcggctggttatgtggggaacttccttagtttttttccacaagaaattctcctttggctttgtttttctgaatggatggagactatgaaggggtttgtagttgtaagagatttaatattcaaaactgaaatattctgcatttcttagaaataccccatcttcccccaccccctttttgaattattaattcaagatcaacaaagcattcctcaagatcacttttaaaaaaggttagaagtgaagcaaatacattcagcttactgatcactatagtattgcataagcacagctcaagaactgagctttgtatgtgtccttttgggggataacagggctggaccatgcttccctgcccttaaacgcagagcttttagtgggtcacagagcgggaactacacacaagtgacttttttccccatgagccctctggccgattttttttttttttttttttttgagacagagtagctctctgccagccaggctggagtgcagtggcatgatctcagctcgctgcaacccccacctcccaggttcaagcgattctcctgtgtcagtctcctgagtagctgggattacaggcacccaccactatgcccagctaattttttta

SEQ ID NO: 6345 - DNA, 1303 bp, Homo sapiens
ggttttttccctttgattcctcctctccatctttcgtgtcctctccttttttcacatacaggtatttccttcccttcttcatttttctccccaccctctcaaatgttttgcagcatgctttatcacctcctattatataaatagaaaaaaagaaagctaactacaagttaattctaaggtgttgtcagataaacaggcacaagcctttcagtttcctgtctgtgttgtatccaacagacagatgtgccacccgtcggtgtagagagcgttgtccccacccaccaagaggaaacgtgtcggagtaatgcgagtccattttctttcagctggtctaccgatgcacagcaaccagccaatcctgctgtctcaagggtatccgtacctcaatgtcagttacattcagcagaaaaagtgacatttaatggaaagcaaaacaaatcaggtcctgatttaaaattttaacacgtttagatagcttatttaaattctaagactgtttttacagactgtattatttgtatataaatatgaactatagtttttactagtatcaccaaattgagtgatacaaatttcatctattttattaccctatttttaagggaattttatgttttgtttaaccttgatgaattgtataaagagagaatttaaaaaattacattctttattttctattagctgtattcatactttggttgcttcagactttatatattgttcttaaaagttaggaaagaatttcatgtgttttaaattgtcacttctattctttacagaaccttgtagtgccaaaaactttttaaaaggtaaaaaaataaaataaaattacaacatgaagattcagattttttttcttttccatacttgtatattgaacattcaaacttgaatggaaagttgattttgtctgtatttgaagtacttctattttaagttaataaatctttttgacaagagttaaatttggttaaactgttgtatagatgatggaaatattacgtaacaagatttcttttaatttcagtgaatagagcattctaaatcacagattttagttttagagattcaagtaacatttcatatcctttatttggttggatgttcacaacacccatatgaggttgatagaagcggaagccatttccattttatctttgaaaataaaaactgaaatgcaaagcagtcagtaaattccaaaaagcaaacaatgctggagtctgaattgaaaagtatttggaaagagaattttaaaacactgagactaatattggcaattagagtggagggaagattacttttt

SEQ ID NO: 6346 - DNA, 1125 bp, Homo sapiens
agcctcccaaagtgttgggattacaggcatgagtcactgcacctagcctacaggcaattttgtacagagaataattcctttccagaagtagcccgatatagcagaaagcatgagttttgttgtgagacagacttagctctacatcttttatgtgagacttaacctgttttttctatgggcaaatgacctgaactcctgaatcagtttccccatctgtaaagtgaggatgaaaatagtatctactttattgagatttttcttattcatctgtagcatctttgtgtaatgtcatatggatgtaacttggttagtactattagcaactgtgatgatgatgattgtgaatcttattttcatatcttgggttttcttacagtgaaatatttgttgctgttattttctttgtaaaaataaaccatgtttgcatcttggtcttctttccatttggattcaaaagttttatagtgattcctcctagtaaaattgcattttctccctaggagtacttctttgattccagagtattaacagatggagaactggctcccaatgatagatgttgccgtgtgtgtggaaaaataggccactacatgaaagactgccctaaaaggaaaaggttggcaaatgaatatatatcaacattttgaggaaaataaatgagaggccaatttgtagctataattatgttcagaaatgtttaactgagaaagtttagggtatttaattatacctaaggtaaatgttcatttgagtggaattttgtaatagggtaagatttgcatgtggtataatagtatcttctaacattcatttgttcatttattcattaattcactcagtttttttttgtttttgtttttgtttttatttttgttttttttgagacggcatctcgccctgtcgcccaggctggagtgcaatggtgtgatctcggctcactgcatcctccgcctcccagtttcaagtgattctcctgcctcagcctcccaagtagctgggattacaggcgcacaccacaatgcccagctaattttttgtatctttagtagagatggagtttcaccaacattggccaggctggtctcgaacgcctgacctcgtgatctgcctgccttggcctcccaa

SEQ ID NO: 6347 - DNA, 1102 bp, Homo sapiens
agtagataacatcaaatgtatcatttggagtttaatgctcttaaaagacatccttttccagctttggtctttcagatacgttttattcattaacttcttggcatcaaattataccatcatcctgacatgttctttttggaagaagtattttagtatgtcttataggtaaattctaaaatggtattagagtatttggacctttgggttggatcacttgaaatctaataatacaattaatttttttatgcagatctttgatggaaaacagattccacagagaatggttgatggatggaatgctttcttctttgataaaacagaagaactggtaattttaaaatagtctttatgttctagaatgctcactgatatatgttagcatctgtataatttaataattttacttaaatttgctgtccatgttttggatagtactgtatagacattgttcttttctttttttttttatatgtagaaaaagcgtttaccttcacttggaaagaacacagaatcattaggggagctttggctgggactgcttcgtttctatactgaagagtttgatttcaaggaatatgtaattagcattcggcagaaaaagctgttgacaacttttgagaagcagtggacttccaagtgcattgcaattgaaggtaacatttaagctgatattaattcaggagcaaccaaaatttggtcaacgaaattgaggggaaaactgaaatacattaggatttggaagattcttcctcttttatcagttttcctcctttaatgtgtaattttagaggaagagtttgctgatttgtatagtctgagtacatataagtattagacttcagcggtgacttctaagtatatttttatggtacagtgaatgtaattcttaatcattgatatatttcttttgtagacccttttgacttgaatcataaccttggtgctggagtttccagaaaaagtaagttttaaatatagagattctctgattttaaaactctgacacattaatgtctgcatctttattgttttcttctttctttaatagtgaccaatttcatcatgaaagcatttatcaatggaaggaaactttttggtaccc

SEQ ID NO: 6348 - DNA, 1226 bp, Homo sapiens
ccacgagaccatcaggggacttcgttctttttttaatggttgcataccattccattatgtgaatagtcgttaattattttaaacctgcgcctgcactttattgatgaacctaaaactatttctgattttttgctattaaaatagtgctgcaattaaaaaaaccttcttagtcatttcacatatgttttggcatgtttgcagggtacattcttagaataggattgctggttcaaagaaaatgtgcttttgtaattgtgatattgtcaaatattcttcatagtgtttgtattaatttatactctcacctgcagtgtgtgagagtacctgtttccccacgtcatgtatagtagttttttgtttgtttgtttgtttgtaagatggggtctcactgcattacccaggctggtcttgacttcctgggctgaagcttttctttcacctcaacctcccagagtgttgggattatagacggtgcagtttgtttttaactcagtttaacccagttctgtgggttaaaaaaaatgatgtggcagaatgtttaatatacttctgcatggagtaagactctgaagttttgttttcaatcatgttgttttttagcgatgtgacattggggatgcttccaggggaagtttatcttcatatgcatatatccttatggtgctgtactttctgcagcagagaaagccacctgttatcccagttctacaagaggtaggtgtttaagaaaactataaaggagttttttttgaaaacaatagatctaaacacaggagattttgcttggttcatgtcatcatgaaggatttttccatcatggttgtcctaagttttctctttccattaatgctataattaaacaatgaatatttttgaaaaatttattatgggagaatatagactaccaaaagaatattagatgaatagaaccattgaatatcttttgtaatgtttttaaattttacagtcttagagtgctgtggatgattgtgaagttcttgtagccagccatgaactcatatattttatagtctccaagatgcaagtacataagtttcttctttctagaatattttccctcctgttgcctggcaatgaagattgatttattcttatgtatactttggtcaaccttgtgaattttggtttagaatgaacccagggaaactcttccttatctcttctgaagtcatattaattacattaaacataagaatgtacattga

SEQ ID NO: 6349 - DNA, 1173 bp, Homo sapiens
tatttggaaaaataagatgaatataaatgaaataactagaaaaccaaaaggacaaaataaattaggtaccagactgtggcacacagtttgaagaactaaagaagtgtggaactaaggagagatcattgaaggctgtggttaggcaaaacagtttatagggaagatagaaattttgaccaggcatttgagggaactgttaaatttgagtgggccagatgcctagtatagcaacatgaatacagatcttaacaaatgggaaaataagcatggatatgggggagagtgaagaagtaaataggtttgtagatatacggaaaatgatcatgtgaaatgtacatatatcttaaaaattatttttctgtttcatttattttcgtttcttcccctgggttgctaaaacagaaaaacagtttttttccttctatctcccagacccttccccagtaacatttatggttttaaagtcagagaagtcaacaaataatgaacaaactgtaagtaaaatttttagggtaaaaacttgaagatgttttcagattctgttttccttacttttctttttccttttttcttctttttataaacccagatgagttatcaccaccttgttctgaacaacacaacagggagcaaattttaattggcttggaaaagtttattcaaaaagaatatgatggtatgtcataggttaaaaaatttattgcgtttttgctgtagtcatgtagtcttgagtttcatttatttaaaaatatttattgaatgctatgtgttaagtactgttctagttgctgggaatacagtgctaataaaagagatgaaacctcatgaagcttatgtttcaaatggggagacaaatagttgactaataaatatataatattatatcagcaaataatacatgctgttaaaagtataggagataaaagaactgaagtgatggagtgttatgataggcctctctcataaggtagcatttgaggagaatcctgaataacatgaaggagcaagttatataaatatccaaggagaaaacattgttgatggaacaagaatagattatgtttggcatatttgaggaatagccaggaagtcagtgtggctggagtggagtattagaggtagattgtaatgtatagaagaggtcagagagggggtctagggattaagtcatta

SEQ ID NO: 6350 - DNA, 1134 bp, Homo sapiens
tctcaaagcgagaacaatctatgttttaaaaatgtccaccactcttctccatactagctgtatggtaatcctgtgttctcatctataaaatggatttctaatagtacctacctcatagggttatggtgaaggtcaagtcttcatagctcttaacaattgtttcttatctgtttcctccaccaaactacaagttcatgagcaacactgacagctctcagtgcataatgtggtgtattgttaataaatacatgttaaacaaatgatgcttctaaggctctgaccacagtgcactgcccaaggtaagcaccagagaagtcagctggggagtgtgatcctgttggggaagaagagagccacacaccctcagtttgctgttttccaggccctgaggaggtttctcctgactgccaaggtgtgaacacaggcatggcggcagaagtgccaaaagtgagccctctccagcagagttactcctgcttgaacccgcagctggagagcaatgaggggcaggctgtgaactccaaacgcctcctccatcattgcttcatggccacagtgaccaccagtgacattccaggcagccctgaggaagcctctgtacccaaccctgacctatgtggaccagtcccataaacattcaataaatgtctccataccatccccttctggagtctcttcagtgaaaggtgggagtgggaaaggactttagagcctagcatgataaatgagggcttctcccagcaaagatacccagccctgctgtggaccctgccatactgttctgcttggcctattgtgggccaaagaactttgacatgactcctaggaaaaatggtcagtaacaactccatgcaatcgggtggaagcctggggcctgtgaaggcacagaggagcccctcacccaactgggaagtcagagaactctgacatggttttcctgccccacagtaggtgtatttaggagcccctgagaagatgattagccctcagagggggatgatctctgcctcttcagcagctctgcctcaccctggagtgcgccatcctggagtaagccccttgcagagggacggatagagagggagtatgttgtgcacagggctcaggcgtcattctatttcttaggtagatgaa

SEQ ID NO: 6351 - DNA, 1189 bp, Homo sapiens
tacaggtgggaccttttgtgttaatctgttttctccccagtcatcttatttggctatgttaaaaaaaaaaaaaaaaaaaaagcgagagagagagatggtgtctcactgtgttgcccaggctggtctcgaactcctggcctcaagtgactttcccacctcagcttcccaaagtgctggaatcacaggcatgagccacagtgcctggtcttagctgtgtttttaattatgccatgcatcaacataacaccgggccatcttcctatcccttcctatcccatatgtttaatgaaaacatattttatgtgctaaattaggttaatttaccagagatttagcttagtgtttttaaactatagaacaatacccctatagaacaatgtacagctgcacccaaggttaaaaagaggtagcagggaaaacaaacttaaactctttgtatatggtgaaacccatccctctcctgccctctaatggtatgtttacattatttcgttattatacaatgtagtggtataaacagtattattaaactgaaggcataagttaaaggaagtatgttactttgagctgatgtaggctcttccacttttatctgtattttacttatttggggactttgtattgctagggcttcagaatactaactttgacacagctcccagagaggtttgcaaacttttggtttccctctcaaatccatggtagtagtttcaaatgagtttgtggataatggatgtttagtccttatcatttgctgtgttttgacagtttttaatttgcagtattcactcacgaactgttttattttaggaataatgcaaaaccaaccttcgtccggtgatgagaatagccgtatgataagagaatttgctcatcgtgctttaaatgattaactgttttaccttatttagtatttcatagactttgcatgatatggtacactcctaattatgcattctttggtttccaaatcttaatctaagatactttgttaactgactggtagcctaagaaagagacttttcttcctgtttttctctctccccattttttggggtaagttttgcaaagatcagtgctgcttctcatgactctaaagtaaagctcttttggatagcacagcctaactttacagctagacagaatggccattaagaatatttccaaaatccaagtttatcaaaattat

SEQ ID NO: 6352 - DNA, 1335 bp, Homo sapiens
catgcatctcccatgctgaaggttaaaatgggggtcatttgccaacaaatttgggagtccgcttctccctgaaggctgccatgccctctagccggtcccgggttggaatattctgcaacaaggtacaaaatattagttttgggggagcagggccacaggcccaaaaagagttgcttaagcttgtccagcccaagacaaggccagggtccaagtgtttccattgtctctggactctgatcttgaggcatgcaaaggtataagcctccgtggctgctttgtctcctggggaagacaggccagcctttgtattctctgtgccccatcagcattagcctccacttgcacactgctttcatgcctcctgagaactcagctgccgtctgcagtggtctgacatgaggctgctcagtagagaaaaaaattctttgcagtaagaaatctggctttgaatccaggttcacactagtttctccaagtcccaggaccccttaggagtattttggatatctgttaacgtggagattagcattttttactcacccatgagtaagagatttaataggtcagtcccaagtgtacagcccctacattgaacacagcctgcaggctacaaccaagcccttgacctcccaactccatcctgaactttacagtggcatctgatacagaggcaaaagatgtggttcttcctcttaaggacctgtgttctgtgattctcggcattaagtgggcaggatgaaccccagtacattagatggttgagggaaaagtcccagagagaagcactatggctctcctcaagccactccaggtgacttatgagggacgatggatgcggtcagactgtttgtgttgagaagaaccttctaaaattggtcatgtaccatacaaagtccctctagcctggcccagcctatgttaacaagcaggcatgggctggttgctacatacctgggcatagcacatcccttcaatggccatcccagatgcaatgtccacctgcaagaaagacgtgctccctggattggtctgaccttgtccatcttcacccacactggaagccagcccaccctattgcctacagacatctatatgagcagagatagctatgagaaggaatttccctcctagagaagaaacaccattcgtaactatgacaaaactgctgggagaaacgagacagactgagacattttgccagagaagaggagttctccttcccatccggctgcctcaccacgcttcctgtcacccgttaatttctgaacctttatgacctgggccctggcaattgctccagcctctagggcccactgactggcacttgaaagcctc

SEQ ID NO: 6353 - DNA, 1205 bp, Homo sapiens
gatggagaagcagatgaattatccataatctaggcctctgttttcaaatatttgttattagtcatttaaagtttctcttgatatggtaatagctaccagttattgagtattatgttttaggatattctaaatccttagctttataaatatttttaatcttgtaaagtggtattattatccattttacacatcaagaaaccgagactcagatcaagtaacttatccaagatcacacagtttgaaaagcaacagagctaggattcagacttaacttctgttgactccagagcttgtgtccttttctccatgccaaactgcctcctaggatatggattattttgtgagatgttgattgattttcctaatcattcattttaagaaggtagtctagattatcaattttagattgattcctgttctggttagaggtactttctgatctcattccaggttttagggctatgctgttggggacccaaaactctattatgagttcctcgccatgaacctaaaaatcatgtattccctaccatggtttgattttgtcttttcttgaatgttttaggaaaacagaacaattttgcaagagttttgaaaatgggattggaaaagaactgcatgagcagctggttgctctggacaaacagaataaacatacaagctacatttcgggtaggtaggctgggctgtgggtatgatttctcccagagccctccataatgaaaagtaaggcatattctctcctgttttggtctcagagatatttttggtgagaccagcaaatgaagtaacgtctcatcctcccttcctgaggtaaattaaggctgagtgtgttcctcctctactgaggtgttgacttgagcccatgctcaagaatgatggccagccttctctgtagatgggattgaggcagaacctaatcaatggtcctgtctgaaaaggatgcaggattaagtcctatgtcctatatcattctgggtccttcactgtcagacagaactgtcctctccagcctcttctctcaccacccaccctgacatacttcctgctaaactcctcattgctccctgaacccttagtctttcattcttttgtgcctttatccatgctgttcccactaccatttttttgcctggcaaattcttcttttaagatccaaggaggatggttttctgtgaaaccttctcagtcctttttcctttcca

SEQ ID NO: 6354 - DNA, 1207 bp, Homo sapiens
ggcctacctggtcaatgcgtatcccctggatatgtcccagtattttcggcttttcaactcaactcgtttacccaaacccagtcgggatgaactcttcactgatgacaaggccagacacctcctggtcctaaggaaaggaaatttttatatctttgatgtcctggatcaagatgggaacattgtgagcccctcggaaatccaggcacatctgaagtacattctctcagacagcagccccgcccccgagtttcccctggcatacctgaccagtgagaaccgagacatctgggcagagctcaggcagaagctgatgagtagtggcaatgaggagagcctgaggaaagtggactcggcagtgttctgtctctgcctagatgacttccccattaaggaccttgtccacttgtcccacaatatgctgcatggggatggcacaaaccgctggtttgataaatcctttaacctcattatcgccaaggatggctctactgccgtccactttgagcactcttggggtgatggtgtggcagtgctcagattttttaatgaagtatttaaagacagcactcagacccctgccgtcactccacagagccagccagctaccactgactctactgtcacggtgcagaaactcaacttcgagctgactgatgccttaaagactggcatcacagctgctaaggaaaagtttgatgccaccatgaaaaccctcactattgactgcgtccagtttcagagaggaggcaaagaattcctgaagaagcaaaagctgagccctgacgcagttgcccagctggcattccagatggccttcctgcggcagtacgggcagacagtggccacctacgagtcctgtagcactgccgcattcaagcacggccgcactgagaccatccgcccggcctccgtctatacaaagaggtgctctgaggcctttgtcagggagccctccaggcacagtgctggtgagcttcagcagatgatggttgagtgctccaagtaccatggccagctgaccaaagaagcagcaatgggtgaggcaggggtggggagcatgcccttgggtcttgtcctcagtgcttgggtaagcaagcctaaatcattctactccaaatctgatttctacccgttcactaggtttaatccatcgccaactccccaaatttttcttttctaccctagcagtctgaacagccacactagc

SEQ ID NO: 6355 - DNA, 1716 bp, Homo sapiens
atgactggatgaatgggtttctatatatgggtctgtgtgagtgtatgtgtgtgtgtgattttttttttaaatttatgttgcggaaaggtaaccacaaagttatgatgaactgcaaacatccaaaggatgtgagagtttttctatgtataatgttttatacactttttaactggttgcactacccatgaggaattcgtggaatggctactgctgactaacatgatgcacataaccaaatgggggccaatggcacagtaccttactcatcatttaaaaactatatttacagaagatgtttggttgctgggggggcttttttaggttttggggcatttgttttttgtaaataagatgattatgctttgtggctatccatcaacataagtaaaaaaaaaaaaaaaacacttcaactccctcccccatttagattatttattaacatattttaaaaatcagatgagttctataaataatttagagaagtgagagtatttatttttggcatgtttggcccaccacacagactctgtgtgtgtatgtgtgtgtttatatgtgtatgtgtgtgacagaaaaatctgtagagaagaggcacatctatggctactgttcaaatacataaagataaatttattttcacacagtccacaaggggtatatcttgtagttttcagaaaagcctttggaaatctggatcagaaaatagataccatggtttgtgcaattatgtagtaaaaaaggcaaatcttttcacctctggctattcctgagaccccaggaagtcaggaaaagcctttcagctcacccatggctgctgtgactcctaccagggctttcttggctttggcgaaggtcagtgtacagacattccatggtaccagagtgctcagaaactcaagataggatatgcctcaccctcagctactccttgttttaaagttcagctctttgagtaacttcttcaatttctttcaggacacttgggttgaattcagtaagtttcctctgaagcaccctgaagggtgccatccttacagagctaagtggagacgtttccagatcagcccaagtttactatagagactggcccaggcactgaatgtctaggacatgctgtggatgaagataaagatggtggaataggttttatcacatctcttatttctcttttccccttactctctaccatttcctttatgtggggaaacattttaaggtaataaataggttacttaccatcatatgttcatatagatgaaactaatttttggcttaagtcagaacaactggccaaaattgaagtcatatttgaggggggaaatggcatacgcaatattatattatattggatatttatgttcacacaggaatttggtttactgctttgtaaataaaaggaaaaactccgggtatatgtatagatgttcttcattatagacatcttctttgcttttcttggccttgggggaggaagggagaagtgctcttttctacttgtggggtctcccattggaaacataatcctatagtcccagaaggattcagtccccagtggctttcccatccaaagagaaagagtttgagtttcttaactctgctgttctgccacttactcccactagacaaccagggacaaggtgcaacatggaagtgtttgacttaagtaggagcagaggagctgcatctaatctcatcatacctggaacttgacacacttaa

SEQ ID NO: 6356 - DNA, 1176 bp, Homo sapiens
tgagtctttccttgtccccaccccttaagtggagccactgaggctgacacccttggggcctgtggggtggggtatccccaattgttgcatcccacagatttgaccaaaacctcaaaccccaaaccagagcaaacggtgttaatttgctgaatcccaaagtgaatccaaggattaatttttttttccctgaattgtgaaccaagtctacgatttcttcttcaaaataaaagagggttctgttcaagacatttcacatcttaactgtgccttttttccccctcctgcttttgcctggggatttttggacaaggtcctgatggctgctggctccaggcttctctctctgggccaggtagggagaggaggtgggatggggtggggtaggagccgctgttctgtggggtgggggttgggggaggttttggtgaagaagtggcaggacaatgagcgctccaattggaaggagcccagggccaggagccagaagacctgtgttcgagtccggactttgctgctctgtgcctctgtgtgagagctgcatctctataagcctctgccaaaatgaggaaaaccgtcctcttgccttcagagccatgaggagaagtcccctggcagtgtctatctgtgcttgaggccagctgtgagaggtggtcagtgacacctgtgtgtttgcacagctccttgcttcattttcttacatttccccagacaggtgtgggagagagatgatatttttcttgccttgggagatctgggctcactcagagtggggccatgacttgcccaaagttgggccctaatttgggtctgagccaggcaccacccaagcttctgattcagggaagcagcaagggcacgagcagagcacaggcttcaccatcagaccctgcttgagctgtgtgacctcaggccatataccctctctgagccacatctctaaagatggaataataatcccaggtgagtgattttcttgtccttgctaggattaaagcaaggactcagagcctgcacacagaagacccttggagagtaagtgaatgaatattaatttaacagggtttgggaaagaggctattttggggaatttcaggatgctggagttatcaggaccctcacccgtaaccccagtcaagcaaagctggtggctgcagacaaccagctgtctccaggtga

SEQ ID NO: 6357 - DNA, 1216 bp, Homo sapiens
caaaacagcctgggaaggtgccagggaaggaaggggactggaagggatgagggagggcttttatcctattatcctttcctgcatcccccatatgaggaaaatgggtcggggggaatgtccttacttttaaaaaagaagcttctggggctctaggagtctttctgcataggagaaatctaggttttggtccagccaggagcactttgtgatttgacaggtgctggtgaggcagattcttttgttgaagggcttttcgtgcactatgcaaacggaccagccccagcttccctattaattatgaacatttagaaatgttcctgagtataccccgagttcctgctcatgaaactctgcgggtcagaggccacatgtgttttgattttcttatttgaggtattatgtgttcaaggtagatttatgctacaacctttgtttattgacttgtacttttccctgtgaacctaatggaacatgacagacaatatttacaaggcacgtgtttccgattaaatcatgtgagacattaaaggccgataaatgaaagcccctttgaaaggccaggttcagagagaaggaagtggtccctggtggggccttgaaggtggagtcaccccctcagctggttgcagaaaatgctgaaggcggcaggcggtccctttgctgggataggactgtttgtcaccacttcccatctagggacctaggctgcatagaggtctgaagaaggacagaaagagcccctcttcctctcaaccatctaggaaagaaggaagggaaaagaacgcatcttttttgagcacctactgtgtgccagactctgtcatgtaagtgctttcctacagagaccagcccgtcagcctaacagctctgaggctgttaccatcttgaaggggaatcagaatggcatggggctaagaatgttgactgcagtttgtaggaagcttccaggtccccgctctgtcattcactgtctttgacactgggcaagttacttaacctcactaagccttgtttccttggtcacctgtaaaattagcataataatagtatcgatctcttaggtgtgccccagagtacattagccaatattattgtcattgttaaagataaactgaggcacttttcaaggtcactgcacatagaggatggcagcagaatccagtccttctgattccagagcctttcccgaggctgcttcggtgggaggtgtggggac

SEQ ID NO: 6358 - DNA, 2422 bp, Homo sapiens
actgctgatacaactacagatgggacagtaaatgttcagcattcttggatcagaagaaaacggactaattagatgcttcctttgtcgtggtggttgctttgaaaactatactttaatgggagaaatcatggaaagaaattctcaacagaataactgaaaactgccttttctgtaccgattgctttttgtgtgtgtggtataataaaatctttattcaattttacagaagcattgatggcagtcgaaatgtctctagctcatataacttaatagtaataactaaaaaacttttagaatttacttttgaaaggagggaagccagttctgaaatgagtataggttgatttcatagtcttcttaattaagagtttagctctttgtaaactcaaaatacataaactttttaagtgtagtttcatttactgaaggataaaaatggtaacagtgcagcaatattcacaaaaaatattgtctaacggacatattttgttaatctgttaggttgggtttttgtttccagggacaaattaaatttgtatgattacccaaaaaagggtctcagtttacagatgctaactctatataaaggaatgtggaaaaactcagttcttaagttacaagattaaaaattcacatttggtctttaagaaacaattgactgacatctatgaatttattttgtatcatgctagtaaacacgaagtattaatgtatgggtattttcccagctagttttgctttctttttctggagcaaaacattaagtgattgcagagtttttcaagcaagagaaaaaggtttgcaaaaaaacccaggaaatgttcccttttttccccaccattcatcttcattagatcaaattctgtgaaacttgtctggtctctcaaagggagcagcctctgtagtgttaaatggctaattaaaataggaagatctttatagccagaaacaacttagtcatcaaatagcaagtgaaaccaaaacgtcagagggattactgtacttggaagtatgttgtgtgtcccaaatgtgaacgaagtattgttagaatttattagatcagcttctttggagatcaaagattggaaatcctagtcatagatattcactggactggctttggactgaaatgctcctttgtaattcttttcctattgtcttttccttctagtgtcccaaaatattttctttaaagtcagcacagtactgtatatgaatctttaatgtggtatcatatatgtctacttttgtctgattcatcgatgtattatatctttataattgaatattttagctccgggtcctgttgccccttcaagcagtacatgccaaattataaataggtgctactggccttgagcatatcactgtgggacagttccccaattgtcaagtgtttagatatgtagactattgccatttgtttttttgttttggttttgctttgtgtctgaagctgaattgatttcttttttttgaatgtgaaagttgaatttcaaacgtagtcatttcttacagatggccaagacagaaaattgtggctaggttgactgagaactgttgtcttccatgtattaacacaattaagctttttatattccactctctgtgctgaccctggctgaggcattttgggagacaaggactctgaatcttctgcttccattaaagaagaactgtgatattcaacattggatttctgagaataaagataggatgattcctttgaactttgacttacttgtataaaatgtccagctaggttaggtttttgccatttcctatatactttgggtaaagctacatttgatgagcaatgtgaatgtttctgagaatgttcattcctgttttctcttaagagaatgtgctgtgtactaaatacaggccacatagtgtctgcctgttgaagatctggaaactgcctccccagatctgtattgtatttggtaggtaagggggtcagtttctttttctcattgtgtgttgataatctacacaccatctgttggaaccagggtgttattatggggaactcctcctgtgtactaggaggaggaccttagggagaccaagaggagagaagcatttcctttgatgaagtcacatcctgtctatgagcccactaatgctgtaacattggcctgaaagagagtgttctttaaaagcctttctcggctgttagtataaaaacatgatggtatcagctcttagcatgtttgcttgacccttatggaaggtataaatccacagaacttccttcccagagaactgggaaattgtcctagaaataaaccttgtacagttgagtggacatggataagcaacaatttgttactttgcaggatttgttccttggtaattgtttggtgtgtcatcctgtaaatattcatgatagtctgtttatatccttttgtatatcgtt

SEQ ID NO: 6359 - DNA, 1484 bp, Homo sapiens
cctgggaaacatggcgaatctgtctctacaaaaaataaaaaaattagccaggcatggtagtatgtgcctgtgtcctagctactcaggaagctgaggtgggaggatcgctggagccccagaagttgaggctgcagtgagccgagattacaccactgcactccaatctgggctacagagcaagatcctgactcaaagaaaagaaaaggaaagaaaaagaaaaggaaaggaaaaaactggggaaaatggggtaaggttaatatttttttcctgtatatgttcacaatatagatttggtatgttcagtcaagtaatacttaaaatagtaatgcagtaaaactggatagattctaatgcagtaattaaaattgccaattagaaataaaatgtgaattgatgagttcattcaaaattgcttagagttagataaattgacgttgaagatgaagatattcatggggggggaaaaagagagactatatcgatctgacagaagaagatgtataaagctctttgagtggagcttgaatgcagtagtaaaatcgaatcttgagactataatcataaatggaaacaatctactgagctttgggtaaatgcgttaaacaaaaatttggtatgtgtagaatttgaaagcgttgctgctagcctgcttggatcaggttgcctcttcagcactggatctgttgttttacagaagaaactgcttttcagacaccaaaatctagccagatgcctcggccttcagtgccaccattagttaaaacatcactgttttcttcaaaattatctacacctgatgttgtgagcccatttgggaccccatttggctctagtgtaatgaatcggatggctggaatttttgatgtaaacacctgctatgggtcaccgcaaagtcctcagctaataagaagggggccaagattgtggacatcagcttctggtgagaattatatattttttaagattttaaatgtcatgttgcagaggatcagacagcctaagttcttatcttgccttttcttttttaaaaatagatcagcaaatgactgaattttctaatccttctccatctacctctattagtgctgagggtaagacaatgagacaacccagtgtgatttattcatggattcagaataaacgtgaacaggtaggatgatatggttataggatttatatttgcatgtaaaattgagaacattaaggatctcacatgagtaagtcatcaggaataagaagcttttttttttttttttttatgcttcgtgtattgactcaaatgaaacagccaatatttgactggtttgagctatacacattgtaatttcatatgacttgacctgataacttcatgtaagaaatatttgagttctttatatatccaaggtgtgcttttaggcactgggaaaaaagcaaacaaaacagagtccttgcccatgtaatatttacattcgagtgaggggaaatcagtgagtaagcaaatg

SEQ ID NO: 6360 - DNA, 1164 bp, Homo sapiens
ggcctcccaaagtgctgagattacaggcgtgagctaatgcgtccggccttgacctgggttttgaaagaagagtgggagatggccagataaacaagaaaaagggaagagtaggaaggggcattccaggtagcggcaatagaggcaaccttgaatgccaaagttcccaggcaactggtgagttttgcttttcctaaaccagccaccaggcctgcctggtaggctcataaagccctgggcacagcaagatgaagttacatgttacaaatggcattttaattggatttgcttccctgtgccttgcttttacagttgcaaccaaggcaatgtcttactacctcagctcagaaaaccacctggacccagggcccatctacatgcgagaaaatgggcagctgcacatggtcaatctggctctggatggtgtcaggagtagcctgcagaagccaaggcctttcagactgttccccaaaggcttttctgtggagctttgcatgaacagggaagacgacactgcacggaaagagaagactgatcatttcatcttcacatacacccgagaggggaatcttcggtactccgccaaatccctcttcagccttgtcctgggtttcatctccgacaatgtggatcacattgattcccttattggctttcctgagcagattgctgaaaagctgttctctgctgctgaagccagacagaaattcactgagccaggtgcagggctgagggctttacagaaattcactgaggcctatggaagtttggtgctttgctccctgtgtttgcgaaacaggtgggtgttctgattagattattcggtattttattgggtgtgttaattctgtcaagctctggggcttagtgggctcaggggcttccctcatcaaatagcacttcagtttagaacttccaaatatgaagtaaaagaccatattgaaaaaaatcactcttccttctcctcacctcttagatgacacttaactttattctgaaatcattttacaaggattagttgtcacagctcctccattaagtagaaaatattattctaacagctttcaaagagaaaatagaaaagacaaaatgtgatctgccaaatatctcttgatacgctcttacagatggggagattagtacccagagtttttgggcctgtttttg

SEQ ID NO: 6361 - DNA, 1185 bp, Homo sapiens
aacctgtgccgccatgcacaccacagcgacctcacagggcactcaaggcaaaatgcaatcaatgcagatatcaccctgtttgggcctttgtcatatccctgggtttatcctagactgatgagggaattagcatatgccagtgtagtgaactcatcatccctcccttctgtcacagatgggaagcggtctcgagcagaagccccactgaagtgtcccctggcagacacccacatgaactcttccgagaaactccagttctataaagagaaagccccagattgccatgggccagtgttgaaacacgaagctatctcaagccaggagtcaaagaagagcaagaagagaccttttgaggagtcagagacagaacagaataactcttcacaaccttcaaagcagaaatatgtatgtcttgctgtggaagactgggacttgttaaattcctattgattagtagatacaagttgacctttctctggcccccagctctagtgtttgagtaaaggagactgaggatgatttactttttgtttgaatttacctatggcattagcatagtaagcagatatttctacttttgtggtgtgggaggggaatgctatggaagtatgtaataatttctaatgtatattttcaatacatagtaattttttcaaataaacatttttgctgtccttaagttctgcttgtggattatagactggagccacaggaaataacacggtttgggatggaaggccaggtgaactaacaaggcagcttagcataactcagagatactgcaggtttggttccagaccactgcagtaaagcaaacactgcaataaagtgagtcaccagactctttcatttcctagtgcatataacagttatgtttacactatatagcagtctcttagatgtgcaatagcattatctccaaaaagaaaaaacatgtatataccctcattttaaaatactttattgctaaagaaaatgctaacaattatctgagcctttagcaagttacattcgttttgttggtggttggggggtcttgcctttgttggtggatggatgctaactaatcagggtggtggttgctgaaggttggagtggctatggaaatttcttaaaataagacaatgaagtttgccacattgattgactcttccttttgtaaaagattttgctagagcacacgat

SEQ ID NO: 6362 - DNA, 1292 bp, Homo sapiens
aaataaaaaatctctaattgctgattctcataactggccttctgtcttaagatattttaattataaggaaaatataactatctctttactgagatatgctgtaatggttacagaatgccttataatagctgtgcttttttaaattgaagtataagtaaattatggcaaattgaatatgtaaagtattctagggaaactgacttctggaagcctggtgtgaattcttttataaaacaaatgatcattttaaatttacctattctataccttaactttttggtatattggttttcttaaagcaagtatcgtaataacttgcaaaataatatatgacatttgtacaacagtgtacaatttacaggacactttcacttgccttatatatttagcagaaagtcaagtatatctgattttattattattacaaaagtgatatagccatgttacagaaacattagaagtggaggaaaaagactttatgccaacctaatgtaatagctattagtataatatttccttctgtaagtatgttttttaatagtttcaaagataaccaacaaagttttaattgtactgttgagctaagtacataaggttgactaattaagaatttcctgtttcttataaaattttaatataactaattgttgattttttttttccagtaactctgggtggattttaactacaactcttgtcctctcggtgatggtattgctttggatttgttgtgcaactgttgctacagctgtggagcagtatgttccctctgaggtaaatttaattcttaccatttgaagactgagccctgtgatatatcattttaaacaccttatttgtttagctggaaaaacaaggcctttctactaatagaaagagagaagatgtggtggttttaatgtggtagaggttggcacacataaaaattacaggtttgcagcacaagaattgttgttctcagctttctgtgatgctaactaccgtggtgacatatatgttgactggcttgagaacggtgtctctttctgactctctaagactgaaaagacctgttgacatcagtttctaggggatatatgggaaagaagactttttttttttttgaggcagagtctcatctgtcacccaggctagagtgcagtggccaggatcttggctcactgcaacctctgcttcctaggttcaagtgattcttcctcagcctcccgagtagctgggactacaagcatgcgccaccatgtccagctaatttttgtatattcagtagaaatggagtttcaccatattgacca

SEQ ID NO: 6363 - DNA, 1167 bp, Homo sapiens
ataataatgaggtatatttggtagacatagactatatttggtagttagggctggggtgtgggttattagaaaggatcttaaatgaaaggttggcatccatcaatttagtaccatagcctagggtctatcccctgcttgcagcattcagccatattatctcagaggtcttagccactgtgtgaattcctctagtggcaggcgctcaccacctcagtcacctattaaccatcctgaagtaggtggtcattcctgaaggtgagttgaaatctgactttcttagcttctggtcttcacttttggttctatcccctcaggtgtcacagaacaaatccagtttctcacttgaggcagcctttttactaagatgctacctggcaggtgtaagcatctcttcctgaatctttttctttccttctttatttttgtggctaattacctcaaaggtgtaaagcaggccctctggctcaccaagaccaagttaatagaaggccttcccgagaaagtgcttagccttgttgatgatccaaggaaccacatagagaaccaagacgagtgcgttctgaatgtgatctctcacgcccgtctctggcagaccactgaggaaatccccaagagagagacctactggtaagttcccccaagtaaagaagatttcctactaatggatcttcgagtcgacctgttgctttaagtccccaaatgtctctttttgtcttcaagcccggtcatcgtggacaacctaatacagctgtgtaaatctcagattctcaagcatccttctctggccaggaggatctgtgtccaaaactccacgttttctgctacctggaaccgaggttggtcatcttgtacaccagaaagccttggtctgttttttttgcctttctactcttaaccccaccaccagctcccatccccctgcccccaaataccgatccttactcccatcattcgtggtctcgttttgtaggctcagacacaccctcagtatcattagccatagcccaaccatttttgtttttaatcactttctaagacgttaattcaaccattaacagtcagccatatctattgagtgcttaggatgtgcttgggaagtgcctaaatgttgaaggtaaggaaatttataataaagcacatgtagcctccgccctcacaatgctcata

SEQ ID NO: 6364 - DNA, 1341 bp, Homo sapiens
gttttggtttgtgcaacaggcaggggaggagtggggacgcgtttgttctagcttgatttccatggcaacagcagcggcacgcttggaccccagaacccagcaccctcatcctgtggccagaggggccggaccactgacccctttcaggattccaccacagcccagaccgtcaccgtgacccggtggcatgcactgttcccaggacaccctcctcctctcctggacctcccttccgtcctggcctccctgcctctccagcccctcctctgcccccaccccagtcttcccagtgagaatcctgccagctgggtggtggcctggcgcagagtgggagaggctgccactgacaggatggctatgacctgggacatggaaacagtgacctccgcgttctggtcccgagatcctcgcatcagcgtcatcgtgtgcaccggcttggggggctggagttccggttttctttgttttttctctttattcgtcctttctcaaagatgggatactgatcagaattgctctgtatatgcttgggactggatggaaagactttggagcagctgtggggggtggggggacaccgacaaccaaacagacgtgctggctccagtcctgtttttactttcaaaaaccaacaagcccgacagtggagcctgtcccctcccgggagggtgctcatggccccactcacctcatcaccccacggaaacctttgtgtcttgccctggaagacacccgaattctttgtacattgacatgcccttctccttcctccctcccctgtagctggtctttgttttactccctccctttctgatccatgtatatcatattatgtgagatatcatctgcctgaaaaaagactttgtgcggattattgggaacattgtagctgtttctgtgttttttcttaccttgtagtctggttctgaattaagagaggaaaaaaaagtaattatgatacattgtagtttgtgtacgatatatgttgataacgttttattaaagggacatcttttttccgcagcccttcctgacatgtttggggaatgtgggttggagtttattacactgattacaaaatgcaaggtgacttcttgggcacagtttttgttcctggtgcataacaagatgttttgtgtttgaggcgtctgccttcttttcctgggcctgcaaattctgtgttcttgtggagtcgcgatggccttggcggaaggtgggttgggagggaaggtatccatctcactttaaatatttgggggccgtctaaaagccattttccatttcttgtcttgcaaacacattttggtccgctggaatgtcttttatttttctggaagtaga

SEQ ID NO: 6365 - DNA, 1203 bp, Homo sapiens
atttgttgagcccttactatgtgccaggaattatgttgggcattcaggagattgttgatgcacaaatgcacagaaaccaagtgtgttttgagagctcaggggttcaggggctctgaggaggggcaccgaattgagagagggactgggctgccgccagctctcttctcactggtttcctgtttaccattagcggctgcccatccctccttagcgcacaaatgcccaagtgaaccttggtatgttttcagacccgcagctcaatcacaagcatgaagcaggcgaattgaaatccatctttagctgccttgaaaacctgcacaggaccccctttagattctccctgcccacgctctccccaagttctgtcttcctctccccgttttgaggacatatggccccttgaagtttttgtttgcttgcagtaggggaaaaacagctttaagtgtagagggtttttccttttttttttttttattaagcatcaagagacacagcaatctgcttggagatagtgtacgtgcataattaataaaatcgcattatttatttataaagagacacacgaggaacgggagaattagggctatccccattatatatgaagagagggagagagagtggagaggcaaaaatactttttgaacattagatcctttcagagaagtgtcttttaatatgcagtgaataaaacggcctgtactcctcatggaagtggtgccctgtgcccagaaggcatcagaaagcagaaacctggttcaggggcttaaaaaaggaacgggatcgatgtggcgctcgcagtgcccagcatgccggcgttgggtagttggcaggagagcaagagagagaggaggcgcggttgagggtttggccgctgggaaagaggattgagagccagtccggggtttccaaaagagagggacttggggcacagaatctctggcaggtgggggagaaacggctaccgtcaccccactgggcaccgcatgaataacccagatgtcggcgaaggggagcccctggtttcgatgagcccactgcaagccagatcccatgaacttggtggtgagggggttttagatagcagctttgcccttggacctctgcatcccggatgcccgggcaagaccgccaatatcaataacccaacttattatataacagcctcggagaccgggaagcaggggtcaggtcctcccaagcttc

SEQ ID NO: 6366 - DNA, 3586 bp, Homo sapiens
gcatgcatgtgtcaagcttatccaattgtgtactttaaattatgtctagtttattgaaagtcaataacagattaaaggaaaacaaccccactgctccattagggaaggcagctgtgcctctggccaagcagaggggcagaagcccagcagtctgagctctactcctgactctacctccactgctaagctacctaacccccaagccccaattccctacctgcaaaagggggataagaatacctgcaccatcttcttcaccaggttaacggggttaaacaagagaaatcctccaaaagccttttctgggctgcagaatgagcagttgggtttctctcacgcctcgcgttccgtgtgcctcctggcgtcctcacccacttctctgcctctgcagcttccagatgctgtatgccgactgctacatgaaccgggaggagttctgggagatgtttgatggctccttgtaccacaagctgcgagagaagctgggttgccaggacgccttccccgaggtgtacgacaagatctgcaaggccgccaggcactgagctggagcccgcctggagagacagacacgtgtgagtggtcaggcatcttcccttcactcaagcttggctgctttcctagatccacactttcaaagagaaacccctccagaactcccaccctgacagcccaacaccaccttcctcctggcttccagggggcagcccagtggaatggaaagaatgtgggatttggagtcagacaagcctgagtccagttccccgtttagaactcattagctgtgtgactctgggtgagtcccttaacccctctgagcccgggtctcttcattagttgaaagggatagtaatacctacttgcaggttgttgtcatctgagttgagcactggtcacattgaaggtgctgggtaagtggtagctcttgttgcttcccgttcagcgtcacatctgcagtggagcctgaaaaggctccacattaggtcacctgtgcacagccatggctggaatgatgaaggggatacgctggagttgccctgccatcgcctccatcagccagacgaggtcctcacaggagaaggacagctcttccccaccctgggatctcaggagggcagccacggagtggggaggccccagatgcgctgtgccaaagccaggtccgaggccaaagttctccctgccatccttggtgccgtcctgccccttcctccttcatgcctgggcctgcaggcccaccccagccaccactgagtccactcggagtgccctgtgttcctggagaaggcattccagggttgaatcttgtcccagcctcagcctgggacacctaggtggagagagtggtctccgctctgaattggatccaggggacctgggctcattcttcttggctcaccaaccctgcaggcctcatctttcccaaaacccactttgtcttggtgggagtgggtccgcgctgctctgcagcaggggctggggagtggacagcatcaggtgggaaagtggagtccaccctcatgtttctgtaggattctcaccgtggggctggaagaaaagagcatcgacttgatttctccaaccactcatccctctttttctttcttccaccactccccaccccagctgtagttaatttcagtgccttacaaatcctaagctcagagaaagttccatttccgttccagagggaagggaacctccctaggtccttccctggcttgttataacgcaaagcttggttgtttatgcaactctatcttaagaactgcccagcctcagctgaaaacccgaatctgagaaggaattgcgtcatgtaagggaagctggaattaagggagctgagccagtcatggttgtggcgtgtgagtcaggagacctaggtttcagcccctctctactgtcagcgagctgtgcaacgtgggcaagtcattgtcctctgagctgcagtttcctcatctgtcacatcgctacagacaagacctccctggaacccttctgattgtcttagacactgtggttgcaaaacccacggaaagcctcatttgtgtggaaagtcagaggaaaaatgatccagtggacacttggggattatctgtcattcaagatccttccttcaaccccaaggtcagctcccatctcatttccagaaaggctcatacctggcttgcagggaagcatctgtcttgtcattccaggtgccagaatcctctcagagtcattgaagggtgttcacccatcccacccaaggcttggcacactgccagtgtcttagcagggtcttgtgagggctgggggcatccaggcactcagaaggcaaaggaaccaccctacccatttggcctctggagggggcagaagaaagaaataaacctcatcctatattttacaaagcatgtgaattctggcattagctctcataggagacccatgtgcttccttgctcagtgcaaaactgatgattctacttgctgtagatgaatggttaacacgagctagttaaacagtgccattgttttgccagtgaagcctccaaccctaagccactgggacggtggccagagatgccagcagcctctgtcgcccttagtcatataaccaaaatccagaccttatccacaacccggggcttggaaaggaaggtattttggaatcacaccctccggttatgttgctccagtaaaatcttgcctggaaagaggcagtcttcttagcatggtgagctgagttcatggcttttttttgtagccagtcctgtccctggccatccatgtgatggttttggatggagttaaacttgatgccagtgggcagtgcatgtggaaagtatcagagtaaggctctcccctccagagccctgagtttcttggctgcatgaaggttttctttagaatcagaattgtagccagtttctttggccagaaggatgaatacttggatattactgaaagggaggggtggagatgggtgtggcagtgtatggtgtgtgatttttattttcttctttggtcatgggggccaaggagaaaggcatgaatcttccctgtcaggctcttacagccacaggcactgtgtctactgtctggaagacatgtccccatggctgtggggccgctgcttctgtttaaataaaagtggcctggaagctggcgtttgtcgtttcttgcttgggggaccaaaatgtggagtcagatctgggctcgggtgcaggctgtgccattccccaactcagttgctctcactgaacccatgagcccatggccgagggctagaagaacatgcaggaactgacaggtttatttctatcactgtcagagtgtgattggagtaagtgttgaaaggatccctctgtgtgcagggtggcaagcagaccagtgagaaggccaccactgcagtccaggtgagacgatggtggctctggttagggtggaggcctggctttgtcacttggttgtgaccaattaattttagcaagttaatcctgttgagactgttgtcctcatctacaaactagtggacccactagctgtccattaaaatgcattcctccattctttggacacatagctagactacctttcccagc

SEQ ID NO: 6367 - DNA, 1221 bp, Homo sapiens
gtgggtcgttgggcagcagtgccagtcccagctttttcctgaatagcctctgggtcaggggctgtacctagatgggagaaggaggatgctctctcagtgagggtccctgagacagagggcagtattaggttccatgtcatgtcgaagctgcagggaggaaactaaagcccagcaagcacagtttgtaaagctcattgtttgggtttatacaagagagtgagagaatagggactctcccaggctttgctcccccactgactgcatgccacaatgtggggcccaaggtttcagctcacaacacatcaattctgtctcacagtccgaaaactcagacctgttctatgccgtaccctggtcctgtgggacgctgggtttcctggtggccgctgagatccgcatcatccctgccaagaagtacgtcaagctgcgtttcgagccagtgcggggcctggaggctatctgtgccaagttcacccacgagtcccagcggcaggagaaccacttcgtggaagggctgctctactccctggatgaggctgtcattatgacaggggtcatgacagatgaggcagagcccagcaaggtaagccagggtgtcagctgctgctgaccaagactggggaggcatgagtgtgctaggactgagccggttcccgtatcctgaccctggcagccacctcttcaaggctgctgcctgggtcaacccacctggggtacaggcaacaggatctatcatcagaaatgtattagacagtgatggaagctttcatctactctgcccctaccacctgcctgggatgtgcttgtctcttagtggatgtaatctttggtccttatagcaaacccattttatagatgaggaaactgagtcttcaagaggtaatgtaggctgggcacagtggctcacacctgtaatcccaacacttaaaagaggtaatgtaaacttccacaagattcgagtaatcgatttgatgccttggaatctagattgacattccttccacatataccatgcaatttttattagcagttttttctccatttagaaaggatttgtgcttattgtaagagacttggaaaggatttgtgcttattgtaagagacttggaaggtacaaacaagtaaaaaggaaagaaaagactccacctgtaaatatgtcccaaagccagtgttgctaatgtgtttggtacacagttggccccttgtatctgtgggttccac

SEQ ID NO: 6368 - DNA, 2658 bp, Homo sapiens
gacacaatactggatgctcagcaccttcttggaatcagaatctcgaaccctttggaagagcctggagattggactgggaaagctgctgtgacttgggcggatcgtgtatttctcaaggaaagcatttttaagccactagaaggtttgggagctgtttggcagtgggagaactccggcatgtggatcagctgtcccgggagcgtggtctatatgtggattcacatttctgtggagattttcggaaatagagccagtggcagacttttttgttacacgaacatacaagagtgagcataaagctgttgctttctctacgatgctacaaaagaaattcctttggtttttatattttaagaaaaagcaagctgcttttagatatgtgggggcaaatttttaatcttgcagtaatattaaacaggaatatccaatttaaaatgatgtaaagatgtaataaaattccttttcattgtaaaatagtaattaagtcaatttacacagacctttgtatttaatatgtctccctatttgtatagaatttcagatgggtctagatgagaaccctatgcataagcttggatcttgatgaaaggttaccaggatcaggatcaaaaattgggaaatactaagctcttgaagatatttttctgatataattagattgaaaagagcaattttgaaaatgctgtgttctccagaagtacagggtgcattatttgacatcaattacttaaagaagttatgagttgttccccaaacagattttaaaaacagcaaaataaaagcactttaagatataattttactgagtttaacttcacagaattatctttttaatgcttggagacatattgaataaactgtagtcttaaatcatgtgatctgcaatcgtttgcttttgcttaaaacataattactgaaacccttggtattggttgtatatgaagttaactatttgagttggtacacactgcttgtgagtttcatagttattgtaatgcagagaaggaatttgagaatttgtttctcctcaacatgactaattaacactgaaaagtcagtcaaggtttaagatttattttcccagaaataaatataaagcaattgaataaccatccatttagtcgtatttccaaagtatagcaccattcactcatttataccagctcccttttatggtgtgggggagaggtttacacccacatatttcatatatattttgtacattttgtattttgaattgctcacattttcggccctgttttgcctttagttacaggtcctgccttattttcatctcaccatgcacagaactagggagccttaggaagtgccaggttttcactgtcagatttgccaagtcacagaggcgcagccagccctgaagtgcctgtctggctgctgtggcattgtgtgggcatgtggccaggcagatggcatctcattactgtgctctcgccatggcccagtcttttcattctctggcagtgagggtttctgtgctgtcagacttcattgttattctgtgacttgctggaggttggcagtggcctttgtcaaacacactgagaagatggaagggccagcacttaagagcagaactgtacccttagagaaacggacagaggcgagtggcaaacttcagacggttccaatggtcttgcagtttgaaatgtgatgttctaccattggttttgagtacgtgaatacttcctgtcctactgtttcccctaccctattctcaccttctctccgcccacatcctcaccaagagattgtgtgggacatgaccttgaaatgctggcgatgatccacactgggatatcatcgctggcgactgcactctcaggagcccaaaatcaggagtgaaattgccacttctagtccccttatttcctatggaaacaacgccttccgcacccctagcacctgccgtcctcactgtaaagcttcatcaggatcgtccaccgtgtatattatacgcttcagatcatgttgcttatattgttgctgcaatgaccatcgttttcactttgctggtaaccacttgattgctgacagctacagtcaatgaacctgctgatgactttttttaatgtagtacaacagtgacagttatgacaggcttaccttggaagagttgtcatttttactgccaattttttggatgaagatgtttttataaacctttcaaaatggtctgcaaacagagcaggaattgcacaattaactcaataatgctgtgtgttctcaagaagctcccttagtgaggccgatcttaagatggccgattctgcccgttgaaggcatcctgggaaagaaaacaagcatcccagcgggcatctcaccacgacttctcctggagtcctcacacggtcactgacaactacagtcagttttaggaactagagtgccgtatcatcagacttaccctgtcctgccccaccttccctgctaacatcgaggtgtgtgcagttaccttctgagcttggaacaagcagactggaattttcctctgctacctcttgtgtataaaatcttgtttataaaatttcaaaaggaagtagatacactagggaagaaccttaattctaaatttggttcatgtgtggcaaagttcttagcttctaagagtataaaataaatttttcaaaaacagag

SEQ ID NO: 6369 - DNA, 1206 bp, Homo sapiens
ttcagaaacctgattttgaaatcttctagtggtatttctaaatttttagctgtattggattcactgtattagattttgataccatgccattatagttaagcatcttatggtggtaacctttaagagttggatatagtattgtcagaatttgcctggatttggccgatcttggcagaaatggttaagtgaggccagttatcccatcttgtgccacagaacatatttttaaatgtcacttgctatttgcttacatttagacctccctaggatacttaccttctttctcttactccattaccatactgctcccttattccttgtccccacctatatcacttccaagtgagagatccagctaggcccacaactgaagtatcctgacttccatgctaagcagtactctaaagacactcacattttacttatactttgcattttacaaacttagggagtagttaactacttgctggaataatgggccctttgttttagattgtcaagacaagaaaaacttttatttacagatgtgtttcttaatgtcttgttataaagcaaacccatacactgatgtgcgccgaagatactggaatgcctatatgcttttctaccaaagggtgtctgatcagaactccccagtattaccaaagaaaagtcgagtcagcgttgtacggcaggaagctgaggatctctctctgtaagtgtctcttccatgtaatttgctgtgtgatttctatggtgatgatgtggtctgtgacaatatactatttgagattttaaagataattagctaagctggagagaaattctaaaaagaattccaaaaagaaaataaatcccttattgcttcatggttattttcttggcaagaagttgttacatatttagaaacatgcacgtaagttatttcattctagaattgaagtgttttgttttttgtttttttgagacagtgtggtctcactctgtcacccaggctggagtgcagtggcatgatcatagctcactgcagcctcgacctcccaggctgaagcgatccttccacctcagcctcttgaatagctgggaccacaggcgaggggcaccaggcccagatatttggtttgtctgttttttgtaaagataaggtctcccaatgttgcccaggctggtctggaactcctgggctcaagcaatactcccatctaggcctcccaaagtgctgggatt

SEQ ID NO: 6370 - DNA, 1211 bp, Homo sapiens
aacacaaactatagcagggtagataatagtttattgattatattttgttttagtaaaagtatttaattttaaattctgtgtaatttatctaatttgtatttattcatttgttatttttatgttgtaattaacacttatttacctggattaccctaaaaaaattaagctcttgaaaacaaaaaaatgacattaccttgacaggcttctctttgccaaaagtaatgtatgttctgccaagaagcaaatgagaatgttagactaagtttctcctgtgttagtggaaaacaagtgtgtctatctttaaatattctttgaatcaggagtttgcgttgtgtcacatcatatggctttgcagatcttttaaaaactgatgttaaataacttataagtccaacttcttaatatcaagataaatgaatagttcaccaatttgggaaggagggcgggttgcaatttgagatagtttaaggtttaattattgaaagactgccatcttgtggcaccaaaaggtaatttttacatgattatttgtatagtgataagcagtcctgctgtgttagcctggtccattatagatatggcatagttttgggttctctaaatgggtccatacctcttttgggaaaaaacagggccacctcataatatttgcctgattatgaatggaattaccttagaaataaggaactaatcagattacttaaccccaatgacaaaatccacaaaaattttgaaggcagagaaacagaaggaatccagtgatgttttagctccattagtctaataggtcagatattaaaaaattgttcatatcaaaattaccttatatggattattgccatgttttttgagagttaattatttactgttttctaattcttgccagtatttatgaacagctgtagcttgatatttacctactgaattttaggagaactaatggtcacagtttgggttcttttatgtgtatgtttttaaaacagctattttgtgaatctaggtggttggtttttagaagatttcaggagatgcagtccagcacaattagagctggaacattgttacagcaggctttttgttgctcatgggcagatagagggaaagaatcagttgttagccccaaatttccacatttcagtgttgtaaactctgaatgtgataggtagatgtgggctaagaataatttcctccagtgaagacacgggagaaga

SEQ ID NO: 6371 - DNA, 1289 bp, Homo sapiens
gtaggcaaaccatttacaagttgggtttttgttttgattaacctgttaagagacacttttgtaatctctagtgtttacattcctttatactagctatctataaagagaatccagaaggctaaattaatcagaaataattatatttctatgtcagggtattggctatatgtagcatgaacaattctccattttctgcaaatgggtttttcaggacagttttataattctgagtttgctttttcttattccctagacagtttgtactcagggaatacaaattgatttttactgttaaatgagacatagtttagaaaaaatcataagcaactattgtagatttttgatctgtttggatttatctgtagcattgaataatgtgcagtgtactgagttaatgtaggcacctcactttggatttataaaatgtaaaaacctggaacatgcctgccacagacaccactttgtctattcaccgggtactaatttacatcctattaatggttgtaaaagctgagtgtctaaatgctagacatgttcacaattttgtctgtttttgtttatttgtttttaagacccaaaccttttcaatcttgcatttatttacttggttctcctgtgtcaccctgtggctttttaaatagggaatgtaatttattttaatagtagttctcaaagactctattaaaaactctggacgagggatatgtgcaatctgttggtaagtcacatcctatgtttggcctcatttttataactcctaaaatgagaaaggtagattttaacacttctaaggtacctttgagctttaaagttcttttctgcttttccatatgatttgtgttagtgttcactttttatatatttagagtttttatatgagtgtgaatgtttctgttttgatttggtgaggcatgtcagaggtatatacttgaatatttttctaaatacagctgctggaggaatgcaaatggcaaaaatcatccagaaaaccaaacacggtgaaacatcacatccatttggcatgaagcaaagcattacaaatttggagtgatgaaagtgttccatatattttttatagtgatttttcgatctagagacccttcatattgtttacttactattacgataactttgagaggtaaccagagaaagcatttttgccatttccagatgaggaagcaggaccagaaagctcttcataaagctttaacaccatacaagtatccagcagtgatcaattgctctttataggaaaccacctttcctctggggaagaacagtctgaatta

SEQ ID NO: 6372 - DNA, 1141 bp, Homo sapiens
acttttttgaataatacgtagaattttgacaaggttcatacagtgcatacagtgtgaccttttctgaggtgggcagggagggttgctacgttgtgttgatttaaaatttcaaggaggaacaaaaacattctagccaaggagaattgcattgttatttttttttctactaatttaaacgtgcatttttcacagttacacatttaagttttgctaccaaaaatggccatttttctagacagataacattttcctaaagtggaagagagatccactgttctaaaaaaaaaaaaaaaaaaaaacactaaattgtgccttctcccttaaattataagaagagtaatagtaaaaacttgtttaaactatattttctttttttctaatccctctcagttctccttagatctgcctcctacaaatgatcatgttgtttgcatctgcctgattgagttcccttggtcaaacctctccctatcactatcagaagttgttcactaaatgtattttcctatttctttcatgttgattgactttataagtcaccttggtaaacataacatttggctaccttctcatgctttataaatgaatttgatgaatggcagtttttatattttaaccctttaaaaagtttgtcaaggaaacaactcagagctaagaacaaaatctaacttggaatcagtttcttcctttggctgctgaagcagcagcaagtcacgtaacctcatttagttttttgatttacaaaatgtggataataacctacctcacagatgtgtgtgagcaactgtttgaaagcccttgtttaaatacagggtttatatccccacattcaatgtaaattcctttttttaaaaaaaataagtatctttgatactgataggatgagtatcttgatttttaggtaagatcacagtttcacaaattgtggtgttgttaggtgacatttaatatttcttgagacctcaagtattcaaatatcaaacttgtcctgtgttgtaacaaatattcagaatctcttaaaatgttggctgaagctgccttaatgtaccaaaatacagctctcaagactgttcacaaatatctgtggttgtacaatgttttgaacatttaatgtaaagttgttgtagaactgtgaactcta

SEQ ID NO: 6373 - DNA, 1153 bp, Homo sapiens
ctatataattgtttaactctgagacttttacctcttcctcaaaggtctaaggtgaaggaatccaaaattgattaaatgcctaagatgggacaagtgtctttagatatgttattaattcttcaatactatcttatacatatatttataatgatactcttctgattgttgtatcattacctgtttgtcttcctcttagactatgagctattcatttatctctgtattggtgatttttgctgtggtagtaacagatatcccagaatttcaataattctgcaggtcggatgcagctctgtttagttctcttccaaaagtctgctcatgccagaaatccaggctctgggagcagccccatctgggctatgtgattctcatgtcagagggcagaaatacagaagtcttaactgaatgacatatgtatacagtttctgctcagttttgtgtacattatgtctactcatattccagtggccaaaggaaaaaaaaaagtctcatggcaaacccgacaatggagcacagaatattctccatctaccttagatattggcagtgacatggcaaaggatgcagatgaacaatccttttattggaaggacacagatattgggaaccataatgcaatatgttaccatctggttgctcctagaactgcatttttatatgaggaaactgaagtgtagagatgttacatacatatgtggtcatatttatgtgatctgagctagttatctgattccacgtccatgctctttctcattttcagcttcatctctttctgctctaaaacatagactgtcttcttgggacatgctgagttttatgtcattcatccagacactgagtacattcatgtatttgtgactcagtatttgatattacatctgtaattgcagtttcttctttcaatactacctaatgctctttatttttttgtctgaaagctttacttgtttttcttaggctaggagggatgccatttctcagtgttctgtggtgtcctctgttccctcacagtgcttatctctctgcattttaattgtgtgttaaaggggggcctctctcctaactagactggacatttctggaaggctgcgggaggggctgctttttacctatgggtccttacataataggcgacatataaaaagtattg

SEQ ID NO: 6374 - DNA, 1168 bp, Homo sapiens
agaatgaaattttgatgtcaatctattcataaaaaaacttagtattagaatttattcctttgtaagaaaccacattgtctttgcatgaataattcagatttgagaaatttcagtgcttaatatatgcagatttttatataattaaaacttaaaatgttcaataataagtagccatataactttccatgaagcagagtaagcattttgtagtgctcttttaaaataagaagtaatttttaatctttcagtggatggaagaatttaaaaatgatatgctaactgagaaagatgcccgatacctggctgttaaagaagtgctttgtcatctaattgaatgcaataaagatgttccagggatctctcagatcaattgggttattcatgtggttgattccccaattattaatgccttcgtgcttccagtaagtaaatgttctcaaacgcattgtaattgttaaatttattgtccttattttttatgatgttctaattgcttacattattttctttgtggtgcagaatggacaaatgtttgttttcactggatttttaaatagtgtaaccgatattcatcaactttctttccttctgggccatgaaatagcacatgcagtacttgggcatgctgtaagtacctaaaatgaatgttcaggtttggaaaaactgctttgaagttaacaagttaaatcttttaaagaactgatttttttcaggttttttaaaaatgatagacttttagttttgggtaattgccttaatctgctacctgaaaaaaacgtgattggctaattttgagaatttttatggtctttagtatttgatactgaataatatttttcttaaatactatttttatcacctgtctcttttgctaaaacgtaattattctcaacccctaattatttcaaattaaattttaaactttctataattattaatatacttgtaatctagtcagaaaattaattgtagggaagtgatattactatttaagtgggtaaatcatctttcttttttattcattctcagaggatagcttggagcatctttgaaaatgtctagaatgatgtgtcatgtgtaattaatacagagtaataacaataccttgccattttacagtttactgagctttttagtatatgtggcttcccattcataattttaatac

SEQ ID NO: 6375 - DNA, 1354 bp, Homo sapiens
gtgcattttataagttagattttactattctgtatcacatgcttccttccagttattgcaaactgataaagttttactgttgtttttatctaatccactttattgctcaaatcatttgccattaaaatacaaatggctcttccctaactaaaaattaaaaatgaaatgaaaaaaattcaagcttctaaagtaaacgttgcatagtaaatatcgtggtatatatactctggtttatcttgctgaaaggcgttgctctaggggtgatgagttgaaacccaaggtaatttagcctgagatgtgttagaagaacaactgacacgcctatttaataagtgttatagtcccagtttggtaagtaaatattttccacagatatttatagttttttttttgtttcaggtagtcaagtgaaaaaatgagcttcatctgtggattgcagtctgctgctagaaaccatgttttcttccgatttaattcactgtctaactggagaaaatgtaacacattagcatccacctcacggggctgtcatcaagtacaagttaaccatatagtaaataagtatcagggactgggagtaaatcagtgtgacaggtggagttttctgcctggaaactttcatttttatagtacttttaacaacaaaagaacaggaggcctctcaagtaccaaaagtaaggaaatttggaggattaccagcaaatgtactgtatggaatgatgctttttcaagacagctgctaataaaagaagttacagcagtccctagtctgtcagtattgcatcctctaagccctgcttccataagagctattaggaatttccatacttctccacggtttcaagctgctccggttcctctcttgttgatgattcttaaaccagtacagaagttatttgcaatcattgtaggcaggtaaaatgcttttttagaataaaaacttttatattaactttttgcattaatattttgtgctaacgtattaacttttagaaattaatttttttatttataaaactgtacttttaaagaaaccttgccagatcccctgtctccccccatttagctcaaagtgaagtttctaaacagtaggtcctgcccaattttgttctgtatgatttaataatcttgaaacaatttcctgcatactaatttatggtatagaaatatctctttaaaaagttattcttacattttgtataggcattaaaaaaatcttatatttatgactacaaaatcttaggatatatggatcagaagtgctggttatcacttatgtataagaagagtacttacaaacatttctttttaatttgtggaatttaaggcagcaaatcataaaattgaggaactt

SEQ ID NO: 6376 - DNA, 4018 bp, Homo sapiens
gtgtgtgtgtgtgtgtgtgtgtgtgtgtgtgtgtgttttacagccctttaaaatgataaaaaccattgttaactcacaggcctcataaaacataggctgttggctattattctccaacccttgatctagagaattttaaacattagaattttgttttacatttgttaagctttacgtcatcttcaaatgacaccaaaactcagaattatgatctgcatttaagccaattttaaaataaaataagcagtcaatgctgcctcatttattgaaattcagtagattttagtttatttcttagtagtcagagaattgatttatagctattcaccaaacattcttactaacgtttccttatatctaaatcagattgattctatattttgctttgtttgtaatcaatagccaatgaagaataaggagtattggaagaagcagtgagtcagctttaggtgacctggttcttgtctcaactttgtgatttggggagatacagtttactttccctgagccttaattcttgtgtaactgaagtctaacttaacttcttaatgtccttccagaactaaaattttattgttcattctaatcgttggactactcttgtgaagtttatattttgagttaatacagtttccaaattaacatacatttaaaaaaaaaagggtagtatttttccatttctctgtgtgcacttaggataaacagtgaagtatagcttataaaacaattagtttgagggctgagagtgtaagaggaactataccaaaagtcaggaaacctgagctcttaccctaactctgttaccaactttgctgtgtgaccttaatcaaaacacataacctggaccccatgctcctcaccagtaaatcaagggcctgaattttatggcttagtattcccttccaagctccgaagttgcgtgattctgtgaaaggcagtgattgattcctttgtactcatcttccttttgacctgtttcctcatgatatattggggaacaaatactaaaaagtgttttatactagctttcttgattgacatttccctataatactgatgaatttgggtgatggaaagtaatggaaattgttaaaagttctgctctcaaatctgagtctccttgccctgtgtgccaatgtttaaccatatttgctaatctaagccatattgcgaggatctcaaggatgatacttgtcaagagtttggggccttgagagcacagttttcaaaataatacttagtattttctgactatagagtacatttgtcttgtaaagtatattttaaaatacagagaagtgtgaagtacaaatatctcagtgctactatttaaaaaaacacaattagtatataaatccttccccatttttttgacagtataattttagtatgttaaacttggttacttctttctctcttcctccatcattttccctgcttcctttttcttttgtcatattcttaaaacaattttgcaaccacaggtacccacattgctggcactaccagccttgggctactaccgaggataatggagccagggccttgtagaagcacagaggaagtctagaactgagggggcctatgatacaggaagttcaggaggcagagtctcaaaggaacacctgcctttaataatgtttacagaagtggagaaaggactaaaggacttaaagacatgcaggtgtcttcatcctgattctgtctttgttattgcacaatgactataaaataatgacctaatttttttttttttctggcttggctaatggaaatcgacactagcgcttccccagtattagacttaatctaattccaaagtaacattcaagaaaagaaaaaccagtggaacaggatcagtaagctcagactctccatctccattattttagccttgaccattcttctctaatccttttaaattatcttcagtttccagttcaagttacattgcttcagttacagtttgtttgaccctgtattcagagctgcattatgattcttgtgggccctagatagttttgccatcttagaccccttcttccatacaaaattaaaagtgatattttacaattgtatctgtatgaaatgaatgtattaatattttagattaaaacattttgtttagaagttcagttttttcttatgaggctaaaaaaaattaaaacatttttgtgggcttctaaaaaactgtgggccttaggtactgtgcctaatggataagttggcattgcctgtattctgaagggcatcattggaaaaatagcagtcattattctgtccccttctcccaccaccacagtccttggagaagcctttgccactccatccaggagcactgcagtttccacggttatagatctatagacttgaacttacttccttcccaacctaacgaaaactcacaaggattacttgggaccattcatcctcaaaaaagataggaggcagtggtttgttttagtcttcagatatttttgttttggtcagtccctaatctgtagttttgaaactcgtgccacacttgaaagggaaacatcctactacctttctttcctctccatttcccacaaaccctttccttcatcatcactccctgcattcttacttctcagcatataaatacaagacccttctttctattatttgttgaaagctaggcctgtaaaatagagatggacagaccatgcatgtttccatgaagctatttaatgctgctcccagtcttctgtccataccattccttccctgcccctaggagtggggttgaggtctgtgacatgcagactgtaagcacagtcagaacctctgcagctctcaacccaacagaggagactgtggcttcaacatgccaacctgagcaggtctcctctgcattaccttcctcccatttctcttcctgggtcctgatgaggtgagctggaggaaccaatagtcaggatgccctggaattgatgttgctctgttttgtgctcacaaaacagccatgtaacacatgagcacctgagttgaagccatccagtcgcaagtcagcagacagcagttgatggaattctcagtagaaattcagtaagggtgcccaaattttattttttttttcacctatactctaccaatatatggtatttaggaaaacttcttttatccaagcacaaagaaaagcacacacatttttataatcatctgcttcatcagggtaaataaataatttaacaaatttgatcagcatctctagtttaccagtactttaatattagttttcttacaaattaatgtattttgcaatatttccagaaaatcactgtgggagaataatgtaatatactttaggatatatttcctgaccttttcttaaatggcttcatgtgctattcccccaaattctgctttctctattttcttttttatttaacctataattatactttctagtatattctgagtctatcttctaagccaccttacatttttcctggaacaagggagggaataaatagttgcctccactaaatcaggaaaaaataaaaatatcccaggggagctgtgattatgccaagagctctaaacagaagtttgagaaggtaaaaattaagttgtagtatctgagttgtttttattttcttcctttggtgtttatgaaggtattcataagaactttaatttcaggggaaaaaaatgcctgatttgctatttttgacatttcctcgtctcttaagaagtcagttaaatatgttttcatagtttatattcctgtttcatagattactgtgaaacatgtatttaaacctatgaattataaaatagtatttagattctagcgtgagttaaatagattagtcatatatcttttagatttgtggatttgacatgtaaattatgtgttgtgtataagtaagttagttactaaacatatggcatggttattgataaacttgttgctatttttttccaaatgctatcagtgtttgtggacttttaaaaattagtttgaattttggaatgttctgtgataaaatgt

SEQ ID NO: 6377 - DNA, 1184 bp, Homo sapiens
aagctcttagaagctcaggagggcccgggcgcggtggctcacgcctgtaatctcagagctttgggaggccgaggcgggcggatcacctgaggtcgggaggtcgggagttcgagaccagctgggcaacatggtgaaaccctgtatctactaaaaatacaaaaattagccgggcgtggtggcgcatgcctgtaatcccagctacttgggaggctgaggcaggagaatcgcttgaacccgggaggtggaggttgcagtgagctgagatacgcgccattgcacccaagcctgggcaacaagagtgaaactccctctcaaaaaaaaaaagctcaggcgtgggccacttcccaaggtctctacatgtcaacaagttagaaaggaccaagccccaggcctctgggggcgcctttgctctggaaaccccgcctcccggcacgggaggggccggacgacgcttcaatcccgccccgtgacgcgttaggccctgcccccgggccatcttcgtctcgcgggatctctcgggaggacggacggggtcaggtcccatcatggcggctgaagaggcggatgtggatatcgaaggggacgtggtagcggcggcgggggcacagccagggtgaggcttagagaccgggtctctctggggcggagaggggagtggattgaaggagcgggccctgggaaagctgcaggtccggcaagggaaaagggaacagaagactgtcccctgggccagggtctcttgttggcctgggaggcacctcgcccgccggcttgtcccaagcccagcgggcagggcggttacctggagctcaggtactcctgggtcgctttcaccttttgccggatgctgtgagggcaccgatttcgcctaccacattgcgtttgatttacatttagattccttcttccgttccctccttttcaggatctcatcgacagtaactagaacaagagcggctacggacgagacctgaggtcagggactcttgttctatggcttgctagccgtgtgaccttgggcgagtcgtttcatcccttcttccacatggggatagttgtaaaacttcccgagaagcaggttgacttaaatgggccaggttttagagttggacagttctgggttttccttctgcatttgctcgccctaccagttaatagcaatgtgaccttgggcaagacactta

SEQ ID NO: 6378 - DNA, 1617 bp, Homo sapiens
agatgaggaattaggctggccatcttttcctgtaaaggaacagatagtaaatattttagaattgaatgaccataaactatgtcataactcctcagctctacaattatagcatgaaaacagccatagatcatatgtaaattaatggaaatagctgtttcaataaatctttatttaatgaacaggcaagctagatttgtcctgtgaaccatggttttctgaccactgagatagatcaatagaagctatctaatctgaaaaatacagaaaagtaactgaaaaacaataagcagtctcagggacaagtggcctgatatcacaagatgtaacattcatgtcatcagagtgaaatgacagaatgatagaaaagagaagaaagagattagtattagaaaaatatttgaagaaatcacggctaaaacttctcagattcgggggaattcatgtggaggtcaaagtggaaacaggtgtgagaggtccagcagaagaaaacatggctgccaaagtgtttgagtccataggcaagtttggcctggtctaagctgttgcaggaggcgtggtgaactctgccttatataatgtggatgctgggcacagagctgtcatccttgaccgattccgtggagtacaggaaattgtggtaggggaagggactcactttctcatcctctgggtacagaaaccagttatctttgactgccattcttgaccacgtaatgtgtcagtcatcactggtagcaaagatttacagaatgtcaacatcacactgcacatccccttccagcccgtcgctagccagcttcctcgcatcttcaccagcatcggagaggactatgatgagcctgtgctgccatccatcacaactgagatgctcaagtcagtggtggtttgctttgatgctggagaactaatcacccagagagagctggtctccaggcaggtgagcgacaaccttacggagtgagcagccacctttaggctcatcctggacgacgtgtccttgacatatctgaccttcaggaaggacttcacagaagcagtgggagccaaacaggtggctcagcaggaagcagaaagggccagatttgtgatggaaaaggctaagcagcagaaaaaggcagctatcatctctgctgagggtgactccaaggcagctgagctgattgccaactcactggccactgcaggggacggcctgatcgagctgcgcaagctgtaagctgcggaggacatcgcctaccagctctcacgctctcagaacatcacctacctgccagcggggcagtccgtgctcctccagctgccccagtgagggcccaccttgcctgcacctccacaggctgactggaccacagccctgatgatatttaacatcgacttccttctgcccccaccccagaaatcactgtgaaatttcatgattggcttaaagtgacggaattaaaggtaaaatcacttcagatctcaaaaaaaagaaaaattctcagatttgatgaaagtcatagatttacagctttaaaaagctcaagaaaccccaaacaagataaattcaaagtaaaatacaccaagacacatgatgaaactgaatacaatgaaaaacatcttgaaagaaaccagaaa

SEQ ID NO: 6379 - DNA, 3835 bp, Homo sapiens
aacggcacatcaccaacaccagaagaaatctctctgttaaagtccctgctacaacatctgattaaactgcaaaaaaaacaaaacaaaacaaaaaaaccacataaaatagaagtgtccttaaaatattttgtacctttcaactaactaccagattgaaaaagagtttatgatgcgggatatcaggtattttaaaatcaacatgcatcaaattaattttgccagttgactttaaaaacaaattatagaattagccatctctctgagggagcacatttgaataattggagatgcagttatacacacatttcaaacaaacatttgtcttttgagagtattataatttcaaattggccttgtatattttagttaaatgttttcagttgtattagtaacttaattaattttcaatagctattcagtaatacttaatcttagaacattaattggatttgtttaatctttttttgttttttgttgatttatatgaaaacagtcttgaggcagggacatggagaactatgcaagggtgatttctttgacttaatatatacaaggctttacttctgtcccctaattcttccattgaatgtgtacctctaccttgtcatgtcatggaagatacaacatttggaagatctgacaattggaatgactttggaataataaaattgactaattggaaattttgcatattctgaaaatctaatctcatagttctaatttgtacctatggcaaataagggcttctggacatcatgtttaaaatgttaagcataagaaataaactgacatttgtaataggtgactttctgatggaaagcaagctatatatatatatatatatatatatatatatatatatatactttttgtgaaatgtctatatactttttaaggtaattaatgaagatttcagttattgcttttaagcataaagttgtatttagcttctgctgaaaaattgtatcatataataattttgcttcattgaaaagggatgttgcagtgatgaaacaaggtgggatcagtttgattttgtttacttattaaggagtttatcttgggctcagtttgtggtattcagttcgtttctgcccaaagctcttattttcagaggtgttacttttgaacttttggggtcatttttaaaagttagcacttttgaattttagttgtgttaaatatgtgctgtcgtatatcatagccatgagccatatatgacaatttaaatttaattaattataaactcagtctcttggttgcaccagccacatttcagatgctcaatagccacatgtggctagtgggtaccatattggacagggcagctatagaatatttccatcattgcagaaagttctattggatagtaccataatctttttatagtaacttggaaatactatttgatattagatgttagaccacaaaaagaagaaaaatgttaggactatttcagatataaaaaggaactgaattgtgacataattagcatcttacattccatacagttgaataccttatgctgtgacaaccatagttaatcatttcagtgctgttcaacatacatacctatcagcagtgtgtttagaccaggggtctgcaaactttctgtgaatggacaaagagtaaatactttagtaaatgtcttaggctttgtggcctacatgatctttgttgcaagtactcaactctgccattatagagttaaagcagccatacacaatatataaacaaaatgggcatagttgtatttcagtaaaactttatttacaaagacaggcggtaggccagatttggcttgcatgctgtagagctgtggtctaaattttattcatagactttctttgcaaatacagtgtgagtattgttccatttacagtattattattttttagatacctggtttttagattcttgcctggtaactttttactgaaaatacaagaatttcgtactgcatttgcatctccgagattagggagcacctgtcaggatatgttgttctatcagggttacttctgttgactacctcttagattttgatacagttatattgttgagtttcattttcatatattcttgtagtgtctgcttgcctgtgacttctggtaaaataaaataagcctttgaaaatattttagcatggtatttaacattttctaaatattatggcattttgacatattttagtcagcgaagacatctgcccctttggtgtttctacttgcttatgattgagattttacaagcccttcaaactccgttttaaaggaatttattgtaaaacattaactttaataaattagtgttttcacagatcagatcattatacttggaacttctaaatcatgcaatttctgaataaggacataaggctagattcatttttcttaatagagaaaaaggaaatttctgatttatcacttttctagttgataagtaggattcaaaacgtttgatatgtaagtatttatataagactaatgtaatttaaagttctgtattattgtgattaatcatacagaaattcaggaactgatcagaagtgagattcttttccacatctggttaatgtagtgagttgacaccctgtgggtggtaaagcattataaacatttcatcttgaaccatgatttatacacatctgtgttataagggaggcttgagtacatataccaatgaagagatattcagcatttgtctatttgataaggaattaaatgtcctagtgattataaagtaaaaccacagaccaatttgcaaatgatcttcaatgttaagcacttgctctaagattaaaattccttttctttttaaggttaagggtgtgtacgtatggcagtgatgtctatgttgagattaacttatgtattgaggaaaatttgaagtttattttttcgatgaataaggctgtcaaatgatttagtatagattaatgacatcttttttagaaatattaaagtgagtattcctcattatgtcatcatttctgataattagagtgctaatttgaatgttagataatgtttccacatctatacctatttctttctagggcacttctgaccctggggcttggggatggcctttaggccacagtagtgtctgtgttaagttcactaaatgtgtatttaatgagaaacattcctatgtaaaaatgtgtgtatgtgaacgtatgcatacatttttattgtgcacctgtacattgtgaagaagtagtttggaaatttgtaaagcacaaaccataaaagagtgtggagttattaaatgatgtagcacaaatgtaatgtttagcttataaaaggtcctttctattttctatggcaaagactttgacacttgaaaaataaaaccaatatttgatttatttttgtaagtatttaggatattattttaaataaatgattgtccattatcaatataatagttgtgaaatgatttaagtaaataaactttatgcttctgtgtctgttgattttgatgggtttttagtgggcataaatgcatgtttatttgctgcattaaatagaggagtgaaaatatgtaggtttgtaaagaaaaagtaattgcattcttctaattttgtttttccttttaattttttggggaatgaaaagatatattaaatgatttgggaatatgtctttttatgtctccattttcacctctggaacctagacatcttgcattaacacggaatcaaaacatttctggggccgggcgtggtggctatgcctgtaattccagcactttgggaggccgaggcaggcaggtcacttgaggtcaggagtttgagaacagccttgccaacacggcaaaaccccgtctctac

SEQ ID NO: 6380 - DNA, 1106 bp, Homo sapiens
ttccctttagttatttggttggggactctgggaagaaaaagttggtgaaacaccaggtggtgcacaaaacccaggaggaagaggaaacagctgtgcccacaagtcaaggaactggcacaccctgtctgaccttatgtttggcctctccctcaaagtcactagagatgagtcatgatgagcataaaaagcattcacatacaaatttgagtatttcaacaggagtcaccaaacttaagaaaacagaagaaaagaaacacagaactctgcacacagaagaactaacatccaaagaagcagacttaacagaggaaacagaagaaaacttgagaagtagtgtgattaatagcatcagagagataaaagaggagattggaaatttgaaaagttcccattcaggtgtcttggaaattgaaaattcagtagatgatctgagtagcagaatggacatacttgaagaaagaatagacagtctagaagatcaaattgaagaattctctaaggatacaatgcaaatgaccaaacagataattagtaaagaaaggcaaagagatatagaggagagatctagaagttgcaacattcgtttgataggaattccagaaaaggagagttatgagaatagggcagaggacataattaaagaaataattgatgaaaactttgcagaactaaagaaaggttcaagtcttgagattgtcagtgcttgtcgagtacctagtaaaattgatgaaaagagactgactcctagacacatcttggtgaaattttggaattctagtgataaagagaaaataataagggcttctagagagagaagagaaattacctaccaaggaacaagaatcaggttgacagcagacttatcactggacacactggatgctagaagtaaatggagcaatgtcttcaaagttctgctggaaaaaggctttaatcctagaatcctatatccagccaaaatggcatttgattttaggggtaaaacaaaggtatttcttagtattgaagaatttagagattatgttttgcatatgcccaccttgagagaattactggggaataatataccttagcacgccagggtgactacaaacaatatgctttcc

SEQ ID NO: 6381 - DNA, 1617 bp, Homo sapiens
atgagctatacaacaaagcctctaatcctgataaggttgctagtacagcgtttgctgaaaatagaaattctgagactagtgatactactgggacccatgaatctgatagaaacaaggaatccagtgaccaaacaggcattaatattagtggatttgagaacaaaatttcatacgtagtgcaaagcttaaaggagtatgaggggaagtggttgctttttgatgattctgaagtcaaagttactgaagagaaggactttctgaattctctttccccttctacatctcctacttctactccttacttgctattttataagaaattatagagtgagtgtattttccttgtgtatatattaaacacacccatacaaacattggtaaagttgattacatcaaagaatctttagcttatcttttgaagctactggatattattggtctctctaggtttttatataaatagtgaaatttgaattactgaaaaccatgttaatttttagaactcattttcctcagtagagactagtgatgcattagcttctgggaacaaacttgtatcggttcttaattaaattatccaaaacggaggcatttaaacacttggatttacaccagtcttttgtgtttgctttttaaaataaagtgctcgtatttgtattctccatattttggagtaattatctacatgatgtttatagttcctgtggtttttcacccaagaagcagaatctcattcagtacatttagttttataagagtcatgaagctaaatccttgggctatgtcagaggcacaaagtctagaatgtgtgtattcacaatggtgtatgtacattttgtgccttgattcacttagaagtgtctcagaaaacctggacagttcgcttctacacaagaattttatatgtatttatgaagatgattctgtaccctagtatatctttttgggcatggactaatttgtatctgtttaactcatattctgcacgatctgtatatagtacatcaaacttagaggtgtgaccttaaatttaactttttttaaaaactgggaggtcaataaaatttaaactgcttaactatgtatatgaatatttgaattttttacttgtatatttttataaatacagctgagttttcttaaagcgaataagtgtgtgtatatatatatgtatatatatgagagaataagcatgcataattacctttattactgaatactttctgacagtgcaggagtttttcaaagaggagaaattgtgcttagtccagccaagctgtcatacttaaaagaggtttataatgaaatctgttgcatctaattgtcctttaaagtagacatgatttaatggaatccaaaactggaaaagttaagatgatgctttgggcacacataaaaacttggttaaaatttcattttaaactagtatactgaagtggtaagtgatgaatgatttcatgacttgttaatggacattcttggtactaagtttttcctagaaatgattctaaatatgtaaatgctattggggtaacactttaataccccatttcaacaaggagtaccttctcaattaaaaaaaaatcgcagtaggctgggcgcggtggctcacgcctg

SEQ ID NO: 6382 - DNA, 1249 bp, Homo sapiens
gcttgctgcattggtggattagcggcttggggtggcgaacaggtgggaaaaagggatggataaagtaagcatagcagaggcctttacgccgctgctatcgctactgccaatcgcaaggctttcgtatcccggaagtggctgatctgttggatttgacgcggaggcggttcctcttactacggtggccggggtgctcaaagtacctgtagctgcggcgctgaggtcggaacgtctgcgtgtgtgcgggctggttttgtggcggctgctgctagagctggagcatttgccgggttggtggctcctgcacatttttacagttctccagtccttctctttcggtgagggatcggcttgaggctaaaggagtcaagaagtttgggacttagcgtctctggtccccgaatgactgggtttcttgcgggggtccgccttcagtgaagaccctgtggccaaccatctgggttctctgagggttttggcgccttccttgtctctcctttctagtgtcatttgtcttctaactcttcctcgctttgtcctgggttgcagagataaaccgtaagcctaactgtgggcagctgttcctcctttccttgtggttttcttagatgttgcaggcaagactctttcccctgatctatcgcatccatttgacccctcctcatgccagtgctctgtcggccctgtttttcctcgtttaaaaaataaaaaaagggaaataataataataactggatccccactgtctctctgttctcattcctagcctctttctccctttttggtgtttgttactgcttcaagccataacacactgccttgcatatattaatgcctttccatctaaatattaacgttcattcacttcatttggttcccgctcaccgtgaactctcccaaccctacccacatctaagggcttttgaggttggaggtgtagaataaattcttacatatgatgactatattcatatatgagaaccttcagcggtcaactcagcatcactgcttattgagtttatatttcttgtgatttctttggcttaccttttcgttttgtattggttatttacccacatggggctcactgctaccctatagttacagaagaatacctcgtcttacatctttttatatccgaattacttaggagttttcttatgttttcctgctcggaccatatgtccccggtgggtttttggcaatgattttgtgtcagttgatggcagaaagagacaagggaatgatc

SEQ ID NO: 6383 - DNA, 1186 bp, Homo sapiens
gaaaggtgtttttgctgcatataggattctgagttaatgattttttttcttcactactttgaagatgttgctgcactatcttcttcttttgtttccagtgagaaatctaatatcgtccttgtctgtgtcccctcttcaaagagttaattatgtatagaatataggatattattattaataacaagagtattgttgataataccttatattagttaactctacagtatgtaaaacatttcagcattcattctaacttgattttcataggcagtcaggaaaatctaacttgattttcatatctttattttaaaagataaaattagaaaaaaaggattggaaagattgtgacatacttcacatcttaagacagtaatgataatgtttgttaccattatagacatttctctggttatctttagaccgtatgtttattttttagatgaagataaaacgttacctgcagagtcgggatgtacaatagaggatcacgtaattgcaggaaatgtagaagaatttcgtaaagatttcatttctagaatatggctgacctacagggaagaattccctcaaatagaaggctcagctttgacaacagactgtgggtggggctgcacattgagaactggccagatgctcttggctcaaggactcatactacactttcttggtagaggtaaatcaaatttctgtttttgttttgttttgttttgtttttttgtcgtcgatatttttccatttgaattccagcttacaaactgcatgaaattccctgaggttaatttcttgactgtgagattttctaaggagttgtaactaatttggtgtattgcattttttttgaactgggtcagatatgacttatatgtaaacttccctgattcccttttcaaaaatgcaggttaaatatacctgttattcttggtcaccattatgagttaagttagttcaatttttagtaccctttggattttattgttcttactgtttctttccttttggttgaactctggattatctccagtttagttaagtcctgggcaggttagtaacagtgattttgaggacatatgtaatatttttaaaattttaagagactttactctggtttctttattttctccctacatgtcaataatggtttaaaagtatttttatctttattagtgtgattatactcaattatatt

SEQ ID NO: 6384 - DNA, 1388 bp, Homo sapiens
cggcccgggcctgcagctgcagctcaatagcctgggcgccgccgcggccgctgcgggcacagcgggcgccgcgggcaccaccgcgtcgctcatcaagtccgagccaagcgcgcggccgtcgttcagcatcgagaacatcataggtgggggccccgcggctcctgggggctcggcggtgggcgctggggtcgccggcggcactgggggttcagggggcggcagcacggcgcagtcgtttctgcggccacccgggaccgtgcagtcggcagcgctcatggccacccaccaaccgctgtcgctgagccggacgactgccaccatcgcgcccattcttagcgtgccactctccggacagtttctgcagcccgcagcctcggccgccgccgctgctgcggccgccgctcaagccaaatggccggcgcaatagggacgcgccaatggccgggacccagggtccggcggcggcctcgagcaacaaatgcacctccaggctgcgcgccctgtcccaagcccggtcccggtcccgctgcccaatcctggactctgcctctccccaatttcctttcccctgagcccccaacgcctaccttccgcggcctccatcccctcgcgcacacctaagctggtcgagcaaactcaccgcgcgcccgccggggatagctttccatacaggtaaaaccgaaaaccgaattttccaaaaatgcaccccgacggcgcctgctcttagtaccgtggggatgggagggaaattctttgtatatatttgtaaaaaaattattgactttccttttggggtttttatttttttaagaaaaaacaaattccgtagatttagagctctgaactttcattttttttgaaggttcactctccgaagttttatctgagaaaagaatgtatagagacgttgggagattttaaatataaaaaattttcaaaaaggcaaaaagtgtcattctattataaaagtctgtttatatatgaatgaatatatatggtattctaaatgttattccatcgtgttgtacacaactttgtaaataaatttttaaaatgcccagcctagtgttttatttagttgtctgaagtaaatggcaagatttttaaatggtatttatttgccttttctcctccccagaaaatcaaggaatttcaagtaatggccttttcaaactttttaaattcataatttgagtgtaagaaaattttaattggagaaaggaaatagtatgcctaatttaaattgtgttactatttttcttttagttttcacataaaatcaggatgtgagtgatatcattcatatcaacccattaaatctaaatgaccagacatttctgtagataaagtaagctgtcatttaaaaaaagaaaccgaaacaacagcag

SEQ ID NO: 6385 - DNA, 1162 bp, Homo sapiens
tttatctgatccttttcttaagctacttgtttgtatgatagagaaaaaaagttccattaacggcatactggaagcagcagttttccaattattatgaggagttgacacctctgtgcctgtgtctaggctaatttagtctggactgttaacaaaatgaatcagtagtccatatgaagaccttcctggctgtttttaagctaccgctgaaaatcagacagataaaatgtatttatattttttacaattaggagttgaagttatattctgtaatattaaaatatttttttctttacgattttagaccagtctgcttagttttaagtgaaattccttttatgtctacttggtttttacttgtgtcaacatttaggtaagtcatatcaatttccatatattttcagtataattcttgtaaactaatttaaaacttttttatgaagtggttatggtttgaattgataattctcttgtgatttttaaaaattttcctttacagtatgctacctcttctattgaaggatgaactcctaatgccctctgttgtgacaacaatggcattttttatagcttgtgtaacttccttttcaatatttgaaaagacttctgaagaagaactgcagttgaaatccttttccatttctgtgaggaaatatcttccatgttttacatttctttccagaattatacaatatttggtaagttcaatttttaagaaatgacacatttttcagcatgtcactattttaaaaaattattgaagtagtgattttcttttatacctttttgagatataattcacataaatccactcatttaaagtatacaacttagtggttttaagtatgtaaacagatttgcacaactatcaccatcatctaattttacattattttgtcactcccagaagaaattctgtacccattagcattcattcccaattctattctcactcctaactcccttccttggacagccagtttctgcctctttagatttgcctactttggacattgcatataaatggaatgtattagtctgtgatagctgccataacaaaatacaacagaaatttattttcttacagttctagagactaaaagttcaagatcaagatcaaggttctaccatcagggttggtttctggtgaggcctctcttcctgg

SEQ ID NO: 6386 - DNA, 1198 bp, Homo sapiens
aactgggctctatctacatctgccttcctgggccaaacatttataagcatcagtgagagaagattgcctggatttgtttactttgtggtcctgaattttcagacaagcgcaaattcccatgaaagaagaacagacaatagctgtatcccagtagatcatttccctgttaccacctgtgctgaatttgcatttcattcattcattcatttattcagtcagtcattcaacagatcctgttgaataccatgttcagagaaatgtgtggactaaaaggatgatgcagacccaagagttgtccttaaggagcttacagcagagtgggaattttaggtgcccagatggaaatttgtccatttgggagtagtgtggggtgggaaggaaagaattagttaagactaaaaaaaaaagttcttaaaacttcatcaccctttagccattgccctattgctcttctctcagccaacctttgtaaaagctttctgcattcactatttctcattctcacctccggtttactcgccatttcactgcttctgccccctccactactccagtagaattgctcttgccaaagttactagggacttgccagttgctaaattcatggaatacactctggtctaatcttatttggcctttctgctgcatttggcagtgctgattttgtactcttgtaaagttcttcctcccttggccttgcttactctcctgattctactcacactttttggaagttccttcatgggctgcacattgactatcccctaggtttctttcttctttctttctttcttttttcttcttcttttttttttttttttttttttgagacggagtcttactctgtcgcctaggctggagtgcagtggcgcaatcagctcactgcaacctctgcctcccaggttcaagcaattcgcctgccttagcctcctgagtagctgggatgacaggcatgcaccaccacacctggctaatttttatatttttagtagagatgaggtttcaccatcttggccaggctggtctcgaacttctgatctcaggtgatccaccctcctcggcctcccaaggtgctgggattacaggcgtgagccactgcgcctggcctattccctaggtttctacgctcaggttgttctctgattttgttcactctctctactcactcgggatttaaatatgctactctttctcttgt

SEQ ID NO: 6387 - DNA, 1237 bp, Homo sapiens
ccttggtcttttatgatgggagatggttgctagcctgcatttagggatagctatgcttatacagaacttctcacacagagtagtactgcttccctgggtttggaagcatttttgattttgccagaaagattggcagggggtggggtggggtggatgcatgtgaagccgggggggtgtgctacaattggcacttggtgctccctgaaccaaatatactaaatatcttgtaatggatgcatcagtcctacccagggaataattctcccactccggagacccagtatctcctgtgtgggatcccccatctacaagtatacatgtaaactttcccctgggccactgcagtgtccctctgggaaacatgaatctgttcctggcacctctctagacactctagaatggttcagttgttttatccctatacatacttgacctccagaacatgctatttatgctactcccaaagcttatagctgaaaacaaacatttctaccctatttttcttcccttgaaatatcctctggctctgaggtcatttaaggaataggcagcccttgcagatttttgtaagtttcctcttcgcatgaacaataactgcaaaatgatccatctgatctggctaccattgttgaaggcaagaggatacaaagagcattcatcgggccaggcgccttctcaagaagggctcatcaaggtggaaaaccaagtggcacatacttgtggagaaagtttgaaaggagtaggggttaagggagtggtagggattgaggaaaagcctaataacatggtaataggagataacagactacaaaacccctgtgaaaccaggaataaaagagccccatgcttcacaaatacaagattgaatgagtttcatgtttaatgtaaatacacctgccatttgttctctgaagcactggttacaggttttgagataaaatagagttttgaacattgtgccagtgtaatttgcctttgcccaggcatagactgtacactttgttcctgaacagtccttagagacaacatagtgctctgatcagctcaaaggtcccacctcctgatgtgagacctctgcttccacctggcctgcatctgagactccttggctattgacagagtagggggaagtgagacagtggcccagggtgccagtgatctcatggctaaagtggatcattttactctcctgcattgaagttactcactgcattaagggtaaagagcaaaaccctca

SEQ ID NO: 6388 - DNA, 1128 bp, Homo sapiens
gtcatatgactaagtcctcaccaagaagatccaagtagaagtgttttctggaaccccaagaaagactcctaaaaggtgaagaggaagaaccttcagcccctccccgctgctctcctctccatccttcctgctgtctagaatgcagacgcactgcctggggtaccagcatccgtctttctaaggatggcagagcagtaagatagaagaaatctggccttttctgaccgtgaagctactgtatcagtcttatatttttttgagcaaaagacacacttccatttatactacttactttaattttaactttttggatacatgtagctgagcctagtcctaactgggacacttaggaagtgttcaggtatgtaatctcttttgactttaacagctactctgtaagatatgatcatccttatttgacaagtgaggaaactgagattcagaggtattatttgatttctttaggggcatatagccacctaagtcttctgacagagttcacagctctttgctaccagatcccacttcccttagcaggcacacagcaaatgcttattaaatggaattcgcccaaactgcactgtgtttctatacctgctttgggttgggtttcatagcaagagttcagtgtcttgttggcttccctgggataaataaaatcaattctatcctctttcttcatacatatacctacatatgtatatgtgtgtttatataaaaactgacatagcagtctgaattcaacttacccattccaccaattcttcatcaaatatttatacaaatcttattgtatgtctagaactgtgccaggagtagtgaaaacaaaaataaacaaaaataaataaatcacattcccttccccactcggagcttacagttgatcttcgagggttctgacgaatttatttcccttcctaattctgaggtgatagtagattaatatgccactttatcagtttgtatgaaattagttgggcttttcaaagaaagcccataccctcagcagtggggcagttttgatggcacaccatgtgctgatattaacacgtggtggtctgatttaagttgtgattcttggtttctggatgtgtgctgtcacatttcacctactgtgtctgagcacct

SEQ ID NO: 6389 - DNA, 1107 bp, Homo sapiens
tctcccaggcatggaccatgctcagctggttgctatcaagaccttgaaagactataacaacccccagcaatggacggaatttcaacaagaagcctccctaatggcagaactgcaccaccccaatattgtctgccttctaggtgccgtcactcaggaacaacctgtgtgcatgctttttgagtatattaatcagggggatctccatgagttcctcatcatgagatccccacactctgatgttggctgcagcagtgatgaagatgggactgtgaaatccagcctggaccacggagattttctgcacattgcaattcagattgcagctggcatggaatacctgtctagtcacttctttgtccacaaggaccttgcagctcgcaatattttaatcggagagcaacttcatgtaaagatttcagacttggggctttccagagaaatttactccgctgattactacagggtccagagtaagtccttgctgcccattcgctggatgccccctgaagccatcatgtatggcaaattctcttctgattcagatatctggtcctttggggttgtcttgtgggagattttcagttttggactccagccatattatggattcagtaaccaggaagtgattgagatggtgagaaaacggcagctcttaccatgctctgaagactgcccacccagaatgtacagcctcatgacagagtgctggaatgagattccttctaggagaccaagatttaaagatattcacgtccggcttcggtcctgggagggactctcaagtcacacaagctctactactccttcagggggaaatgccaccacacagacaacctccctcagtgccagcccagtgagtaatctcagtaaccccagatatcctaattacatgttcccgagccagggtattacaccacagggccagattgctggtttcattggcccgccaatacctcagaaccagcgattcattcccatcaatggatacccaatacctcctggatatgcagcgtttccagctgcccactaccagccaacaggtcctcccagagtgattcagcactgcccacctcccaagagtcggtccccaagcagtgccagtgggtc

SEQ ID NO: 6390 - DNA, 1144 bp, Homo sapiens
atgttctggaaagaaaaagaaccggcttaaaacccacagcaagagacctcccttgtgtttgtgctttgtgcagagttgtttgagtcatttcctgcctgtcgacatggttaaaaacgagagaaacaacaacacagtcacatttgtgaagatgtgaggctggttctgaaatggaggggaaataagcctgatgaacagacctgccataacactaatggaaggtaacagaaggcgaacctccaaacacagagacggaacctgcaagtgaagctgagccagaggaatgttccaaagagccagaagcattcagctctccttaactggaagagagaaaaatctgctcacccagagactggaatgtggcacatgcagatacaaatgtgtgcattgaagatttcgctttgtttcttagcggtacctggataccacagttgctgtatggaactcatgttatgctctaaacgatgcatctcagaatttctaagtaaaggattatttttctactatttattgaactttcaaacattctcaaactttggggaaaaggaaaggaaacacaggagaagttttcagcagttgccccgagctgttttgtgtgtaatgaagtggttctttgattaaggagctctatttcttatttaactgatatcccactgccccactccacaaaataggaaaatgaagaaatctttctctctgacttgtttacatcatttcacggaaacacatctttgtttgtaatgcagtattctttctctgtgtttgacagagatggggaggggcagaggaatttaagaggttttaaaagaaatgttatgtttcttatgacttgtttccactcctcgtacaatgctattcttaggtttctacgaaacctaatgttagaaccgcatcctttcagctaagggagggttggatttattttccttgttttagagactacaaatttttaaatatcccattttgactgagaatattgacatataagggaagaagttttctaaattgtgaaagtctggttcttaattaaagaattttttttttaatatcacggttaaaagctgctgccagttagccaagacattatccaccaaattgctttgtgatttatacagggattaatcaaatctggctactataacatggg

SEQ ID NO: 6391 - DNA, 1285 bp, Homo sapiens
taaggagtcacagtatttataaccattttgagctaataagctatacctcactctctgctttctctctcactctttttgatagtgtgttagggtgaaaaatcagttatttaacccaatttacttgtgaaagaagttttatctttatggactatgatgacttttgacatcaccatttcttgaagaccttggtattaaatgcatgagaaaccttttgccatctagaaatttctaagtttgtttatgttataagactgtaattaattgatagggaatttgggatctcaatccggggctttttgaaatcagatcattaaatatctcgtcactttggggacttgttatttttaactatgatgtggatatcctgttttaattatgaagtctagaattggtacatatgttgtatgctttgtaaagaatttcacttggtctaatttattgcatatactagcttctgttggaaaatgactgacagctagaaagtttaaggtaatttctaagtatactacctataagtaactgataagaattaggcatcattcagtgatatagcagatgactaatgggtttttcaggccctgcacttctctttcccattttcctgttgcattcagcctcttcaatgcttagtcacacctccactatagtacaaacaaacaaacaaacagaagaaaggaaagatggtgaattttgcaacagagctgcaaaaagtcagtcagtcaaagcaggaagaggttgaaggaactaaaacaaacaaacaaaggtgtctggactacagcacagtggacatgccatccatactggcctgtgccccgttatcaatcactgggcacaacagtgaagaagtgcaaatcaagtggtgtttgtttgtttgttagtagtaaggaccgtaacccaccccttcctccccccaaaactatactgttatttttctatgtaagcaaattgtttgaaatgctttgaaaatgaaatcttaatattaaaaggcatatgcatgtaaagtctttagtatatttatttgtataaagagtaaacaaagtgcatatagagtggccacaggtttgacacagagaccttggtgatgtaggctatgaacaaatttaaatggcaacttcattgctgccactgaaccaatcctgaatttgggctcaacaggtgaaaagtaacaatatcaaacgaatactaaacagcataacaaaaagattttcagactcttggtcataaagaccgtaatcgttcacattgaatcaatgactaaacatttttgattacccagctacctcca

SEQ ID NO: 6392 - DNA, 1198 bp, Homo sapiens
caatcctccccacctcagccttccgagtagcaggaaccacagacatgtgccacaatacccagctaatttttaaattgttttgttgagagaggtttcattctgttattcaggctggtctcgaactcctgggctcaagcaatcctcctgccttggcctcccaaagttttgggataataggcatgaaccaccatgcctggcttattttattttaatgattgataaataggatgtgtattttaaaaaaaaccctcaaattatattcagaatgtttaacatagtagggaagatgccaccagtagatacaaaacaaaaactaacagatatattctatgttagatttcagttagcaatgagtaaatcaaaaaagaaggcagtttctcaaatctagaagggtttattacgtagacagtgccaaaggtgctaggtaaattaggttttactcttatttttaaggaaaaatgactaacaaaggtgcttttatttaatttaaagtgccatccaaggtatataatttggtaggaatgtatttgactttctgggaaagttaatgtgaagatactgtgttgacctcactgattcagtttacttagcaagttgtgggctattggcagaggcaccatgtatacctgtttgtaaaacggtgtcttcagagttgtgtggaaattaaatatcttgtaaatcagataatactccagggagttttgctggtaaggaattataagagtttaaagggactctcaaatatgtattcagtttctatggaatgcccttttacagtttctgtttccataaacatattttgctttcctaaagcaagatttacccaaaatgtaaaagtgtgcaaagagttggcccttcctcctaatcatagatgtgtgttttaaaatattttaaatgtatttccttcttggtgatgtatatgttggactggtttcttgggtctgggcattatttatactcaagaacagttgttgccacgtgattggaaaagcgctattgatgtcattctcatcccatatgctttgacagcaaaggagttagctgtatcttcccttgtcttcccactctagaatgagaaagacaagaaagctccctaatttgatttgtatggagggggagtgggtaggaaagtccacttcagctgaaaaggctgacctgtaggtatttaaaacataaatttaggtctgttattttcaca

SEQ ID NO: 6393 - DNA, 2918 bp, Homo sapiens
ataaaatgtattttgaaagtgctgctaactattgatgctgacagtgtttcactcctatgagtgacccaaacatattataaatatgtggtaaagggaatggagcctgtggggttgagcagaatgttgtactagctgtgcctggactgagtataacagctttatgattatgagaaaacaaattctttattttttttttctgttccaaagattcatcctatggggtggccataaagtctagaattagatactaatattttgtcattcattataacatatcaataaaccatttgttaaaagatttgcctggtttccagacttggtggccaccttgaataattcttgctgtcttctgggaaggatgatgaaatttattcctgctgccttaaaaatatgtatcccttcttcacccatcatgactgtccccagtgagtgtcctttactattcttgggagtgactcctgtctaacttttcatactggcgagaagaaaagaagcctattttaacactttagtggtgttgaaacacattacttactttctgaagatgtcccagtgaatcctctgtcaattcactgccatatgtaatctatatgataaggaatgcatcttccttctaagtactgcccaaactcttgccagctcctctcccattgtcccttcatgtgaatatttcttggctaccttagtggaaatatagatcagttttctccccatccatcctctcaaacataatgagattgtttactttttagatttatgcagtgaaaatgcccagtcaggtctgaatcgtcagtgcattatattgactctgagcactttagaatttagagttgcaattgaatgccagctgtggagatggggtgcatatcagatatataaataaagctcaggtttgctagggaaccaggtatagagaaaaataagtctgatatgaggaaaattgcacaatttagagtagttatgccgtagagaaaatttccacaaactaggaaatgtagagagttattctatagaatactcaaaagaggaaagtatgtgatttttggaaacaggaaaatcttcaaacttctttcttcacttccctttgtgtttagctgaccctccaatgtgatcattgcctttggagtttgggagaggtacgggaagtggcctgatccctgcttccatacttcactcctccatccatccttccctccctcttcccctccagctaaatggacaattctagccaacattgagtcactcaataagtctcaacagtgggtgtgtttgctgagattgtccagcggttgagcagtttggtctcacctccctcgctagttgagaccaaaaagagacaaataactttttcatggtctttgaaacataatgcttatttcgtggtcaatggctttaaaaaaatctgtttcttgttttcttcaacaaactcactagttttcccttaaatgatattgtaaaaattaaagtaatcttgaaaatgttttgacaaaagtaaaattaaagggacatcttttcttgttttgttttttttttttctattgccacacatgaccgttccttcacctttaagcaaagagagtggttcagatggtttctaagatgccaacctgacctcgcattctgtcattctacccagctcttaattcaatttgcttccattatcctaacaggcttctttcttacttagaacttggaaaggctgctgtatttaataccctccaacactaacgcagacttaagataggtactgtttattgaaaacctactgagtgaaatgtgcggttttaggaccttcataaacatctcatttaatctttctagcatcctgtgaaacagccatgatttcacgttgataaacaaagaagacaggggtcccagggatgtgaagcatcttgcccaggcttctgctgctggtgaccagtgtagccaggactccagcccaggttttcctgactcagaagactgagctttttcctggatgttattaatagctaattgtgtccaagcaaccaagggccttgagtctgcttggttctgcttatggcctcacatcaagaaatggagctagtccatgtctgtagtcccaatgctttgggaagccatgatgggaaggttgtcggaggccaaaagttcaagaccaggctgggcaatatcacaagactccatctctacggaaaagtaaaaaattagccagtcatggtggtgtacacttatggtcctagttactcaggagacttaggcaggaggattgcttgatcctaggaattcgaggctgcagtgagctatgattgcacctctgcacccaagcctgggcgacacagcgagaccctctctcttaaaaaaaaaaaatagcagagctcaccaaagtgatgttcacctttttatgacattcctttttcttagcttaagaaaagaaagctgctagatgagagtcttagttttcctgcataagacctcctttatgaatagaataaaagactgtcaaagtaggctgggcttgggcccaggctaatctatgaaggaagcaagctcgtgttccttacctatccttttggtgtccattggattgtgccccgaagtggcctttacccttgagccgtccccagccatggtgctcacacataggcttttgagctccttggagctatccagatcctgctcacttttccttcctgagatcagaacaaatcacccccttactcccactccaaacaaggccttgatgataaactaatccttcctaaaatgctggtaggtaaacaagcaatgatgaagcattgaacacaggttaactcctgacttttgtaccattgtctattccattacacattaacatgactctgaatgccagatccaaacctttgcccaccatctgcttgtcgtgcaacagttgaggcagtaaccaggggagattcact

SEQ ID NO: 6394 - DNA, 1819 bp, Homo sapiens
aacaacatatttgcttcagcctggaatctgtttttggtgctttggtgcagagacaggaaatgggcactcagagtcacactggtagttgcacactgtatctacagagggcgtgtctcatctgtactctgctgggttacaggatttcagtaggtatttgtgtccacctgagaattctgtttattacctttcatttgacagtgtctttcctttctgcagttgattttgctagagaggcaattcataaggtgaggtcctgttcatagtatgacttgctttctcaatatctccttcaatttttagtaactcttggtctatttggtgtctttaaaaaaaataacctagtaataaagacttcttttaatgtggaaatgtggtctggtagtaagttatttctttccacatgtaactgacccaatctggtttccaaatgagaagtgtgcaggccccagaggttgagaagccatatttcaactgtgaaaaaaatctgcttcctgcatctgttgaaatatagttgttcatacttgccatcccttatctttcttgtaacaatttgcacagttcttgccagaataaatgccattatctgtatgtttcagggagttccccaatttgatcatttttgtgtgtgtgtggtgtgtgtgtgagagagagagatactgcagtaaaacatttctaaaggatgaaagctcttgtatggcatagatatgaattccttcctctggtaataattaggttattcccagaagcacagtgtcattctttaaataaaagctttcctgtttaaagcttttcaaaggagcagaccaccttgaagattccccctagggttgatatgtgtctaattcattttataaaaattattcttgtcttcattttaaagctttggctatatagtcagaaatgtcctaaataacaaactattttgtatttaatttagggaagactaaagggaagaaaaatgaaaactcagtctttatgtaagctccaaggatattagggcttaaagggcttttctagttttatgagaatttgtactactgatttttatatattcctgtttttgagatgaacagatctctggggaaattgttgagttacaatggcatttcactgtgatccctctcaagctcagatcagttctataacccaatgacaacctgtctctttggtttactgtcctgtgaaatgtcagctcaagtttcccagaagtcgtgtgtttatgatgagtcagagtgcttttcctcggtgggacagttgctggccctcttaattttggtgtatgtgcttccaagtatctaaacctccagtctgatctgtatatgctatcctaactgttaattgtattattgattatgttgattatcttgcttgaaggttcatacttttcaatttgatagaaataaagtttttttctgcttatagctagcgaattcatttgtttgtatagctttttatacttgataatataaagtttcacaaatactttcattgatgcgtctctgcaaccactacattaccaacaatgttgtctccaatttgcagaaaagcaagatcttgaaccaagaattattatccccagtcctgttttcttttctgctacaccatattgccttattcgtatacccttaaattccttatttgtccagcactttattgtttacaattttaatgtacattctttgtttttttccccctaaccactagacaaccagggatttttctttttcttgaaatagataatgtgagcagattctctccctgttttacacattaggaaactggatcagattatatgactcttaaggttgtagcatctggg

SEQ ID NO: 6395 - DNA, 1153 bp, Homo sapiens
ccttcacacctggcaccattccttttttacagcattttagaaaaaatttttttcaagtttggaaaaaaaaagttttgtcaggctgttagaattcccgtagcagtagaatgcattatctgcagtgtttgttgagatgcaaaaacaatttcagtacttcagacttttaaataaaaggctctatttagttcatgtgaaaacttttaaagctctgcccttcccccttaaagctaagagactgatatactgattgccagtcttgttttcctcctctgggtttaggggaggggattagggccagactttcattggataaaggtagttgaggctggggttaggctcttttcagaggaaaaatcaagatattaacctgtcaccagaaggaggagggatggatggtgggtgggttaaaacaacagatgtcaggtgtacataactgggatggactttatctgctgcactattggtgcaaaatcctttcctcttatgtgtctcctggtgttcctaaggaaagtataaggaagtcacctgcagtttgtagggaatgagctatttactcatgcatgaactgtgttctctagttaaaaagggattgaaaagaagaacaatatcagagtccctatccaaattatgaactccttgaggtcagagattgtgtcttgtcacaattatacctccagtgtttgatatggaacctggcatacatgagtcattcagtgaatatttgtgagattacttggttttttgccttgttgacttaagaaaactttttattttgaaataatcatagatttgtccgagagattccaaagaaatgtacaatgatatcctatgcatccttcatcctctagcctccctgaatgttcacatcttataccaccatagtacaatataaaagccaagacattgacatttgcacaatccatagaacttaaggtttcaccagtcacacatgcactagtttatgtgtgtgtgtttatgtttgtagctctatgctatgtactatgtgaatacatgtaaccttaactaatgaccacggtgatcaagatgctcaaatatcaccacacactctcttgcattacccctttatggccacctccatttcccggtccttaacccttggaaatttagtctgttctccatctttataattatg

SEQ ID NO: 6396 - DNA, 2426 bp, Homo sapiens
tctagtcagatgaccttgcagaaccaccgcattccaccctgccctttggggagcctactcagcattctacctggggaaatggaaaacagaggccaccacccatgaaggcataacacccatcacattgtctgagaataggattaatgagcaaaagttatgataatagagttatatgatggtttaatggtttctagatttttcttggaaagatataatttgagcagtggctttatgcagactccaagaacaaaaccaccaggtatttttttttaagtaaaaatttactaaggcctttagcataatactgtaaatgtcttttggtcaagagaactaacaaatataaaggaacttgaaatgtggggagtgataatagtccagtgattaaactacagtccagtgattaccaccaactttctgactaagctaaaaatgaatgaaaatggtggctaaagaaaatagggactctgaagatgtcgaaatctttattcctggttaggaaggtgggccgctacccttctttccctttagaaaactgtgattaattaaataaaaagtcttactactataacaactctaaacctggtttaaatgaaacatctaattttgctgtaaggcttaatgctcttcttttgtttagccaagaaaacattcttagttggaaacaggtggtaaagtagtttggcctgttcacaacttatcaggaccaatatctagtgtggactcagtgttctctaggtttgtgagcagttgtggtaagagaatggaaggcaacactgaataggagttaagggaatggcacgatcacagtgagagagctgcactcacctgcagacccagtcagatggcttgtcagtatctgctctgaggaaccaggtcccacctccccacaaggcaaatctagacccattaaattattacagtgggcttttttgttttaaaagtggttggggatccacaggaacgacattcatacagggacatttgtgaaagcaaagcaagaatgaatgctttcccgatctcagactggctggattcagatcagtgtgttggctggttctcattttaaggggtaagcagtttgctattctgtgactttagtagatctcttttgtgtgcacatatacaatgtgcattatacatatatattaaatatatccacaaagcagatgggcaaaaagattttcatgctaatcttcaaaggttcatgctcaatattgtgaaaagcttttaaaagttgttttgaaaagacaatcattttttgtttttgttttaactttcttgtggcaagctataccggaaaagcggcatgtcaaaaatactttaggttctacatagatctctttctctcttttgttttgtttgtttgtttgttaaagttcattatttattttaccttttactgacaatgtgaaactcgaagaaaatgttctctttttaaatatacagtcataaactgttcaaggtaaccataacaaactaggtgttatttattaacgtattataaaataatgtttgatccagtatgtgcttgtcttatttaaaattggaatgtgagacatgttgctgtgacctgtttttctttctcattcacatttgtagatattgtgtgaactacagtatataatgataacaattaaaaggatattctgtggatgtcacgtattttgaaatgatagaactacattagctttgtatcatgtttggataattcatcaatgttcacagtttaaaacatcattaaacattatgtaattacaatgagaaagaatcttacttaaatttggagattttcccccacatctcttttccggatacattataattctggacccctatttatctcaaaactcttaatatatgcagaccaacaggtctttgcattccttttaaataactggttgtgacaaagcttgttgttgatcagattcactgtttcatcatatttattgtaatatattttttgttttgtaaatatgttacaacaaaatgtgattggtctaaaatatttgtaatgtatattaaaaggttcaaaaatatttgtataaatctaagttatttgggtacttgtaggaatacaatgaggagcttgaatgccaccttctgacatgatttacttttaaggaaagttatgaggagagaatacaaaaagcatgcaccaaaatgtaatctgacaggatttctggatttatacgtaatcactcctgccccaacacacacacacacacacacacacacacacacacacatgcacgcacacatgattttgattatgctacatgatatatgtttcaaaaagaattagcatagaaatcctggtctcctagccaaaaaaatcaaaggattttcaaaaaaacgaatctgtatgttgaggcaaaaggattgaacctggaagtctgggactttatcatagaaacaaagtctcagat

SEQ ID NO: 6397 - DNA, 3399 bp, Homo sapiens
atttagggtttattctaagctcttaaaaggtttcaagcatgcgtgcactcaaaagatctttaccgaactagcttttgcaagacactctactatgttctatagggaaggcagaaatgaccaagttaaaattctgtctttaaagaaattgtggctcagtggtacagaaaacagtaaagtttctagggtatatattatatagtggcttcttaacacaatataagctacctacatagtaattttaaaattatcactacttatctatccctggtagaaatcatcttatgttctaatattcacaattaattaattttttgacctaaacatttaaaatagcaatgattttgaaatagtagtatgtctttcatttaaaatgtaactgttacttttctttttggattttgcctgggtccaactgacagcgtttactggcccttattcgtcctgattttccacgccatctcccccatcccccatttcattgccaaaagagtcacctatgactcagatgcaaccagtagtgcctgtcgggaactggcatatttcttcactactggaattgttgtttctgcctttggatttcctgttattcttgctcgtgtggctgtggtaagttttattttctattgttttgcccaaccgttgctgagtttacttcagaggcctgtgtctgggacctccatttcatgctcattacttaggctttatactcaaggccgtgtgtttttagtttctctgttcctctactttagacctgcctaacagtagttcggccatgccttcagagtgctttctttatttctcttacaacttttagccagacgatatgatttcttactttttctactttaagctattctctggaattgttcttaaattcctgcctcttaaatcttacagtaatccacagatactatgctagcagtacttttctagttgcaagatgaagatatttcaaattcttctcctgcaaatgggatcatggactcaactctcaactcagtataataggtatatgttgagggacaactgtgtagcttccagaaaatgcagtgaataagttgacatcttcacttccaagacaaaaactttctttttgtcttcagagtacacattgtaggtataatttattcaattatttgctattcactgtctttcctactatttgattttattccctccaattacgttctattttaattttatgaaactcttatttgaggcattgaatatcagataagcgcaagtcttgttcattcaataaatatctttgcaacaactgctacttgtaaaacaccagaaataagaaataggtactgtctctgctcctgaggaacacagaaactagcttgctgggtaagtatactataagtgtactaagtgagacggttgaagcatgatcagaatgccataggggcaccaagaagagagaaattccgactggcatttgatatgggcctctaaggataaatagcatttgtattgaggtaggatggctgttgtatggaatgacattcaagtgtaagaatgcagtatatagaataaagaagaatccagtgtggtagagctaaaagaaagttgttgaggttaaggctggaagggttgtgaaacctgattagcaatggtcttgaaccccatgccagtttgatctttgtctagataatggggaaagattgaaggtttttgaatacaacaagattgtcatgactttatttttcttgtgctttagaccagcccttcttaagcgctgcagtaaatatttatattttttcctttcaatactgccatcatattttgtgaagaaactttcattgatgtttctcttgcttaaagtaaaacaaaaaatgcccactagagggtactctcacccccaaatgtgcttctgtaaaaccatctacaaaccatctactaagctggaaagcagttttcagttgtatgaagactattatttaaagtcttttcttgcctagaaaagaaacacacaaatttataactctacaatttttattttccatgaaagaagttgatgtgtgcagaactttcagtacccaatattgtaattgcactatttataatcttaccacttgagttttacttaaggcaatcattgtcaattaaaaacaagtagagaaatatgtctaattgggaacatgttaaggatgataccagacttaattaacaagcatcacagaagtaattagactcattactgaacagttcattgtctcctgttacattattaagccttttagcagctttgtgtaacatttcattggatgtttctaatgcagaaaataatagggattgcaaagagtacaatatgaaggaagtaaggatttaatccttcttttcttgtctttcagatcaaatggggagcctgcggccttgtgttggcaggcaatgcagtcattttccttacaattcaagggtttttccttatatttggaagaggagatgattttagctgggagcagtggtagcactttattctgattacagtgcattgaatttcttagaactcatactatctgtatacatgtgcacatgcggcattttactatgaaatttaatatgctgggttttttaatacctttatatatcatgttcactttaagaaagacttcataagtaggagatgagttttattctcagcaaatagacctgtcaaatttagattatgttactcaaattatgttacttgtttggctgttcatgtagtcacggtgctctcagaaaatatattaacgcagtcttgtaggcagctgccaccttatgcagtgcatcgaaaccttttgcttggggatgtgcttggagaggcagataacgctgaagcaggcctctcatgacccaggaaggccggggtggatccctctttgtgttgtagtccatgctattaaaagtgtggcccacagaccaagagcctcaacatttcctagagccttattagaaatgcagaatctgaagccccactctggacccaggacattttgatgagatccaaaggagttgtatgcacatgaaagtttgagaagcatcatcatagagaagtaaacatcacacccaacttccttatctttccagtggctaaaccacttaacctctctgggtgttacctgctcatttgtttaaaaaaaaaaaaaaagtctcacctgctttcatgctgaggacaagttcagatgttcaagcctataatatttaggcagttcctcaaatttatgaaaagtgttctcagaattgggagacagtcaaagggtacaaagcctcagttaggaggaataagtgtgatttttttttaaagatcacttgcacagcatgctaaatataggaataattgaatgtatatttcaatattgctaagagagtaaatttctaatgttctcataaaaaagttaaatatttgag

SEQ ID NO: 6398 - DNA, 1522 bp, Homo sapiens
tctctaccttctcatttgaatatctttagttcattcagatttactaattttggtaaatctgaatgaactaaagatgtatctgtaccttctcatttgatgtattaatcataaaatttcactacaaggtaatttttgcttagtttgatggatgaatgggaaactcaagtccaaatttctgcttaataccaatttctctgagtttcttgaaatgtctttaaaacagacatttttctcaccaaacagtttgagtatctttattaaggaaacccttacgaatcctgaaaattatgctagcatgatttttttatatatagaagtttaaaaataaaccaggtcaggtttgtatatgtaaaattgttgacatcaatgatgtctttccatattcttatctgggcttaagaaatacattctgtatttttccagattctttgtagcctttgaaagatttttacagtacatatgtcttgactgagctgtcctttcttaatacaaaagcgtgtataattttcttaacttgtacagttggtaaacttttatgagaggaattgttattctgagtctgtcagctttcattttattttgctaaggtttttctaatgaatttttaagtgtttgtgtagtaattaagtcatatttcttatccaggtggttaaagcattcataaaggattataaaatttttttttttttttttttttttaaatttctacttaagggcaagtaatttgagaattctgaaattaagcatgatgcttagattgcagtttgttttgcatttgctataattttcaaaattatttttgaagcaagacaaaagtttaatgtcagcttaagtgcttaaatatatcatgctgaccagaatcctgttatttttatatgcatcataaaatttcccatttctgcattaaataaacagaggaggggggtcaagtgatacttagatattggcacacacaaggaacaactgttggcaggcagtatcgattttatgaagagaaagtgaagtttgaaaacttttcaaacttttctagttacaatccaatttttcagatttgataatgcttttccaaagtgaaaataagatacacaataatcattgctctgtgtgattacagataggattatccatctgcatagccttgtaaaagtgccattttatttttagtgctaaattcttgttaaataatgtagttttatatagctgatagaccaacctatatccaaacttttataaaatattaattattcttgtttttctcacacaggcatactccaaatgcttcttccagttcatttttcagccatcagttcaagagccaatgcctttttaaaataaagcttctgtggtcttgtttttaatggctcaactgtctgatgtaattgagtgaaggtttgcactgagaaattagcattcaggccttacccccatgaagtattactgttaacatatgttcggactgcttcccttcaccaatgtgaacaactttttttcccaaacagtgttaaaagccactttgcaacac

SEQ ID NO: 6399 - DNA, 1313 bp, Homo sapiens
actcagaacactggcagttcctacagagacactgaggtgtcttgattatggaggaaataaccattcctttgcacttgtacaatctgaggattgattgctgccttttaaaattttatgaagagagaaacttataattgactctattttaaatatgttgtttgaattaatttatatcagactggaaaaggtactgggctttttaatttatttttcttatatgccgacagtgaaacatcagtgttttgaaagtattttatttcataatttgatatccaggtgtccctgagagctgcatatgtaatgtttgccaactggagcttcatcattcaaattgttgctgcatctggaggcagtttagcctttcctctgctggaaatgcagacgaatatgtgaaatttctcttctttgaatcttatttcttatgattgcattgtcttcatcatatcatcattccatttgccaaggaaaacaactttggcactataaaaatatgtggggctttgaagtgtattgctatctatgttggcttccctgactttcataggatgagcagagtgcattccttgaaaacatgttctttttttgttgtgtagaatggggataatgaagggggtgagaaagtaggccttttactaatttttcatctatttgacttattgattcaactaaaatgttttaagtatatgtgccaggcattgtgctaaatgctggggatacagagatgtttgcagaggtagttgaaacatctcactcctgccatagtgactcaggtaaggttgagaatttagctctgttaatctattcagaagatgtcactaagagtaagttgtttcagcactcaaaagccgcaaatctgtaaattggattaagaacacctgccctacctacccggcaatagtgtgaatccaaatgctgcaatgtgagatgaggtacaagtaaagagctgtgttttgtaaaccagtgcagctcagcattgactccctctctaagtgaaaattgcagacaggcaagtctgttttcccttgccaccttcctttgggtttggttgctctttggatgaatatgatgaggtcccacatttctgaatttattggtttgaggggaaaggctggttagacgtctttgtattgtcaatggttggtttttctctggcagtgtcagtgttagagctatcatcttccttcttaaatggcatgagcaatgagcaaacttccctcctttcaacattctcacctacatcatgtgccccttggctcacctactgagcttgccaacttctctcaaaaccaatgctgcattttgggagagcagct

SEQ ID NO: 6400 - DNA, 1205 bp, Homo sapiens
acttccttccctctctgctgttaaccagtgttctactttctgtctctgtgaatttgactactctaggtacctcatataagtggaatcatgtagtatttgtcctttcgtgatgaacttacttcattaacgtaatgtcttcaaggttcagccacgttgtagcatatgttagaatgtcctccctttttaaggctgaataatattaaattatatgtgtataattggtttatatcttttgagttactttgagaacacctatgttcttcaagtgtttcttaaaaaactggtacacaggatgaggttcttaacatagcctacaaggtcctagataatgtggttcctacccacatctccagaggcactattcacgtttccctcccctaaggtgcagataaatcaacaatgtgggttccggcttctgtgtctttactcccattattccctccatctgggctgctttttctcttcctcctctcacccagctcctgaaaaactcttacatttccttccgtattttggcagaacattacctcttctctgggcagccttcacactgccccccacttccctctacataattgatctctctcctttgtgcctctcctaccgcatctttatataccccctttatagagtgtccatctgctgctgctgctataacaaaatacctgagactggataacatataaaaaatagaaatttattttctcacacttctggaggctgagaagtccaagatcaaggtgccaccttaaccactgcatcctctgaaggggaagaacaccatgtcctcacatggcagaagggacagaaggtcagaaagggacaaacactgtgtgaaacctctctcataaggcatgaatcctactcacaaaggcagagccctcatgacttagtcacctcctaaagggcctgcctcttaataatatcacattggtgattaagtttcaacatatgaattttggaggacacatacagaccgtagcaaaggggctctgcattacatgtttacatatcactctcttccactagacagttgcttcttgaggacagtggcaggcaagggtgcctaacacagtttagatattttagttgattgaatcaatggaaacaaggaaaatgattaaatttcttccttgactgctagcttcaaaaggaaaaataactaaaacattgtattttaagaaacatccttgcagaaaaaatat

SEQ ID NO: 6401 - DNA, 1196 bp, Homo sapiens
tgaagaccaactcccagttcctaagactcccccagagctggcttgcctgtcctctagctgcagccagaccgatggtggcacccagagatgacagctgctggagcaggggctgggggaattggggcaggctgtgctggttgagggcacactgactttaaggcttgaagcctcaccactcagagcatgagggagtcacacctcatctttaactgatccagagtcagcttatcaccacaggagaaggtgagtgggtgaagagaacttgaggggaaaacagaaagggagatgtgctgaggctccagttcttccagagagtcagcgagaggtgcctcatgtgaggggaggtcatctatgttggagggtaagtagccatcatgggtgggaaggtcacctgctgggagcaccgtccagggacaggctgggttttcgggctttgggtcggagcccctgctctccagcaccttgtacagatccaccagttgtctgctctcagcttggagagctcttggaggtggtgggcttgaggcactgtgcatcatgtctttctcagaggcctgatgaccttggattcctttttccctttgtggccagttggagcaggggggatgtctgaaaactggggtcacttgatgaaggacttcactgatgaccagcggttcaggatcttcaggcgtgggccagtctatcaggagcctgtccaagggcagctgtgtcttctcctgagagaaaggaggaggaagaggctcacactgctgtagaagtgaccttcacaacctatttctccagggttcccaaaggcctcacaacctgcactgtctcctcagccctggctggaacatgttgggcactggagtttgcgaggtaagagaaacagttaacattgttggggaggcagaggggcaggagccagagactcctctcaacccccagccagtgagtgattcacagccctgctcaaccttcaacctgtttctttctttcttttttttttttttcttgagacgaagtcgccttctgtcacccaggctcaagtgcagtggcatgatcttggctccctgtaacctccgcctcccaggttcaagcaattctcgtgcctcagcctcccgagtggctgggattataggcatgtgccaccatgcctggctaatttttatatttttagtagagacagggtttcaccatgttggccaggctgg

SEQ ID NO: 6402 - DNA, 2720 bp, Homo sapiens
cacagtctcggctcactgcaacccttgcctcccaggttcaagcgattctcctgcctcagcctcttgagtagtgggatcacaggtgcctgccaccacacccagctaattgtttatatttttagtacagacaggatttcaccatgttggccaggctggtctcaaactcctgacctcaggtgatccacccaccttggcctcccaaagcgctgggattacaggtgtgagccactgtgcctggccaacagtaagatttttttagagttctgtcttaatgtagacactagctaacaatgtaattttgaagaactgagaactgtggttaattttggtttttctttttcagtcaagtgcttctgctcctgatgtggatgacccagaggcattcccagctctggcttaactggatgccataagacaaccctggttcctttgtgaacccttctgttcaaagcttttgcatgcttaaggattccaaacgactaagaaattaaaaaaaaaaagactgtcattcataccattcacacctaaagactgaattttatctgttttaaaaatgaacttctcccgctacacagaagtaacaaatatggtagtcagttttgtatttagaaatgtattggtagcagggatgttttcataattttcagagattatgcattcttcatgaatacttttgtattgctgcttgcaaatatgcatttccaaacttgaaatataggtgtgaacagtgtgtaccagtttaaagctttcacttcatttgtgttttttaattaaggatttagaagttcccccaattacaaactggttttaaatattggacatactggttttaatacctgctttgcatattcacacatggtcaactgggacatgttaaactttgatttgtcaaattttatgctgtgtggaatactaactatatgtattttaacttagttttaatattttcatttttggggaaaaatcttttttcacttctcatgatagctgttatatatatatgctaaatctttatatacagaaatatcagtacttgaacaaattcaaagcacatttggtttattaacccttgctccttgcatggctcattaggttcaaattataactgatttacattttcagctatatttactttttaaatgcttgagtttcccattttaaaatctaaactagacatcttaattggtgaaagttgtttaaactacttattgttggtaggcacatcgtgtcaagtgaagtagttttataggtatgggttttttctcccccttcaccagggtgggtggaataagttgatttggccaatgtgtaatatttaaactgttctgtaaaataagtgtctggccatttggtatgatttctgtgtgtgaaaggtcccaaaatcaaaatggtacatccataatcagccaccatttaacccttccttgttctaaaacaaaaaccaaagggcgctggttggtagggtgaggtgggggagtattttaatttttggaatttgggaagcagacagctttactttgtaaggttggaacagcagcactatacatgaaatataaaccaaaaacctttactgtttctaaatttcctagattgctattatttggttgtaagttgagtattccacagaaagtggtaattatctcttctctcttcctccattagaaaattaggtaaataatggattcctataatgggagcatcaccacttattaaaacacacatagaatgatgaattaaaaaagttttctaggattgtcttttattctgccacatttattgataaacagtgaaggaatttttaaaaaatttttaagaattgtttgtcacgtcatttttagaaatgttctacctgtatatggtaatgtccagttttaaaaatattggacatcttcaatcttaaacatttctatttagctgattggttctcacatatacttctaaaagaaacttttatgttataagagttactttttggataagatttattaatctcagttacctactattctgacattttaggaaggaggtaattgtttttaatgatggataaacttgtgctggtgttttggatcttatgatgctgagcatgttctgcactggtgctaatgtctaatataattttatatttacacacatacgtgctacccagagattaatttagtccatatgaactattgacccattgttcattgagacagcaacatacgcactcctaaatcagtgtgtttagacttttcaagtatctaactcatttccaaacatgtaccatgttttataaacctcttgatttccagcaacatactatagaaaacacctgctactcaaaacacaacttctcagtgtcatccattgctgtcgtgagagacaacatagcaatatctggtatgttgcaagctttcaagatagcctgaacttaaaaagttggtgcattagttgtatctgatggatataaatttgcctcctagttcactttgtgtcaagagctaaaactgtgaacctaactttctcttattggtgggtaataactgaaaataaagatttattttcatgctcacttcttaaaagtcataaaaacaatcaaataggatcatgtttattgtcatgtgtttcctggtttctgacctgtgtgcacacccctgtgtgtttataatttttaaattgaattttatatggggtttttatttgctaaaaaccaggctgttgaatcacatttgggaagg

SEQ ID NO: 6403 - DNA, 1076 bp, Homo sapiens
tagtaaccttatatgtcatctctccagaggtcttcatcaaggattcacatggcagtcctgatctgaagggcatatttaaaatgtacttgtccagatttcactgctaaagattatgattcagtaggtctaggatgggcttcagccgtttgggttgattgtgatagcatacatgtctttagttgaggactgctggtattacctgcaattttgagatagagaaaagtgcaggaaaatcttcctccaggatcactaaagctgagccctagcttgttacctgtggaggcattgagacatttgttcacagaaagtacagtttggatttttggttttttttagaagaaagctcattatttagaaattttgcaatgttacttttctactaataacacaatcatcttcacttatatttttaggctcatgctgaagattcggttatggaccatcatttccggaagccagcaaatgatataacgtctcagctggagatcaattttggagaccttggccgcccaggacgtggcggcaggggaggacgaggtggacgtgggcgtggtgggcgcccaaaccgtggcagcaggaccgacaaggtaatttaagactttcttttccttttacataatttaaggacctcttataagtcactggctgggtcagacttatgtcacttttgggaacataagtagaagtagtagcagtgtctttaagaaaccgcatgttaggttatatttatgtttaaagcacttaaatgcctttttgtgtagtgctgttagtagtgttaagttaccacccttttgagttctttctaggtgccggtcatggtgctgggctaggcattttatgtacttaatgtcatttaattcttgttactgtgatgacattctcattttccagatgagaaaattctggtatagtgaatcaggttaactcttggcctttgctaaggcttacctgaaaaccagtctgttcactttgataattcctaactgctttttaggtctccacttaataaccattgtgttccttgtataattcctcttacgacacttaggattgttgacacttttttcttttactag

SEQ ID NO: 6404 - DNA, 1097 bp, Homo sapiens
tctgtcaaattttacttgtctctgagataagaatgaatgctctcttctgagagttactatattacaagataatgtcttatgggatgggtttgggttatagtatattgaatgaccggttttttaatatttcgatatatttgttactcattttttcccccccatatgtatttgtagcttttcctgaaaccccacaataaggttatttgggtattctgattatcttagtgtccttaatagttcctattctagcttttgactttgttgtcattacaaaatttgataagctagtaaagcttcattttataattaactgccttgttctgttactttttaagtatgaagtatatgaactaactagtttatattgtttacttttcgacgtcttctggggagtatatttagtaagaaaggagttagagaatgtgagagcttatggtatttttgtatgaagaacttttcagctacatgtaaatggacctagatgcctttctttttctttctttccttagagagtcccccaaatacattcagaaacaaatatcttataattacagtgacttggatcaatcaaatgtgactgaggaaacacctgaaggtgaagaacatcatccagtggcagacactgaaaataagtaagtggtattgcgtgtaatagtaatgacccagaattgaaagcactggagttttaccaataagataacccatagatttaatgctgttacttgatggctttttgtttttgacaagggagacttactgtaccctcatccctcaaagagtatttgaaagaatgctttttttttctttttttaatagagacagggtctcactatattgcctaggcaggtctccaattcctgggctcaagcgttcctcctgccttggcctcccaaagtgctgggattacaggcatgagccactgcacccagcccttaaaagagtggtttatgtgtatatatttgactctaacgctttgaaaaatagaatattttaatgtggttatttctgtttgattagtcattttaccattgtcatacaactgtacaaattttactttgagatagttaaaactagaaaatgtggccattttaacatta

SEQ ID NO: 6405 - DNA, 1160 bp, Homo sapiens
atcctaacaataggtcacactgcttatacctgactcctgttagaaagagagaactcagtattcatgagattactttcagtctttggctggtgcctttagaaatgctaaaacttgccatttcctttttttctcgttgatcctcattctactccttggagctatggtgagaaaatttgagctttagtaaagacaatgttaaaaacctaaaatgacaaactaaatgaagtaaagaaccatgtagcagcaacaataacattatctctgcgcttttatttttcttttttgataattaaaaagcaaggcaagtacagatacagcaatcatcacccccatcaaaaacctcaccagagggactcaaagcctgggggagccagggctgcgagtcagcggcaattaccctcccactgtgaagtcagcaggacccatggctgacttaacctcaccagcctcactcaaggtgcatagcaaccagcattattatagtctacttaatagtgtgtgctacctgccaggattgtacattaagaaaaggaaagactagtgggacctgtttgtcaggccctaaaactagaattttcctggttatacacaccacaaaatgagtgtcagcaacattaaatagtggcaagagtgatgggatcaaaaagtttgactcgtggtctgctgtcattattagatgatgtagcacccacgtagactgacaaagtcacatttctaacttagaaacagtctacctcttactttagctttaaggtgtacatttggcttaaattagagctctgagcattttcttgaagctgattttgaatttattaaagagtgtttaaaccttgagatggtgatgggtgacttcatagaaaatgtggactccagagctaaaatgttccaagcagctgattggaggcgatgattgaaaactttcatctcctccaatagatgagtcagtcacttctacgtttgaactttccccttgcgtctcagcttctaaatcctgttgggatgctgaagtggtctgagtttgaaatattaaacagcatatctgtgaggccagctgtaggcttttaatcatttgtaattgtgactcctggatgataataattgatacaaaatgaccagcaagcctaacagactagatatctttcctagttctatcttttggc

SEQ ID NO: 6406 - DNA, 1198 bp, Homo sapiens
gtggataaaacatattctaaatctagatctttctgatataatagagcaaatgggaatttttgttggtgtcatttgagttttcagtgactgtagctttgcttattgtttgcctgttgatcagtttccgttttttcatagaatgcactatgagcatttgctctagccaggtaatgcactaggtactggaaatcaaagttgaataagattttgactctgcccagaaggagtttaccaaccggcaggatagtttatattttcatggaaggacacagacaatgggaggattggatatttccatggaaatgagctcacttacacttgttttattcaatgagatcattcatgtaggagtaggtagggcatcagagaaagggttataggccctcttggctgagccagtgtggctgtggccaggttcactggagtcagagtacagcccgggttcaggagggctgagctgactcaccaggaaaaagcacaatcaggagtcaggccaggtcaggtgagcaggctgggctcacctgcagggcaagcaggcacggagcacgtggctgtgcagactcagtttgttaaatactgggctgcccccagtggtatctccctagacaccacaaaacccacttgcattagaagccctctgtgtgtgggtttatgaattgccagcaagggctgagccaaggtcttcaggcaaaaggttgagcaaatggccctgtattcagggagagcagagtttgaacctggtaccacttggagctatgggatcgtgagacagagttatgtcagctttctgaggcccagtttcctctttagcaaagtgagacaggaatatctgtggctcactggggagatgaaataatgtacagtgagtgcctctgtatagttgatattcattagctgtttcttttcttgtaggtgtgggttctgctttgcaagaacttttattccctttcttcactgctctgtcctgtcacccattcccctcccctatcacatactttctccagtcttgaagaaacctccagttgtggcgtgatgagtaggctcttcctgtgctatggaggggtacctggaacctagaaggcactcaacacatatttgtgataaatggtcagatgggtggagaaatgaacaaatcctccatttaaaggcttctactgccactatagtaaccatgtgtagtggcgcaatctcagctcac

SEQ ID NO: 6407 - DNA, 1134 bp, Homo sapiens
ctgtttgcagaggtaacattaccttccccagccacaggtatgtggaatacggtgaggaaaaaaaaaattaaaaaaaaaatgcaagctgtcaggatgcttaagctcttttcagacatctgcagtttcatccctaccttgttcacataccatccaagaggcacataggctacccaagagagccttggattcagtggtacactccttgggcccaagggctttagcagctggatatggggttccttgattttcctctgggcccaaatatagccctcacactcttggaatttccaggtatgggggtagccccaaaaggaggaatctcctatggccaataaggtatcttgactttatcaaagtagaagagagggtcacttcggagtcaaatcatacactaggcctttgatgctttaattcttcttcagttcattaaaagtaactactaaggaaaggttaaaaacttcccctcaaaaaggaatcaaccccaggaagtaattatttacaacgattttcccaaattttgtacaatctgtcctggaaagcaaaccccttttaaaatctaatgtctgggctttgagtattagctcatttagggtggacaaatgcattactgttttcaaactgctcacatttattcagtatttctccaagttgctatctactcagccttatgaatgcccctcgcttttctaaggccatgtgaaaatcacggcactgcccttagccttgtgtcatctgctttttcgttctgcgatatgcccagttcccaaatcaattataggtacctgtttaggagagaggaagattttacctctcaaagggtgagatttgaaatttacactaaaaagacaactttacatttaatgcttcacttaatgagacattcttttttttataagtctatttttctactcagtttcagaacactaatctgattttcactctgatttttaacgtttctttaaatatttataatgtagcttctttcaaaatattttcatgaaaaattacttttattataccattatgtgcatgttattggtagcaggcatagtttattatttagtactgaaacatgctcttttacctaacagtaaacaagtatgttttgatatatatctgttaatatgcttatag

SEQ ID NO: 6408 - DNA, 1963 bp, Homo sapiens
cgtttaggagcgatctggcaggtagaagtgaggaggccagtttcttgatgcttgggttatttctgctgacaagcagggtggtgggcaagctgctcttagggcaagtggaggcatcatagtgtccagtcactagcaacacaggactgagaagctgcatggctgcagcagcctcttgagtctctactccccactgggcacccgtgggcagttctgcagtggtgtcttggagttgttcccagggactgtatcgtgggcctgctcctccagccccttccaatgattgtacaagcacctaattctctttattgaagctcattctgctaactttgccaagatcaccttctgtttgctgtgactgaaccttggctgattcacaattgttaaatctgttgctttgtaaactgcaaataacttataaatattagctattatttggattattaccatgccatcattgctggacatcccaaactctaaaacttgaagggaggaaggagttaagacataaaattctttctctttctccccaaagttgcaggttatgaggccagggtgcttgaacctgcggtcagctgcaagtgctgccctggtctggcatagttatgagagcaaagagcaaaagagaacatgttgctggcttacaggcaaggcaaatgagagggagagatgaggaggggctgcacagagaggtgggaaatgtggtttcgggtagggaagacagagtgtctagagctttacaaagagaagtttacataggttcacaatcagcagaatgagaaagaatgagaacacctctctctgaaaacctcaacagagctcattctgtaaaaacagcaggctttcagatttggaaatccttttgaggtccctatctggtgtctttcattagttgattttatctgccatccagggtacatgtccctgaataataataataaagataataagttataatgattaattttgacaattaccaccatttactgagtgctgagtctgtgccaggtaagtaaattccatgcagcattgcatttaagtctgtcaacaactctaagagatgaatcctattatttctgtttgacagatgaagcagagagaggttaaaaaattcttgcccaagatcacacagatttacatggcagagactcagggctacctggctctcaagatcatggtcttacttaccaccctttgttgcctgcctctgaacagcaagaatacaaggaaggggctgggagaaaggagaggccaagtatcagccagaagcactgaatacagaagacatggcctccattcaggggttgctgttattcagacaggttatccccatagcaaatcagcaggaagcgtgaaggcaagtggctttgacagaagacccaagcgaaggagaatcaattgttcttatttctaagaacaactgccccagattctacataggaatattgctaaagacacaagatgattctcctgtgcccaagagaagttggcaaggatccatgagaatgagccaatcctcggcaataaatccagaggagagtgagctgcagagcctgggcagcgagttcctcacttcactgtgtgtctagaacacctggggcacttgtttaagaaagtctgattcagtagggctggagaagggcccacagatctgtattcaaaggcctcctagatgattctgatataggtcctctgaagaaatggcttatggtatgatcagagtctccgcctcttgatcctccccatgtttattcctgcctggggattaaaaaatgtcaatttaaaaggacactactcggccgggtatggtggctcatgcctgtaatcccagcactttgggaggccgaggcaggcagatcacttgaggtcaggagttgagaccagcctgcccaatatggccaaaccctgtctctactaaaaaaaggaaaaatcagccgggcgtggtggtgcatgcctatagtcccag

SEQ ID NO: 6409 - DNA, 1336 bp, Homo sapiens
tttcaaagctctgaataagcaaaaattctaacttcttttaattaccttaacctacaggattaagtgttcttcagactgaaatttttcttaccatttaacatacttctttgctacaaaagcctgattttgttaacagccattgctttctgaaaagcatctcctccctggcatcagtgatgctagactctcctgttcttgccctgtccagtgatattcctttggtacagctctcgctccttctcctgagtaggtattctcaggggctggaactctagcacagtgaacatgtgcttttatagccagataaattcaaatcccggctcatcacttattacgctaagttgctgtacttctctgggcctcattcgctcatttgtaaaatgggaaggaataacaatagtacttaccttaaagagttgttacaggatgaactgagagagcacatatgagttgctcagcacgtgcctgacatgcactggtcctcaggaaaggcagatgatgctctctccaccctatgacttcagctatgaccaacccacttcacatgcagccctgacccttcacctgaattccaatgtgtaaatgacagcctgtttaattttaagcttgaatggtccacagttgcttcaaacacaacacaggtaaaacccaatgaaacaccaccgtctaccctcaacctgaccaccactgtcctggtcacagaggcctccttttgcttctgccctctttctaactcctcagaccatctttgtcctataaaaatgtgagccacgtatgtgatttaaaattctttagtagccatattaaaaaaaaaagtgaaattaattttatttagcccaatatgaaaaaactgatatgtaatcattgtaaatattattgaaatgttttttgtactaaacctatgagacctgataaatattctatacttgcagcacatctcaatttggacatgatagtggctgccttactagacagtgtgacctgaaactctggactctgaaaatcttaaattctccactttgacaacccacccccacccccaacccattttaactttccccattctcctgtcttctattttacctgagtcttggctctctgcagctcaggtcagggctaccgcctgagccttgtaacagcactcctgcccctaatccttcttcaatctgatctaccctgaccactatgctcagatatagtacccctttcagtttggtcctctctggctttcccaggaacccccaggaaaagtccaaagggcttggcttcacactcaagatcctctctaatgtttttgccaccataataaaaatcctaataataaagcagctaattt

SEQ ID NO: 6410 - DNA, 1268 bp, Homo sapiens
tctcggttcccttccaatcagctccgggagggcaacgtaatcgactttattaggaacaacagaagagtcggggaactgtgcccggcgcaaacccggagctctgttacaaggctgagatacttgcacggttgtaaatgcatttggtcgtctttgctaggggctgagggtttgcaatttggggtcccgaccttcgcgccctctgctttcccgccgcactccaccccacgctctgccgtggacaggtccgaattgtcggccgggaggttgggtgggatggggtggggtgggagggagtccttgaccagcgccgcgggaagttggagaggtcggaggggaaaagcgtatccgaaaggtgttgcttttggcctcctgcccactcgtgaatatcccttcccccactacttagagccccgagagccggtgactgtgaatgtccccgtcctcttttggcgcttaggagagcgccctcagctcccaccacagccccccgcaggtgacagctcgccggcctcctcggcgacagcgcccgccccgggagacctcccctggcgtgcacctcccggacctctctgagtcaaacaggcttccgggtgaagaaaaccgcctcacggaccgtccactcggaaaaactcccttcccctcactgtctccccatctgcatccatcctcccgcctctctgcacactcgcgccccccgccccctcaagatttgggacatcccggcacaaacttcaatgccaactttgcagcgggcgcggacgggaggttcggtttccttacttcacggctttgttaaactttgcggagtggggagtccacggaggggctttctccgcgcgtgcctttacgggcgcccacgcgatgtggggtgcggggaaaacgcccgggggcgccggcggcgtcgctgccagagctgcacaggcttgggcacctccagtcgtgtgcttggcgttttgtctccagacttgggtttgatgggaacaaattaaagggagtttggtactgtaaatcacggtaacatccaagccaattgtcttaaacaaaggagagtgggtgaagcttcatcaaggagagaaatacctaaaggagacagtgctcttttctctgtgtgcatttatccacaaaacagaaaagggttcagagttttcaaacaatctcttatccccagtgtgggccaaacagcttcacattttctttctggaaccctcaccctcaacacacacacacacacacacacacacgcgcgcacacacacacacgggttggct

SEQ ID NO: 6411 - DNA, 1277 bp, Homo sapiens
ttctaatgtttaaatgttcagatatgaaaaggggcaaatagctcaagcatggtggttcactcctgtaatcccagtactttgggaggctgaggcgggcagattacttgaggccaggagtttgagaccagcctggccaaaatggcaaaaccccctcactactgaaaatacaaaaattagccgggtgtggtggaacacacctgtaatcccagctacccgggaggctgaggcatgagaattacttgaacctgggaggtggaggttgcaataagctgagattgcacctctgcacttcaggctgggcaacagagtgagactctgtctcaaaaaaagaaataaaaataaaaaggggcaaatagaaaaaaaatacagaaattttatttataaaattgcaaatgaaattagatgaaaaaccttgttaatggaaaatgtttacattctcaatttctctcttttgtttagaacattactactggatggaaatccattccgagttcctcgagcagccatattaatgaaaggaacagctgctatacttgaatatttgagagaccgaattcctacttaacatggagttgctttataacccttgtcatgtattattaaccctggttaattctaaggaggatgtaacatttgttttagtatcatcttaaaaggtgattattgtaattgatcttgtagtttcccagtatcacctacctgttggtataattagcctgggccatattcactgccagtaaatatttttacatttttatttaagatttttgtaaggtgttgtatacatttgtaatggtgataaccacaatgtgttcatacatttgttctaaatgttttgcttatgatttatcctgctaactttcattttcttatagcaagcagttttttcaaaaatgaatttttatttaatgtggttcagtattataataacaaagcatttttgtagaactggttttttttctcatttatttttgtattccatacaatgtgaccaattgacttgaatatgactagccagtttctatgtttttgttagatataaaattaaatcgaattttgttgaatactgttctttggcatttaaaaaataagaccttcttatcttgggccacatgtcaaaagaaaaaggaaacaaaaatatattaaaaataagacttttcattacccatgataggacttttgtgatatggctaatctcagtacacatttcaacttaaaacctttttatttacagcaccataattttaaaatttacttgcaatcttggtaagactaaa

SEQ ID NO: 6412 - DNA, 2111 bp, Homo sapiens
atcctgtgaaattgagtcaggctcatcatctaaacaagttaaacctgttgctgtacattttactgtcattctagacataaaaaggagaagaagaaagataaagacaaagaaagaagtagggatgaaagagaacgatcaacaagcaagaagaagaagagtaaagataaggaaaaggaccgggaaagaaaatcagagagtgataaagatgtaaaagtatgtttacaaattgatttatttttatatttggggtgatgttggtactttcagaagttatttttctttggagaagtttacttttattattctccttggcaaagcaggttacacgggattatgatgaagaggaacaggggtatgacagtgagaaagagaaaaaagaagagaagaaaccaatagaaacaggttcccctaaaacaaaggaatgttctgtggaaaagggaactggtgattcactaagagaatccaaagtgaatggggatgatcatcatgaagaagacatggatatgagtgactgaatattgcctctgagggagtccaactgtatacctgcatcagtgtcattcctttgtgtgatttcttaatgctgtatttgttcatctcaaacctagatgtatacagctctgagttataaatggttataaagctcctgttactcatattagttatttacatcaaaaagcttttagaaaatggtacgaggtaaccaattcttgtcatggtgaaatctgattgagtaaccaagcagttttactattctggtgctgcttcataacaaaaatgaaaagctgcatgcatctacagcaggcatggattgtttatgtcgtatgatatcctttattaagtaagttcacttatagtatttctataatttgattcattgccgtaatagagccatgtaggaaatgcactgattgcatgttattgtggcaagaatatcctaaatgtcattaaaatcctccaacatgatggatctacttatggtcttgtttgttgacatgacaaattaacattcttatagttacatctggaaatgagcatttgaaatagataatcctttaagccttgtggcaaaatttttgtggcttttgtttaactttgaaaggttattatgcactaaccttttttggtggctaattagggtttaaatacagaaacaagatttcaaataaaactgtctttggcagtgagtaaatagcatattttgaagtagagttgtatactttttcataagatgtttgggaatttttttcctgaagtaataatttattccacatctacatcagtgaaagctatctacctatcctgagtctatcttaaaggaaaaaaagaaaaaaaccttatctcttgcccttattttgaattttccactctttcattaatttgttttaagctccgtgttggaaaaaaggggtagtgcattttaaattgaccttcatacgcttttaaaataagacaaatctacttgataatgtacctttatttgatctcaagttgtataaaaccaataaatttgtgttactgcagtagtaatcttatgcacacggtgatttcatgttatatatgcaaagtaggcaactgttttcttagttacagaagtttcaagcttcacttttgtgcagtagaaacaaaagtaggctacagtctgtgccatgttgatgtacagtttctgaaattgttttacaagactttgataataaaacccttaaacttatgttcatgttcctgtaaaaccgtatttgtatttatttacgctactgaatgtatgacatttacctcattcattttacaaattctttccctttctgtccacatatttcagtatagtaaaaagaggaagtctatcactgtagtgataattgccatcaaaattgtcaaaaatgatttaatttctatccaaaatagtccttttcttagcttagtatcattttattgcttattttttgtgtgggaatggggttggataaagcaatgaactttagtataaacaaatcccacctatatctagcaaatttatattttcggtgaaatacagatatttgcctttctggagtagtatagaagctgtcaatatgtatctactgtacagtactaaatagtattcatttatgaaa

SEQ ID NO: 6413 - DNA, 1406 bp, Homo sapiens
tccagaagtatacacaagattgattactcctattattttttttaaatcacaggaaaatattgatttcattgtctccaaagtgataaaatcatgtattactcatttttgcacttaaaatttttcttatttattccaaggtggtttgaaggtccaagtatgaaaataaattagggggattaatgtataacagttataaagtatcatgttgtattaaagagcttacttagattgatgtttttaaaatgtatcctgatgaatgtctcaagaatgcatctgtcaagttttttagactgaccagtagcttaaacttttttcaggattttaggtaatttgaaaggagtttagagacccttattgaaaatatgatttaaaaatccaaagcataaaccgtaagaaaaattttaaataaacatctttaaagctgcatcttccatactgatacatgcattgcgtatgttgacattaaatacattttataatgaagaaaaataatcatagtaaaaaattgaaagacctaattactacgttacatggacctattgaattttgggggaacgtgttagtaaacccagactagctttgttgaatagaagttgatcgctgttatttaggaaatgggtagatcaaatgacttagagactgaattatcctatcagtggttacatggggttggagacactgaaaggcagtgatcactgttgcttctaggctcccttactttgtaggaatatggtatactttcaggaatatgctatatatgttttcataagtacagacaccttagggaagaaaaaaagtgggtaattgaagcttatggttgattaatttcctaacagcacagctatgaatattttgctggggtacactggaggtaggaagactactggaaatttttgcacttgaattttgtttttaaagcttttttctttaaagaatggtagaaacagattatccattccaaaatgtcttttctctgatcacaaagagcaaacaaatgtcaatatctcttatgatggtgaaaaaaaggaattaatcgatgcaaataaacttttcacagtattacttttaatgaagatttttcgaaatgtgccttttaatccagttaatgaatgaagctatatgcagtgtttcaaatgaataagtcaaaacaccatatgttttcataataccacatgaaaaatcaagattttgcaatgtaggtacacaaaattctatatgttcttctccatttgtgattttgaaactgtttaaattggtagggggacaatcgtatagtcatcttcaatagccatttagaaatggttaatattcttgcccactggtatggtatccagagaagatatggtttccatctttgagaaaataattctctgatgagacaatttgccctctgtagatattcacat

SEQ ID NO: 6414 - DNA, 1168 bp, Homo sapiens
tccaacggaggctgtggtttccgaccgcccacaaaaagcgcggttggcgggagtgcgggttcggggtcggctggcagctgggagactccagctctgggcggaaacacactgcctcggaggcgccggcgcctagtgattctgggaatagaaggtgcgagggagggagcgggtggctcacttatcgcggtgttttctctctcttcactcctgggggagctctcgcgagaggagcaagaggaagatggccgtgccctgtttttcggtgtaaggcagcgacggcggctgcgacggcgagactgagatcctggtgtcgtgggcacctgagttctagcttcccccagcgagcgcgcgtcccttcgtgcctaggcgagagccggctcttccccgggagatgcgtttgtcccaggctcgggggctcagtgggagttcatgctgcgctggaggctcttggccaccgctctaatcgccttgtgccgccgcagcgccagctccgtcgccagcggtgagcctcccgattcccccccttgcccctggcggcggcgatgaccggggagaagatccgctcactgcggagggaccacaagcccagcaaagaagaaggggacctgctggagcccggggatgaggaagcggcggctgccctcggcggtacctttaccagaagcaggattggcaagggcggcaaagcttgtcataagatcttcagtaaccatcaccaccggctacagctgaaggcagctccggcctcctccaatccccccggcgccccggctctgccgctgcacaattcctccgtgactgccaactcccagtccccggcccttctggccggcaccaaccccgttgctgtcgtcgcggatggaggcagttgccccgcacactacccggtgcacgagtgcgtcttcaagggggatgtgaggagactctcctctctcatccgcacgcacaatatcgggcagaaagataatcacggtgaggagtgctagcccctctccacctctctccttccccgagcctagggtgtgcctccccaggcttctggaatcctaggccccctccagcagactcttctttttgcccatcatccgggccgttcggtaaatcatgatcgactcagtaatagcgtgccagtggtcaaggggttggttcttgtgggtgcaaaggaatg

SEQ ID NO: 6415 - DNA, 2494 bp, Homo sapiens
aaagtctaaacatcagataattttatgtgtgtaagttcctatctcaatttttaatttttttgctagcatcatggtactgaattttgtatactttcacagtcttaagaatgaatgctgagatttagctctagcttactagaatgcctactctctccattatgtcttacagacgccacaggtcatcatctggatcatcccattctggttcccgttcaagttcaaaaaagaaataatgtattaaaatttacatcttaaaaaaatccagtacagtgcatgaagcatatttttaaagaagttggtgtcttacttggtcagaagtgctaaatctgctagtagaggtgcatgcctttcattgcttttcaaaacaatacagctgtgtttatttgtgaagttaaaagtaaatagcattttaagccataatgtcccaaaatagatgttctgtcattcattatttacaaccatttgcttcatttaaaaccatttcagctataacaaagtactttgcttcctaatttaaacccatttttgtcatttccaaatacatcctgtccattggctaagacaggattacctaggcttgcctgaactttgggcatggaagaaagactggaaactagttggaaacaacatacttatggaaaagaaagtcagcctttttatgctgttaacagatgtcagagtgattctcaccaaaaaaagttaaactatgttgtaagcagccaactgtaaatgtctattttgaaattccctatgctaagggtgccttagaatcattgtgtctcttttatccagctttacttttttgctccacatttaatgcaaaagaatcttgtgatgtctacaaggagagaagtgggatatattttcctttctgacacataatttggggcaaaaaagaaagtcttaagagtttatcttttctctgctgatacggttgcttgataaagacatctcaaaatgtttaccaatgttttaagaagctttgtgtgatattcttccaaatgtagttaccaaatataatatggtagaaaaggctaaatcatacttaatgagcaaattgaagtaagcttttaaagtatatttctcttttggtgaaaggccaatggagacattgtgaatttaagtgaacatttgcctcaagatgttaactataaacacactgcatacaattttcttctgaataacaaatgaatgcttattgctgcatgatgtaagcaaaagtcattatttttcctattcatttgaaataagttatggcttaaaatgcttttggagtttatttctcaaaattaaaatctggtcacatgagctttagtttgttttctggtttaaaaaataaaaaggtttctcttaacagtatttccagtgacaatgcaaggtaagtatatcaaaggaaatcaacagttgtgcttgggggctttttgttatgggatattgatttcttgttttttttccgtaacattgtctgctgcaatttaaataaaaattacgacattttaagatatttcatagacaaaccaaacaaaaatatatgtttttactttaaagtgaatgtttttctcttcagctgatctaaaaatgaaagcaagatatcttatgtagaaatattttgataatatttttacagtgagctttcccatgtttttatgtcttaagtttctttgctgcgtttatgtaggttgcacaagaacttttactcacttgtaattgtgcctcagactttttgaaagtctaccttctaaattgccccgacgatctagattctacatgttaccattggtttattcttgtgctttctgtatttaaaactttggctgtactaagcaaatgcaaggttataatttagctaatagtagtttacagacaattctgatgattatgatttcatttggtttaactaagctgtactagttcatttcataaggaaatgatactgtagacaaatgtaaataaagcctgtgagtcaagcatcaagtggtgtttgttagaaataaactagagatttttaaactctgatctaatgttcatttttaaactaattacagttttctgttacctttgatttgttaattttttacactctttatattcacctaccttttatatatgagtgcttggtattttaaattccaaagccattatcactgcaacctcagaatttttaatttaacctttttttcgttttaaatagagagctcctaaattagttgcacacttcttgccagaacattacatccctcattccatgtggtaaaataccatatcgtagtgtgcttcctgaattactcttaaactgtcaccttatataaagcactcaactgtcagcttaacagctaagttttcttaagtttctatttggagtcctttcatctaaacaatattgaatgatatctggtaataaatgtccaagttcagaactagatctaaatagaagatcatctctaggcacaattaccaagctaaattagatctctgaaaccatgtcatctcccct

SEQ ID NO: 6416 - DNA, 1206 bp, Homo sapiens
gaattttgtgagttttaaaatttgtacgaaccatgtctcccttgtgtcatattttccaataatataattacctaacaatgacagaattatacattttccctttaattctctaagcattgagtaaacagaaaaatatagggatgaaatacacacatgccaacattcaaaactttgtactaactagaaacaaaaatagaaggggatttataaaggaaaatgatggagacattttagagaaattaagtataaatcgcaacattctgttttcttggatgtattctgggtagcttctagttacttgtaaacaaagtattcattgtttttgtaataaagtgataatgttttgttttatagttgagtggctttagggtaatttaatcacctggaaagtgatatttttttaattaccttttgttactaaatcttatctaatttaaaatactatgttttgaaagtatatatcttgtatagttatctttttatatgaaaatgaactctaatacatatctttctttcagtgttcatatcacaaagctcaattaaatggtcctggaaaaaaaaaatcgttccatgttgttccaggtcccgttcaagaagttcttccagttcgcagtcaagatctcgttccagttccagagaacgttcgagatctcgtgggtcgaaatcaaggtgaatgaggtagcatctctctgtaaagcagagagaaaaatatttaaaggctgcagaaggtgttgctgctttttttccccttattttgcttctacttgtcgattttattttagcattagaaaactaatgcacttgcctcagcttaattttctcaccatgaaatgtttccattgccagcagtgtgccaagacattcccatgattgaaatcaggtggctattttgcaatatgcagcgtttattattttggcactaagatgttatgaagtaggaagatgaagccaagtcttatcgccacatctctagtatattaagattatatatggccaggcacagtgattcatgcctataatcccagcactttgggaagctgaggtgggaggatcacttgaggccaggagttcaaggttgtagtgaaccttgatcacagcactgtaatccagcctgggtgacagaggagtgtctcaaaaaaaaaaaaaattaatagtagttcaaataaaattacatatgtaaataaaaagaaaaattttcttcattat

SEQ ID NO: 6417 - DNA, 1171 bp, Homo sapiens
acatctgaagatgcacctttttctccaactattgagcggctactttctttcctctttccctcacagctgtctcccaggcagatgattttagtataatatctgtaatcactccagagctctttcctgatgtgtactttgttctctgaaccctttaaagttgtagcccctctgattattttggtcccagagtttcatgccttttacacattgttattctaaattccacgagtcatttacttgctcataatccaggtctttcaagcctctttgagtttgcacactcggttccacactatttgtctccatttttgtatcattagccaaattgactaatatgaagtctgctcaggatggttcaaaatgaaaataatgtgctagctgaagagtaaatattactgagctatgaatgatgaagatttgctcagaaattttgcttatgagtagtttgttatgaagcatacaaaccctagcattcattagattttttttttagtaaaaaggagtaaatcttttcttttgtatgcaaaatgcacttttcctttaaatttatgaagtttattggctttttaattttctttacaatataatatatttgcaacaattaatcctatattcttcctctttgaaatacacattttctaaaaacatgttgatcatgaggtagatagaataaagtagcttacttgatagcttttccaacaaccttctgatgttttttcttgtgctgtagaggctggaaagctgaaaaatgacattcccagactccattgaaattagatttccagaggtgatttatgttccacacatcagatgtatatgctcaagatttgtttaacagggaaggaggcagtggtgtgtgggtcccttttgctcatgtgaatcttacaggtatgggtatggctctcaagttcacagtgctggttactgcttgctgatctcaacagtctaaagcagtttttttttccagaggcaacagttttgtgatggacttcctaaattatccagcttctttatattggccaaagtagtagtttccttgatgagaaaggatacagtgttctgggagctaattctggttagcctagatagagcctgttatcacagccctttccaaaacaattttgtcaactctaatgccttgtaaaaagtcactttctgcttatgagaccag

SEQ ID NO: 6418 - DNA, 1312 bp, Homo sapiens
ctgagaccgttgctagagaaacaagacaacatccaagttctccacatcatggttttccgggcgccagccaaggcgctccgggggcgtggttacgtgggcgacgcacggagggggcgggtcagaaacaaccgggcggaggcgcaccccagggcgcatgcgtgctgtgcggcgcggtctcagggaaggtggggctatggcagctgctagggaccctccggaagtatcgctgcgagaagccacccagcgaaaattgcggaggttttccgagctaagaggtaccagagaaggcaccggagttctcctgggcaatgcagagggagggtgcttttacgtgccaggaggtttgctggactgtcacttcccgtttacttctcatctgtaggcctatgacgctccccaggagtagctagctaataatccttttgagttttttattcttttcactgtccctgcttgacatgcttgttgcttactttattcttagtagtatagatattaaaaatgagggcggaggaagaagaagaaaatcttactagtgaagttatgcattgattagctcattaataaaagttgctttaaataaatctaaaagatacgaagcacagtattttgaactttatgagtagatgccagccccctatctacttcacgctttacattacgttcatctacttctgtaatgtaaccgtttgttgagggagtaacagaacatggaggaattatggattaaaaattaaaaggaagaaatttgttatcaaaaaattggctatgacacttaatccctgtacacctgtctaataaaagtgattatatttgtgttgcagtgactgcttaaaaaatactgggactaattcttggataacagtaaaactttcaggactattagattctagctgacaagttctgtttgttaactaattaaaatgctaaatcattttgtttatcaataaagagattccaactgtctactaaaagtgcacactgtcttttaaagatgtcatcagagagttgggaccttctgttatccagaattttatgttatattctaacagcctatgtaagtttgcatggttcatcttaaagtaatagaaaataaagtacccacatttataaacagcaacattgagggaagggatctttgggttgtgtctttcttagtcacctaacaccaagtgtccgtgatacataagaattgatttgcaaagctggagatttgtttatgtttatctcctcttcttattgaagaattgaggcaatagtctttggcaagttaaaagtcgctctcttaatcaagaaacattatgtcattcag

SEQ ID NO: 6419 - DNA, 1312 bp, Homo sapiens; identical to SEQ ID NO: 6418

SEQ ID NO: 6420 - DNA, 1206 bp, Homo sapiens
taagcacggggccctatgcaagctgcacaggttgcacatacgtgaggcttggtgctttaagggaaatgggtgccttcccactcaactgggtgtttaaccctcctccccacattgagaaagaggcagagtgctgcagattctgtgatgtgccaggacttgactcctgctcacatgtggcgcccttgggttccaggacaatgggtagctgtttggaagcctgcaagggtggatgttttggaagctagggcaaagatctcagtggctacccttagatggagtaaaccgtagtccttttcagagccacttgatttcaaatgtgagcaaaggcagtgatgagcaccacgttttgaaaacaagggctttctccattttgagatgagttatatgatttgctgggttaagtgttgaagagccatgaaaaatgatcaccatctttattcttatagatggctccttgagcaggctttaatttgactggagttgcggggagtaaatattacactcccatataaggtgtataatagtgactattttttagttatgatttttggcttttaaaaatgggctttgaccttcaagcctcttctttccatactctactgggcttctgtcaacattcacgcttctctaatgcaataggattttaatattcacaaatgctaatgtttttaaacttaacagtcctttaatgtcctgggtttttatgcattctattcttgccaagcaagaatttatgagccctttttggttttgcctttaatgtggttgaatttaaactataactttaactcattgcaaattttatttatttattcatctattttaataacattttttggaacagttttaggtttacagaaaaattgagagaaaaagttcagatagttcccatgtacccacttcatctgcccacacatgatatcctttatcttatatatcctacatcttacattagtgtgggactttttgttacaattgataagccaagattgatgtttcttgactaaaatccatatttcatgcctctcttcatctctcttcaattctgttctctcctgtaactattagtctattagtcctatattatacctacttatgggcctattctccatattgtctaatcttttcatcccccttcaccagcttctcttcatctctatgtgtgtcattctgtgtcattcactcgggttattgtttagttaactc

SEQ ID NO: 6421 - DNA, 1209 bp, Homo sapiens
gggtaagaataaaagactgaaggagacagctagctaagaacagttcagaaaattagacaaatattttggccacattaaactttagttttcccaaactttctgaaatgtaaatatcttttctttttttatattttgaagactcttctccaaaattttgataaatggctttttataataacttaaccaatctttagagaattccatattttcagactttcacaaaatcaggttttggaatctgtagaggctacagaccctatatatggtttgattcggttttatattacaacacagcttatgctactgtctaaaatgttgaataaatcaaagtatttatgtactaaagatatttaacctacacttatatttttcttgcagatttatgaaggtacttcacaaattcaaagacttattgtagcccgtgaacacattgacaagtacaaaaattaaaaaaattactgtagaaatattgaataactagaacacaagccactgtttcagctccagaaaaaagaaagggctttaacgttttttccagtgaaaacaaatcctcttatattaaatctaagcaactgcttattatagtagtttatacttttgcttaactctgttatgtctcttaagcaggtttggtttttattaaaatgatgtgttttctttagtaccactttacttgaattacattaacctagaaaactacataggttattttgatctcttaagattaatgtagcagaaatttcttggaattttatttttgtaatgacagaaaagtgggcttagaaagtattcaagatgttacaaaatttacatttagaaaatattgtagtatttgaatactgtcaacttgacagtaactttgtagacttaatggtattattaaagttctttttattgcagtttggaaagcatttgtgaaactttctgtttggcacagaaacagtcaaaattttgacattcatattctcctattttacagctacaagaactttcttgaaaatcttatttaattctgagcccatatttcacttaccttatttaaaataaatcaataaagcttgccttaaattatttttatatgactgttggtctctaggtagcctttggtctattgtacacaatctcatttcatatgtttgcattttggcaaagaacttaataaaattgttcagtgcttattatcatatctttctgtattttttccaggaa

SEQ ID NO: 6422 - DNA, 1156 bp, Homo sapiens
cctgttaagagttgagcagcccgatttctgaacccctctaaaaagctgtggctgattggtggcttttttttttcttggagagggggtgtcaaagatttctttaaaatcgttagtgatgtggtctcgctttaagatttttaatgggatcagaagaaaattcggtacttaatcacttccggtaatcttcatgacctgttatagtgactgcagtgtactctcaatgaggaagatatagatacgaaaagaactagagccgcatcacatggggacttctgcaaatacagagactcggattaaaggtggagaagatggagctaaaggaactgcttatttaatacatttgaacaacttttggggtacttagaaggtgctttgaaacctgcatttgattaagcaagaattcgcttgcaagttaagggttagatttttttattttttaaaaatatgctttctgccacatgtaaaccgtaagttgtcctgaaatgataagctttgatattctatggtgtttattttttacttatctttttgaatgaaaagtgaacaacaagaaatgctggtggtaattttttgggtcaatgatgagttggcatgtattctgaatctaaagttgattattactactttagctctagaattactctgagacctgaaaattacctgaatcgtgactaagacgaagcctgaatgatttaagttcttttttgttggatacaatttgttgttgttgttgttgttttggttttgtttttgagtcggtctccggtcgcccaggatggagtgcagtgacacaacctcagttcactgcagccttaatttccctggctcaagcgatcttctacctcagcctccctagttagttacaatttttaaatggaacgttttcctattacaagatgaaatcaagtgaaaattgagatgtatgttgaatctatgctgtggggcagaagaacgttgtagaggtaaacattgatgagattaccactttattttgaaagggcactccacagaaggatgttattatcaagtcagatgcaccggacactttgttattggagaaacatgcagattatatcgcatcctatggctcaaagaaagatgattatgtatgtataatttttttatgttggaaagtttattttaaagaagtgtgaca

SEQ ID NO: 6423 - DNA, 1156 bp, Homo sapiens; identical to SEQ ID NO: 6422

SEQ ID NO: 6424 - DNA, 1023 bp, Homo sapiens
gctcaagtgattctcccacctcagcctcccaaaatgttggaattataggcaagagctactgtgcctggtcaatttgctgttatttttgacaaaggaattttcttgggaagtaaaggcacttcagatttagctttcctcctgactaccctaaagtgaaagttaagcttgaactcaatttaaagtggtagttgtgcagtgtttgtttttagatgactcatgtatgatttggtaacacctgccttgatttgatctatttttattgtaggagaaattgacacaagattctctttttgtgcggtggcaactttggctttgttggtaagctttgaatatttgattgaaatgattaaagttcatgaatactctggaattttttttttttttgagtctgatctgctgaatactctggaatttaacaggcatctttttttttgtttgtaggggaagcttgatgctattaatgtggaaaaggcaatcgaatttgttttatcctgtatgaactttgacggtggatttggttgcagaccaggttctgaatcccatgctgggcaggtaatttatgaatacagatgaaaatgtattgtcattttggaagccagtgtagtaaaataagaaaattggttatttcagtgtttgtcaaatacacataaagttaattcgactgtaatagggcatcttacataagaattgcttaattgctatcattactttgctttatatactatatacctttctctgtcggtggattcgtctgacctaagcaaacataagtgggtttataagcaccaaaacacttttgttttccattaatttttcactaaccatacagataaaaaaaaaaacaacacatttttctttctttcctaagataaattatgaacctcttttcttgtgccagagaacactgaatatgtgaatggatggctgtgaaatactagccatgaagaaattttgacaataatatttcagtgcagaattgcatactagtaatagtatgcttggattttttcagatatgtggtat

SEQ ID NO: 6425 - DNA, 1094 bp, Homo sapiens
tttatagacttctgtcaccatattttgaagagcaagggtttagttgattttaagcaggtgtgtacccccctggacagtgcttgtagaaaaacagaactatacccatggatttcatgattatactgctagcttcttggttaaggggctgagttaggcattcattgcagatagaaacaaagcagatgcatgcttatcagtgagtactgagatatttagcatggttacctatgaattgaagtttggtctcttcttacccattaattgattatctttcattctaagcaagtatttcataccctgcatatcagtatatccctggatttcgtccttccacatggtttgacactttgaacatcagattacctaagagtgagacttaacccacttttaaattgttctcaaaattagggaaataaaagagaatgaaattgtggcaacttttttccctcctagttaccagatgtatgctactcatggtgggtcctggcttccctaaagataattggaagacttcattggattgatagagagaaactgcgtaatttcattttagcatgtcaagatgaagaaacggggggatttgcagacaggccaggagatatggcaagtaatatttctgacatatttctataaattatttcagcgtttgcattacttcatggttccatggatttccagggtggcattccgagtgttgctttgaaagcagtttttttttctatttattgtagagtgtatgaaggatatagaacaatcttacagaaatttcttgtcgcttgttgctaacaaaattagtatatggtaaaggtcaggtattcataatttgaagttaaagaagttttcattttgtgatctgtatataaattcttttttaaataggtggatccttttcataccttatttggaattgctggattgtcacttttgggagaagaacagattaaacctgttaatcctgtcttttgcatgcctgaagaagtgcttcagagagtgaatgttcagcctgagctagtgagctagattcattgaattgaaagttgcatagtatagttttgccattttaacatttctgtatttgaagtgcttatcgaatc

SEQ ID NO: 6426 - DNA, 1212 bp, Homo sapiens
tggtggcaccacttgtgtctggaaaaatcagtttgtgattatttctaaaccaaggaattttgttcctgctgattgcatatcaaatcctttctcacactttggaccccccacttctttgctggctaacagggagaattaggggtgcaggaaacagctttcacagttagattatgctggctttggttacaaaagttaatgcattagtgctagagttcactatcttaattactgggttagtctcatatttaaaaagtcattatttaaggattaggaatggggaaatcgaagactggtgaaagacgatagttttttttcgtgttgatgattcatagccttgttttagacttttataagtaataaaaagcactggatactgctgatttagtctcttcctagaggctcatatttgtgtaaagaaggaaattactctgtaagttttcccttttgctttttcctggctctctctttctgtgcctttgtctatattgaagcctatttttctgatgttccttcttcatctccagccttcatgccccttcccaatacaggtgttgcagggatcgttagctagaatgtctaaggaaccatactatcaacccaagagaagggaagcttggtgaactcttaaaaccaagtagatgaaaccttcttgcagagtcccgggatataagccattccattaggaatccttccctgggaaatatgaatcattgctatgcctgatataaaatcactgacatggtgttcatgacagctcaccatgtcatccctcacacctttgccatggcctggaggctgactacactactacttgtgtttgttcttttattgctgaccttgtcaaccaggtcattctttctctcttcctatttctaagagaaaattcattccccagaaccagcaagtacctgaaccattgccactttatatgtgctgccttatttatttttcatctcattctttggctgggagtaaaagaacctttctctcctaccctggtttatgttgcctgattatctgttcgtcggctggtttgatgtttatttaattctgccatgctgcttaaccttagaagcctggttttgtggcttgatttgagccaagatttctgcatgtgacttctaacttgtgggtaaattaaggtttgtttttctctcacccatctttgacccatgatattaaaacgttatttgaagaaaggacatccaaccc

SEQ ID NO: 6427 - DNA, 1445 bp, Homo sapiens
aattggcctaattttggttttctgactgcagaagtggatgcttcctctgcctgtctctactctcagctcttattgttttttttggtgaaagagattaatccaatgctccgtggaagtagatatcaagaactcttgagcagagagaagttttgcattctgcctgtttgacatttacaaggtatttcattaacactgtgggcgattcaatccccttttatttttggctgcccttgctgtgcctctgaaggaaggaaggccattcttttgccaggtaaggggcaggaaaatgtgtgactccaaagctacctggagcctgatgggggttaggttggtccttgctgcccctgctggtcacatggtccctgcttactctgcttgccttttgtcttcctctttgtggactcctattgatccttgtacttcctctggcagagtgtttatcagattatattgaaattgcctgtttacttctgcctctcccacagaacagtaaaaacctcaaagactggggctctttctttctttcttttctttctttctttttttttttttttgacaggttctctctctgttttccaagctggagtacagtggtgcaatcacagctccttggactcctgggtcaagggatcctgccaccccagcctcctgagtggctgggactacaggcatgtaccaccatgcccagctaaattttaattttctaatttttttttttttttttttttttggtatagagggtcttgctaagttgccagagtgatctcaaactcctggcttaaagtaatcctcccacccaggcttccaaagtgctgggattataggcatgatccaccgtgcccaggcttgttttttattgtacacttagggacttgcctatggtaggtactcagtaaatgtttcttgaaataattaatgacttgggttgatttggatgaaagacggaatggacggagggcattttttagtagcctggagacttggtttccatgcaccatgctgggatgtccctggcagcccatctactgagctggcaccagcatgcttaccagtctcctttgtgacagtcccaatggatatttttattagccagcatgatttatttcataatgctgagttgcagcacccttcatggctagagatttttgctgtggagataagttcttagaactatctccatttccagaaaagagagggtttctctcgtctgttgcccagaaaagaagtcagtttacgtatgcatcttccctgggtcaggctaagaagtagccccagcactggcatgctagacttggagagtctaatattcttccagccaaaccctgaagcaaaccacacctcctaggtcctgcaagtccccattaagtgtgcttaagtcatttgaactcctagagaatccatgtcagaggaggagaatcagcattcaacaaaagatagcatgtagt

SEQ ID NO: 6428 - DNA, 1150 bp, Homo sapiens
tgaatgattggtatgcataaataatactagcctgctgacatttacacatttgcattaatacatcttaagactgaaatatgatggaaatgctgtagggctgatagtggcacattgtgccacacttaacaatgaagaatgtgatcatgttcctggcacacacatatgcaaaaggaatgttaacttttctagagaagcagttgagagccaatgtgagatattctgctttcctatgggtaggtgggcaattgcagcttggatttcactttagaaatatgcttgcaaatataggcacattatttaattaagtaataattgagaaagcgatagtccccattaaaagagcaaagctaattctgggctgttaaaggactctgagctgccctaaataggtcttaattagctggtgccaatgtggctccaccttcagggatggatgaaattaatgaaagctagcagcaaatagaatcaatatttcaagatgttcctgcctcaggtgaagaggatgaaaagaaagggagtcattttcaaagactgtttaggaaacaatgcacataaatcaatttctaaaaacataaaatgggacactgatttgtgaatacagtatcaagatctctacctggctcatctttgccagcctgttccatccattcccactcaatcttaaggagagaaaaagaaatcagcgatgtgtcattcctcactatctttgggggtgacagttttataagctagcaagggttttaagggcagcccaggttttgctatttcagcttggccattttgaaagtttcttgtgtcattgcgtggtcaagtgtagagatgaaattggctctcatccctcaggtttgcaaacctttagtaatatctagagtggaaaggggtttcaagtcttcttccttgaaaatttgggaatcctcttgtaggtccctctgtcaacacacaaggaagccgccttaacacacacagtgtagcttgaaggtggagggcaaaaaccaaaaccaaaataaaacaactatgctagccatatcttagagtcgccatggggtacagaaatgtgcatagtttgcccgaagaaatgccatacctagattccacaaacaaagatgtcaggttattcctaactcagaataaatacctgctaaccccagga

SEQ ID NO: 6429 - DNA, 1571 bp, Homo sapiens
gtagcaaggactggtgagaagggagctgtgagtgcttcttgaatgtaggacctgctccttactggggagaatagctcactcatttctaccttcctccaggtctcatgaacatgcacagtcctgtgtgttgcatctcctaatctcatctgattctctgctgtttgcctggtcttggactaatttccctttagcccacatgatgatctttaagttaagtctcagcctatttagactcaggctgcctcactcaccttgcagttgccatctttattatattatggcagtcaaaggttattttgtttggacagagaagttactctactgtatggtggactacctgtcctgaacgttcgcaaacatatccttttgttttctggagttcctcctggtttgttttctgatggatttctgttgactcccagattgaaccaatgtttatcctgtgtttggtgtatcaggcttttctgttctggttgatttcctgtagctaatttctagggagacttcaattcctcactgaagtcaagttccttgtcatagaggcccagtatttctaactcccattcagacagaaaatttgtttttattacccacaagagaaaatgatctggctttcctgctctaaagatacccctagtactactattttttccagtcttgtgttttcagatatttttctttaattgaccttctctatggtcagattcgtgactgtattccttcccctagtttattaattcttttttttttttttttttttgagatgaagtctcactctgtctcccaggctggagtgcagtggctcgatcttggctcactgtaagctctgcctcctgggttcatgccattctcctgcctcagcctcctgagtagctgggaccacaggtgcccgccaccacgcccggctaatttttttgtatttttagtagagacggggtttcactgtgttagacaggatggtctcgatctcctgaccttgtgatctgcccaccttggcctcccaaagtgctgggattacaggcgtaacccaccatgctctgccttattaatttctaagagtcttcctagaacactgtaagtatgcttaacctggtattatagagacatgtaacagaactaaatactttccactccacaaaagaagaggctattttgaactacatgtatcttcacagaggttactccagtaagtaacttgtggaagggagggtcattggaatatggaaacagacaaaataaaatctgttcccttttcctcaaacctcacatagcctcatacaattaaatgagatcttggttacctctcagcctgtaaagattcccctgagtgtgtatgtgtcaactcctgtcttggttcattttatgctgctataacagaatactgactgggtaatttataatgatcaggctgcgtgacttatgatgaacagaaatatatttgggttatggttctggaggctgagaagtccaagagcatgctggtggtatcttgtgagggccttcttgccatgtcataacatggcggaagccatcaaacggagtagagagaacatgcgcaagggtgggataga

SEQ ID NO: 6430 - DNA, 1213 bp, Homo sapiens
tgtttcatatctataacctcttggtagcttccccaagaatagttaattgtccatgtgaccaggactttatatccttatgtcacctacttctgcttccttcccccaccagtttctgggaagaattttgccagatcaccagatgcacacagttagctactaaagaatctcttgtctgtctctttagcttctccataaatacacacatttcttcatttgtttttaaggcaatgctgtatgtgtaatcatgtgtgaatctttattgaacacttatggaataagccacctgttcttacaaattagctgagttctcaagaaggcccaaattagtgaattagttgatgaaggaaatttgttgcggagacagcaggcagctaagaaatttttcagcttgtcaaaggtattgttagtctcacagcttggcaaggagagaagaagataccattttgaagaattttaggtagtgtcttaataccttacactcactaaggacgaaaatgaaattgcttgtcttatcagttaaagggaagctttgctgatgtcagaccatagcccagaaagttaactaaaagttttgtagaagtagataatcttttcctggtgatcgatgtggtgagattggaagtgagttgccaggggagtcatggggaaataggcttaatcattttatttgtatttgtgctgaaggcagtgctgaacaaacctctgaagtcacttagccatgtcttttccagggggcatgcaaggcgactgctgatttctacagacactttttaagcgattaccagtgctggcaagtggaactacctttccggtcctcttacaagcatccagtcacttgctgaaatgtcataagcgatataaacctgctgacaggccaggatcattgcatctcctgcctcctccttccacgtaacaaatctcattgttgattggcatatggcagcaagcatcccaacacccagagtggtgttcttatttctgagggagcagggtctgtgtgtgaattgcacacacagggagcaatcccctgccctgatacaggcaacctgagtgcttagttccttctctgctcagaacttagtgtgactatgtggcctacctcacattgtttgtgttacacctacacaggaaaaaggaaaaatgtccttttgattccatgcttgtagagatgttcatccaatttgaatgaacatgtagccaaggtagtgtcttc

SEQ ID NO: 6431 - DNA, 1168 bp, Homo sapiens
gctcgtccgcactctgaacgcggccaaggtgccggccgacaccgaggtggtttgtactccgcctactgcctatatcgacttcgcccggcagaagctagatcccaagattgctgtggctgcgcagaactgctacaaagtgactaatggggcttttactggggagatcagccctggcatgatcaaagactgcagagccacgtgggtggtcctggggcactcagagagaaggcatgtctttggggagtcagatgagctgattgggcagaaagtggcccatgctctggcagagggactcggagtaatcgcctgcactggggagaagctagatgaaagggaagctggcatcactgagaaggttgttttcgagcagacaaaggtcatcgcagataacgtgaaggactggagcaaggtcgtcctggcctatgagcctgtgtgggccattggtactggcaagactgcaacaccccaacaggaccaggaagtacacgacaagctccgaggatggcttaagtccaacgtctctgatgcggtggctcagagcacccgtatcatttatggaggctctgtgactggggcaacctgcaaggagctggccagccagcctggcgtggatggcttccttgtgggtggtgcttccctcaagcccgaattcgtggacatcatcaatgccaaacaatgagccccatccatcttccctacccttcctgccaagccagggactaagcagcccagaagcccagtaactgcccttcccctgcacatgcttctgatggtgtcatctgctccttcctgtggcctcatccaaactgtaccttcctttactgtttatatcttcaccctgtaatggttgggaccaggccaatcccttctccacttactataatggttggaactaaatgtcaccaaggtggcttctccttggctgagagatggaaggggtgggatttgctcctgggttccctaggccctagtgagggcagaagagaaaccatcctctcccttcttacactgtgaggccaagatcccctcagaaggcaggagtgctgccctctcccatggtgcccgtgcctctgtgctgtgtatgtgaaccacccacgtgagggaataaacctggcactaggtcttgtgaaaaaaaaaaaaaaaaaagagagagctattgtacaacatg

SEQ ID NO: 6432 - DNA, 1467 bp, Homo sapiens
ttcatttggaaaagaaacaattgtgaagacattaaattctcactaacagaagtaactttggttaattattttttgtatatcctcccaatcttttgacttatgcacatattttttcccaatatggagatcatatggaatgtactattttgtaatgtcttttttcattttacaatgtattatcaaccttttccctctcaaaaatacattgtgaatgactgcatagtattcactttatgaatatttaattcatttcacagtcttctattgttggaccacttacattgtaccaaatgttttcctttggtttattctttaatgtattaatattttactgctggtcactcatggaatcctgcagctttaattaaaagcaaagatgaaaaattggttttttaatctatggcactgacaatctccaggaccttatatgtttgttgtcagtttatttgggaaattttagacctttgataatttcacgtactgactgctcaagagaaacataccccattgtttttcatttgtaagcgttctgtgatcttctacaattggtcacgtcctcttcattttccatcttgaaagagagagccaacaaggactttatttcattctgttttaggtaaacctccttgcccactggctgtatctatactttccttgagaaaaatcccataaagtggatggacctgtgaagaaaatgtatgcttatggcctagccttcatgtctggctgatgtatcctataaggcagtaagccccttttctagtctctggtaagatgcaagagctcatatccccatcactgacattttagtttggaaataatattgagactgtgctatgaccaacccctgatgttgttttttcttttcaaacttttgcatatgagtagaggaaaagcctaaaagttaagtatttatgtctggggggataccttcaggtgtcttatctgttttatgcaagaatttatgtgttcatctttattcagtgcaaagatttttttttaaattttgtttataattgtaggtaacattaagacaactcttcctccacaagaaaacctcctaaaattaatattccttaagatttgtttttccttttgcacttataatattaccttttaattgcatgcaagattgtcatacttttcaaaaggcaaaggattgactgtgttatctccctagttagaacaaatgatattgaggctttttgccagctctgaatctttattttaattgatctttttattgatgtgttatataaatgaggaagaaaaattttgtctgattatgtgaaggatctttctgtacatgaaaagaagggaaaataaacttgcaattgaatagactgattatagtagcactgagacacaaaaagattgaccatgttgccctccagacactcatacaaggtcgtggacaccacggtgaggcggagctatttagggtggtaaaggaattatgattgttct

SEQ ID NO: 6433 - DNA, 1277 bp, Homo sapiens
aagaatggcttttatgtttttgaatggttagaaaaaataagtctaaagaaaaataacatttcatgactagtgaaaattacacaaaatttgaatttcagtgttgcactataacagcagagctgcatatttacaactgagaccatatggcctatgacctacaaatgctttaaatatttactatctagctctttccctaagcagcctgaggtaatctgtgaaaatggttcgctactcacttgacccggagaaccccacgaaatcatgcaaatcaagaggttccaatcttcgtgttcactttaagaacactcgtgaaactgctcaggccatcaagggtatgcatatacaaaaagccacgaagtatctgaaagatgtcactttacagaaacagtgtgtaccattccgacgttacaatggtggagttggcaggtgtgcgcaggccaagcagtggggctggacacaaggtcggtggcccaaaaagagtgctgaatttttgctgcacatgcttaaaaacacagagagtaatgctgaacttaagggtttagatgtagattctctggtcattgagcatatccaagtgaacaaagcacctaagatgcgccgccggacctacagagctcatggtcggattaacccatacatgagctctccctgccacattgagatgatccttacggaaaaggaacagattgttcctaaaccagaagaggaggttgcccagaagaaaaagatatcccagaagaaactgaagaaacaaaaacttatggcacgggagtaaattcagcattaaaataaatgtaattaaaaggaaaaataaaaaataaaaataaataaataaataaataaatatttactatctggccctttacagaaaaagttgcccaacctatacattagaataattatttagaagtggacttgctgggtcataagttatgtacattttaaattttgctagaaacaagtaaattgctatccaaaatgactgtatcaatttatactgccaccagaaatgcattaagttcctatttcctttcatcatcaccacttaaatttttataagaaatagtatctcattgttttaatgtccatttcccttctaaaatcacctttaggtgatcactaacatgagtcttttcctcttcttaaactgtatttcttttttcttctatttggtttgtcttttaaaaaattaatatgtggcgttatttcgataatctagacagaaattctttgaaatagatgttacaaataacgtcaccacactttttcttctcttt

SEQ ID NO: 6434 - DNA, 1160 bp, Homo sapiens
gtttgggggaatcacctgaacttgggacgttgaggctgcagtaagccgagatggtgccatggcataatagcctgggggagaacgctgtctcaaaaaaaaaaaaaaaaaaaagcaaggtaatggaaaggacactggagtgaaaattctgggtcttagtcccagttgtggaagtgaagcactcagtaagtgttgacaaagaactacctttcattgcacattaggagctagtaaatgattcgtgtgtcttactaacttttgtttaatcctcagttcctctatgaggttcattactattatgttctccattgtatacatgagaaaactggaggtgcagagagtatgttaaatatgttagctctcaataataattactgtgtgtgggactggagataccaagccgtgtccttatggaggttataatctaatgcagaagaccagcaataagtaagtaaataaaaactattacttcaattcaggcagggataaatgctttgaagataagtaatgctcagagaaaaataataatgggagaatggggaatagtctgccattttagatggaataagcaaagaaatcctctattggccagggtaaattcaaatagaaaccagaatagagcaagggaatttgctgcatgaataatctgtaggaaggggcagaaggatagcagtagcacacgggccctgagccagtagaccgtggcttgttctggcaacattaagatggccagagtagcttaagccaaatgagcaagaggagagtagtagttgatggcgtcgaagagggcacaagccagctcagatgtggccttgaaaacacatcattgtaaaggagtttagattgtgttctgatgtcttctacatacacacaggtctttcgctagacagagacctctaaggtcttttccagtattaaaatcttatgactttaaagtagtgatatcatttcaagccattcaaatcagtaatgtgttctagagaagagttgatttgcacttctagatactcttcaggggcaaagccatttacccttgctaaatttttcaaggtggctgtcagctacagccgtagaagcctgtaaaagatggctggacctttctgcccctctgctgtctcattttccttacctgtgcagtcagagctgtgctgggcatggactgt

SEQ ID NO: 6435 - DNA, 1204 bp, Homo sapiens
ggtaagccctaggaaaagaggactttcttcttcagaaaaggataacatagaaaggcaggctatagaaaattgtgagagaaggcaaacagaacctgtttcaccagttttaaaaagaattaagcgttgtcttagatctgaagcaccaaacagttcagaagaagattctcctataaaatcagacaaggagtcagtagaacagaggagtacagtagtggacaatgatgcagattttcaagggactaaacgagcttgtcgatgtcttatactggatgattgtgagaaaagggaaattaaaaaggtgaatgtcagtgaggaagggccacttaattctgcagtagttgaagaaatcacaggctatttggctgtcaatggtgttgatgacagtgattcagctgttataaactgtgatgactgtcagcctgatgggaacactaaacaaaatagcattggttcctatgtgttacaggaaaaatcagtagctgaaaatggggatacggatacccaaacttcaatgttccttgatagtaggaaggaggacagttatatagaccataaggtgccttgcacagattcacaagtgcaggtcaagttggaggaccacaaaatagtaactgcctgcttgcctgtggaacatgttaatcagctgactactgagccagctacagggcccttttctgaaactcagtcatctttaagggattctgaggaggaagtagatgtggtgggagatagcagtgcctcaaaagagcagtgtaaagaaaacaccaataacgaactggacacaagtcttgagagtatgccagcctccggagaacctgaaccatctcctgttctagactgtgtttcagctcaaatgatgtctttatcagaacctcaagaacatcgttatactctgagaacctcaccacgaagggcagcccctaccagaggtagtcccactaaaaacagttctccttacagagaaaatggacaatttgaggagaataatcttagtcctaatgaaacaaatgcaactgttagtgataatgtaagtcaatctcctacaaatcctggtgaaatttctcaaaatgaaaaagggatatgttgtgactctcaaaataatggaagtgaaggagtaagtaaaccaccctcagaggcaagactcaatattggacatttgccatctgccaaagagagtgccagtcagcacattacagaagaggaa

SEQ ID NO: 6436 - DNA, 1202 bp, Homo sapiens
gaacccaggaggtggaggttgcagtgagctgagatcgtgccactgcactccagcctggcaacagagtgagactctgtttcggaaaaaaaaaagtgtgcaaagtaaatacagtaataagtatcaggagagattgtagaagtctatagataatgtgttatgatgaaaaacttttgcctttttccctgttgaaaatgagatctgagaagacagtgtaggatagtatccttcggagatctttttagctatggtttactgtcacataattgcagttattgtggagttttaattcagaaaattcggttgtaaaaagtgcctttttaactcaaatatatatgttaataaagcgggactgacatgctattaccctagggttttatttccttcaaaatataaatgtaagtttaattgctaataccacaaattcttatggttccactattaaaataacatctcaataatttttatggtatagatgttatataagttacaattaaaactttttttaaatttaaggatttgttcaagtgtgctatctttttttgttatcaaggattttaaaatacccagtaatacaacattaaaaactcctctggttgccgtatttgatgatctggatatagaagcggatgaagaagatgaacttagggccagaggtaaattaatcctgtgtaacgcttctttgtatggcactgcccatttctttagaaaaccatataatgtaaaagtttcaaaatgtggaggtaaaatgggcttgataattaaaacaaaaggactctgaaatttggcctagtaaaattttatttgcaaaacaaacttttggtttctctggtgtcagtttaccaaaggtaggatcctacttactcttttgcagttgagccttatgatctttttgtttaacttgccttttgaggtctgtttgaacagtgtttctcatttttctattgtcagtgatggggaggtattaggtataaaggtattcccttagcagaagttccggggaaaacatttggaaaaagaatcaggtgatacacttctcccttcttcccctaaattgagaaccggtctatttggatttttcatattcttttaggcccactgttcttagtataagcttaaaattttctgttttataattgatactagtggtacattgaatgtatatttagataattatctggaaattaacactttggtttaagctt

SEQ ID NO: 6437 - DNA, 1689 bp, Homo sapiens
atcttctttgaattcaaaccctacaagcctaaaaaaaggtttaccagcaccaagtgttttgctttcatggagatggatgaaattaaacctgggccaattgtaatagaactatacaagaaacccactgactttaaaagaaagaaattgcaattattgaccaagaaaccactttatcttcatctacatcaaactttgcacaaggaatgatcctgacatgatgaacctggaacttctgtgaattttaccactcagtagaaaccatcatagctctgtgtagcatattcacccttcaacaggcaggaagcaagccgtacccagaccagtaggccggacggagtccaatgcaaagctgtaccacagaattcagagtccagcacatcactgacgtataggactccttgggatacaggtttattgtagattttgaaacatgtttttacttttctattaattgtgcaattaatagtctattttctaatttaccactactcctaccctgcttcctggaacaatactgttgtgggtaggatgtgctcatcttcagacttaatacagcaataagaatgtgctagagtttacacatctgttcacttttgctccaatatgctcttttgacttaatgtcaagctttgggttgatgtgggtagggtagtgtcaaactgctttgagaggaatgggaccagttctgctgcctaagaaggtctgtctggatgtttataggcagcacctctgaagtggcctaaattcaccctgatctgatagttttcctgcttagaaagtgtgccttggccagatcagtatcccacatgggagtgttccctaggttgtagctgtgattgtttccagatgaccagattgtttttctgaaaatgagcatatttttagtcatgtcgattagctgttcttctacatcacattgttactctttctgatgatgattctagggttaacattggaaccatctcaaaataattacaaagttttagatgggtttacaatgtcttctaaacaatgtaatctaaaaataattgagtcagatgctaacgagatactgcaggcataagtgctgtttttctgacaactgattgtgaaaccttaaaacctgcatacctcttcttacagtgaggagtatgcaaaatctggaaagatattctattttttttatataggtagataggatcgccatttatttcctatttagatatactgacattcatccatatgaaaatatgcaggtcattagcttactataatttacttttgacttaatggggcataaataaaactttcatagtacaaaaaaaaaaaaaaaacatttatgcacataaaaaccaattatatcactatctattctcctttctccaagttatgcaactctaatttcttcatccttttctcacactatcccttctatacacttattattttggctgaacatatgaacacaggaataattattttattttattttttttagttttttttggtctctttttttagagatggggtcttacaatgttccccaggttggtcttgtacttctgtgctcaagggatcctcccacttcagcctctcaagtagctgggactacaagcatgtgccaccacacttggcttcaggaagaattattttacagcagagttgtataacacaaagataaaacctgtctcctcaagaagtactatgtct

SEQ ID NO: 6438 - DNA, 1168 bp, Homo sapiens
aaaagagcattcctagcagagggaagaacatggatcaaggtgcagagtggagcctgtttagggaactacaagttctttgatatgttttggaaacacaatataggtggggagtggtaggagatgaacctagaaagctgggcaggacataaattatgaaggtccttgctttgtacctttagacaaaagggagccgttgaggattataagaagtcataatcaaatttatgagtttgaagaagtctggaagtgtggctggcacagtttaaatattttatccatttttgttgctgctcctttataagattttattgagtcagtgagacatcctttaagggaaaattagagattttgccagcttagtactgactgcacaaattctctggcagagcataggaaaagctgtcaagtagaacctcttgaccactagagagatgttattcttcttttttggtaagcagccagatagaacatttagaaatactgaatgaacttggcaacaagaggaaatacctcagcctaacatcttacatcaaatgtcagccccaagttgaagctctgagaccttgtcctctcccattcctgcagaatcattgtggttggaggataaactccctgagggtttatttttagggaatgatatgaattgccagcttaagttgtatactcagacatctaaatatacagagtacacattgtacaacatatgagaaatttggcttagtaatttcctcccatgtgtaaggctcataatcttatttttaaagggtttagtaataacacaaaatgaaatctaactggtattatacaagttaaagtaggttcagagaagaaagcaatataatgaaaattgttggggtcccagaaacatgagaaatttctggtgcttgcctttgcctgttttgtgttgaagttatgtcttaacagcttggatttctatgtccaggaccatcactgcccatataaggcctttatgtgatttagacaaagggccatccatgtaagccccttgggaggggacctttgtgccaagaagaaggtccactttccttcaggaagatgcaggtctagtatttgggctggatttctgccccgacttattcctgtggcaggggacctttgtgtaacatacagaatgaccagttgtacctcgtggccctgctcaagtctc

SEQ ID NO: 6439 - DNA, 1113 bp, Homo sapiens
gtggtggttcatgcctgtaatcctagcactttgggaggccaaggtgggcggatcacctgaggtcaggtgttcgagaccagcctccccaatatggtgaaaccccgtctctactaaaaatacaaaaattagccaggtgtggtggcgggcgcctgtagtcccagctactcgggaggctgacacaggagtattgcttgaacccaggaagtggaggctgcagtgagccgagatcgcaccactgcactccagcctgggcaacaaagtgagactctgtctcaaaaaataaattaattaaattaaattaattagttgggtgtggtggcatgtgtctgtggtcccagctacttgggaggctgaggtgggaggatcacttgagtccagaaggtcaaggctgtcatgagctgtgattgcatcactgcactccagcctgggcgacagcaagaccctatctcagaagtgaataaataaaacaaatacagcatttaaatgaattgacattgagaaatttacaatttacaaatttatattaactgtagtttccaaaatatgttactgttggtcctgtaagttacaaagagactgaagaactttctttttatacattagagcattttcccctggaatgagtattgattaaaaagataacatttattaattaataaaggcaatttaaaatttagtgttatttgaagactgtcaacatctgaaggtatgaaacttggtacagtgaaataatttctcctttctccttccttttagttattcccacagaaaactcagcccagtgggaatttgtcatattatgcccatgttttaaaaatattcatagtttgaatcttattgacattttaaagaagagttttttcctccctggaatgtaaaacaaaaatattttttaatgatgtggaagtatatatttcatgttcattatgataaatctacaaacaaatgaattgtttttatgggtggagttcttctataagagtatattaaatgctttcagagttgtattaattttgtttctaaataatataccacttatttggagtgactaactcagtatgtaagtagatgagatttgttgattttgcccctaaaacgggctttagtcatttt

SEQ ID NO: 6440 - DNA, 1145 bp, Homo sapiens
aaagtgggcgggaaaagcataatcttttaagatttgtaattttctgtatgtgccacatttatgtaaattaactataaaatatggaattcaggatcatgctgttttgcatgtactttataggttatatagcatgaaacatacaaattatcactgttctttagtatatagctccttgccttttcttacatagatgcttaatttaacaattacctatttatagttcttattattgacgggaatatgattagaagtaccaaaactaaaaattccattatgtactgtttactttttatttaatattacatgtttttaccttgttgcggtatctttggccttcacacacacatgtgtgcgtgcacgtgcatttcattaccatgtagacaagacagttattgcttatagtaatttacccatttgagggctaagtgttttaagctgtggttttataagcaaagctgtaagtaaatgtaatttattttagaaagatattatttgaaatcaattttgaagaattgcactatttgataatgctgctactacatgagataactctggggaattaattttatgagataagatgaatggctttctagaaggtgttgctttttgttttttctttttcttttttacatttcatcttagaaaaagttgcttatattcagcaggttggtttgtcaaattcagtgtttgagtttgtttctggtcagttcagtagctgctactttagcaagatgtggcctttcacaaaagaggtaagagtgaccaaatagaattttaggacaataagtataggaaatatctctttatcgtaagataagaaacttgaactttttaaaggaaatgtcctcttgaaaagaacatttctgactgcatgcagaagggtacttaagacatatataacaggccaggagcagtggctcacgcctgtaatcccagcactttgggaggcccaagtgggcagataacctgaggtcaggagtttgagaccagcctgaccaacatggtgaaaccccatctctactaaaaatacaaaaattagccaggcatggtggcgcatgcctgtaatcccagctactcgagaggctgaggcaggagaatcgcttgaacccgggaggcggaggttgcagttagccgagatcgtgcca

SEQ ID NO: 6441 - DNA, 1968 bp, Homo sapiens
gttctagtatgaagtttaatagttaaggagttagctatttgttatctttaagagtagggtattgacgtgaacaattgcagtattttgcatgatactgttttatagatgaccttttaggaaagtggtgcatttattaattgaactgaagaagtagttcagttgaattcagtatcataattcacaaattggaggctgttgattttgattcatttaaggtttaaaatctttattaattgcaaacagtgcaattatttatacttcacagtgccttcccagaccttccaccttaggttctgctgcaaaaagcaccaggtaagcacaacctaaggacatatataaataaatatttcaatacattaatgttgtccctgtgaggtttttgtggttgtgtattcaaaggcaatctgctactgcttccccaaaatgtattttgttattttatgctaccatcttagtggaaagtctgtaagttgttaaagcaactgtttacatttctgggtaatgttttttattttacttttttttttttattaagacaagaaaatgatgagtagattgctgcagtaattgaactacatccaaatctttttgtattttttccccaaatatagaagtgttaatattaagaaaggacaattacacagttttcaagatttaggaaatcacttgtttagaaacttcaacagccttcacaatctgttttatatgatggacagaaaatttctttgccctccaaaattataatttctttatttttttcttattcttaaactataataattcagtaaggatattatgggttagaattttattatgatttttttcttagacaaaagttatatgctgaagaaggaaaaagttataaggcagtatgttttgataaaaggcatgtgcatcagtgaaatgttaactgtatagcaaataacctttcataatctgtagcaatcagtatttttctgatttaataatattttaataactgacgctgcatttaatttttttgccagtttaaaatgtttgtgtgtttttatagatgattttaactggtacatattttgagttaagttgaatgtatgaaagcagcatcttatcagttttgtttattcgatttctaaaatgtgctgatccttttaaaactcctgcttatctctgcaacaaagaaaaatattcaaaaatactgccttcattttcacacacagtgctgaagatgctgcaagcaccaaatcatagctcataaaatcaggtcctgagatagttacccataaagaggaatcctttgagtgtatgccattggtgagccgatgagcatggaccatagaagggctcaatgtagaaggtaaaattggcaaatcataattgagaaatatgaaatgtattcccatacataatatggtatagggtgtaatgtacctgcttttgatcacttttcattttaaagtgctattcacttgatcttaaatgttccatgaactgttaaatttcttaagttacatagttactacaccacatttatgtgtatgttatgttttaatagtcaatgataggtatgtacaattgataatataaaggggctcattgaaacttgagagcctgttgagttttggttagttgtagattgcatttttataaaaaaaaatacagatagattgatgataatagatattggggcattgtttctgtctcatgagaattcttttattcattaccataagccttcactgatactataagcattattttaaatgacgctgatcttaagtctgaaataaatggaaagcagaaaaggtgagccagttgatttgaatgcattggatattagtgttagaaacaatgtatagtttagattgaaactgaactgacttatttagcacttaaacaaaaatttgacaatgtttttagttttttttaagacagcttagtgtggtgatacttagaattctatggtttgatgtttcttttagaaatgag

SEQ ID NO: 6442 - DNA, 1167 bp, Homo sapiens
tacatgaccactgtttcagacctgtactgctgctataacagttaacctttctgttcttaatttgataatacttgatttccaagactgtttcggcataactaattttaaacagttttcagatagtgaatatgagtagtctaataagaacagtttttttccatgtgaagcaactctttcaatgtatataatgttagtgtgtttctttctaaatttaggatagaaaagtgaatagtgtgcaaaaagtatagctacattgcatctgccattgaaacataaatggggtatggaaacgttcaagctttttttttttctttatgcagtatagataagctttgttttgtaaatgcacaagtccaatcattgaatcaacttaatttttttatgtacttgaagtcattttattactctttaacactcatgctgaagttctgatattttgttgaaatccattgttttactctttgcatatttgttggctctttgcatattaatatattagactacatgcaaatacagtctgtcttgccattgtctgttgaagtgcaggtttgatccagccagtatagaactagctctgtaggggtgaggaggactgtgctgtgtatcatccttgattgtgttccttcaaggagcattgcactgtaagtacatcagaatgacaaattgatgaactgcaacagtatctttttgtcaatgttccacataatgcaaatgccatacgttgtgtgaatattatgttggaatacagtgctgatatcttggaaaaccataactgcctcttaatttaacatagaataatacatagttctgtattttttttaaagtgagcttaatgggtaagtattttttatatgctttagctatagctaaagaaaactgatacttaacaaagttgaatagtattattcactggtgctcctaaaatattgtttttcagtgtaaaatatgcatatcttctatatttaatatgaaagtcttgaaatgtatcagacagaaggggatttcagtttgcaaataatgagcaatgtagcaattttaacacatttcataaatatatattttgtcattggtggagagcaccatttgttgttttgaatatactttaaaggaagaggtacaaggacataaatgttgagattacctacaggatggaaatagcagtacagt

SEQ ID NO: 6443 - DNA, 1152 bp, Homo sapiens
ttaccaagcatgacttgagttgtgctaggatataggtgtgcaaagttggggttgtgttctatagcaaaagaatgcactcccagcgtaagcaacactgatggaaggggctcacagggtacaggatataatactcttaacaactaatttttggagaatgaaagggcttttctttccctcttgttggctgattgggatggtataattaatgggattgaagagtttgagtaggttaaaaggcagattcatattgggtaacttggatctgccaggattgtatttttgagcactactgggtggttagcatgattgaggaaaaatgatgggaataagaagtggaagtggtctttgtatcacaagttgaatttctcacttggagtagtagtgaagtcactactgtaagagctggtcagtgaatgtggttgcagcatggcctttgggcaagaagtaacccatttaactaaaaccagctggttggccccactcagatttatcaaagggttactgggtccctgggggtggatattgcttatattagacttagaatagcatactgttttaatattatatgaactaaaatgtttctttaaaaaaagagtggtctgttaatggatttatgtagtggtcaagaatttagacttcagagtcaaataaacctatatcagtcctagtcctacagtttactaattgtgagatgtcaagcaagtttttgaactcctctaagcctctgttttcttatctataaattaataaatgaatgaatcgggttgagtgaatatttagtaaattcttagtacatactagttatttgtaactgtgagactggttttttggtatggttttcacatttgggagtagaaataccacttcctaaagtctgttttatctcaaattctctatccaggcatagtgtaaagtgaaatacctagatttcttgattaatatacagataatggccagacgccatggctaaaacctgtgacgctagcacttcggaaggctgaggcgggcggatcacttgaggtcaggagttggagaccagcctggcaaacatggcgaaaccctgtctctactaaaaatacaaaaattagctggatgtggtggcaggtgtctgtaatcccagctacttaggaggctgagacaggagaactcctt

SEQ ID NO: 6444 - DNA, 1098 bp, Homo sapiens
ctttgttttgaagatgatgggacaacacccgaaaggatagcacaaataacaggacctccagaccgatgtcaacatgctgcagaaattattacagaccttcttcgaagtgttcaggtttgatagaaagttaacattttcattttttgtttttatggaaaagtattttccttcatgaaatctgaagttacctctatatcagagtctgcttgatgatgctttattaatggagaaagtttaaattgctttaaggtaaagatcttggagcaggaagaactactaccttaagtgctaccttatttactcttgtattttaaaaaatgttattacttattagggccagttcatctctacatttctgattcaggtatatgagagctgggaaaaataaacttaataattttatcatgaaacaaaagtatttctgtgctgactcttcgttcttgtctttccctctctataggctggtaatcctggtggacctggacctggtggtcgaggaagaggtagaggtcaaggcaactggaacatgggaccacctggtggactacaggaatttaattttattgtgccaactgggaaaactggattaataataggaaaaggcaatgtattttaaactcttaatgttttaacacattattcatttttctggacactttctgttgctgtcgtaaacaagtggcaatgctttttctctgaccgtattttagtagaaaagaattcttatgttaatatgtaacaagtaaaacataaatgagggatctcatgtatatttagagaaagagcaggattttaatcttactagcttctagagaaagcgaactaagagataattattagcataagaaatgtcttttgacccaaaaagtggtttgagtgtttttgtttgtgcattttggtttttcccgactcatattttaaaaatttgaatgtttataagtgtattagtttatatttacactgcttttaaaagcagttaattcaaatattttattataatcacattaagtttatgtttaaacatactaagtaaatgtaaatgtattttaagagaagcatgaaatgcttcctaaaatttgattttcagtgtagaatatt

SEQ ID NO: 6445 - DNA, 1585 bp, Homo sapiens
ccgaggcacgtggtcaacttcgggcctggtcccgccaagctgcctcactcagtgttgttagagataaaaaaggaattattagactacaaaggagttggcattagtgttcttgaaatgagtcacaggccatcagattttgccaagattattaacgatacagagaatcttgtgcgggaattgctagccgttccagacagctgtaaggtgatttttgtgcaaggaagtgggtctggccagttcggtgctgtccccttaaacctgattggcttgaaagcaggaagatgtgcggactatgtggtgacagggacttggtcagctaaggccgcagaagaagccaagaagtttgggactataaatatcattcaccctaaacttgggagttatacaaaaattccagatccaagcacctggaacctcaacccggatgcctcctatgtgtattattgcgcaaatgaggtggtgcatggtgtggagtttgactttataccctatgtcaagggagcagtactggtttgtgacatgtcctcaaacttcctgtccaagccagtggatgtccaagtttggtgtgatttttgctggtgcccagacgaatgttggctttgctggggtcactgtggtgattgtctgtgatgacctgctggggtttgccctctgagagtgccccttggtcctagaatacgaggtacaggctggaaacagctccttgtacaacacgcctccatgtttcagcatctatgtcatgggcttggtcctggagtggattaaaaacaatggaggtgccgcggccatggagaagcttagctccatcaaatctcaaatgatttatgagattattgataattctcaaggattctacgtatgtccggtggagccccaaaatagaagcaagatgaatattccattctgcatttgcaatgccaaaggagatgatgctttagaaaaaagactttttgataaagctcttgaacttaatatgttgcccttgaaagggtataggtctgtgggaggcatccgggcctctctgtataatgctgtcactattgaagatgttcagaagctggccgccttcatgaaaaattttttggagatgcatcagctatgaacacatcctaaccaggatatactctgttcttgaacaacatacaaagtttaaagtaacttgggtatggctacaaaaggttaacaaacacagtattttcctcaaatgaacatgtttattgtagattcttcttttttgaaagaacaacagcaaaacatctacagctctgtaaagctggtgggaactaatgttcaccttaattctgacttgaactggaagcattttaagaaatcttctcattgcttttctaacaaattcccgcttgtttagcctttgctgctactttttctagttagatttccaacttgcctgtggacttcatactgcaagttgcaattaattatttctagagtcatgggaacacacagcatagagggtaggtggggccctctaggtgctgaatctaaacatctgtggggtctcctgtgttcagaggctgttgattcaaggtcaacattgaccactggaggagtggtttaagagtac

SEQ ID NO: 6446 - DNA, 1184 bp, Homo sapiens
tcaaagtacttgttttctttattcttgtgccaaagtagtcttgtcattatacagaggttacccgcagaactatgcaatccagcaaaagaggtttctgtattgacctacctaagaggacatgaagcatataaaactcaaatgactgaattacagagcggttaaatgtaattaagcaaggaaaatactaaattttttgtcctgttttcttagcataaaaaattggagttactaaatatatgagaataaaactataaatatattgctattatttaataactaacatttatataataacaggatatagagtatgtctacatgttatatcacattttaaagactctactagccagtctagtggacagagatacttttctgattactatttcagtaattttaattgaacttgattttgcaagttcaatttattttctccacggataagttttagtggaactttaattcttttcggttgtcttcactgttcatttaattagagagagagaagcaagtgtgttatattaatcccttggtcttgtgattattcaatgcaggtacgaaaagaatatggcaagtgcttcagacactcatactgctgtggaggcctcccaactgagagtccccacagttcagtgaaggcatcaaccaccagaaccagtgctcgctattcctctggcacacaggtaacaaagagtttgacagcatctttaattaaccttatttatagaaaacctactgagacatgttctgttcagatgcactaattgtcttctcattataatgatctagatagcaaatacttgcttttttagtattttggtttcaatgtcttcttaaacatttcttcagtgtttctttatatgtgaacgtccttttttgtggagagttatttaagaagtgtgtcataatcgtcttatagcctaaggccatatagcacaatgctcatagcaggcactcaataaacatatattgaataatcagtgatctccactctttaaagaaagacaataaagtaacatgtttttaagagtggaggattaaatgccccttagttgcttagtaaataaacaatagatattgttagttttagaccagaaaaaacacacattctttaaaaggccaccagataatcctacataggttgtttagggtaaatccttgtatgtctttaataaggtaagtttggg

SEQ ID NO: 6447 - DNA, 1208 bp, Homo sapiens
aatttttttttcctttttcttatttttctctccctctcaattataggttgaagctccattcataccaaagtttagaggctctggagataccagcaactttgatgactatgaagaagaagatatccgtgtctctataacagaaaaatgtgcaaaagaatttggtgaattttaaagaggaacaagatgacatctgagctcacactcagtgtttgcactctgttgagagataaggtagagctgagaccgtccttgttgaagcagttacctagttccttcattccaacgactgagtgaggtctttattgccatcatcccgtgtgcgcactctgcatccacctatgtaacaaggcaccgctaagcaagcattgtctgtgccataacacagtactagaccactttcttacttctctttgggttgtctttctcctctcctatatccatttcttccttttccaatttcattggttttctctaaacagtgctccattttattttgttggtgtttcagatgggcagtgttatggctacgtgatatttgaagggaaggataagtgttgctttcagtagttattgccaatattgttgttggtcaatggcttgaagataaactttctaataattattatttctttgagtagctcagacttggttttgccaaaactcttggtaatttttgaagatagactgtcttatcaccaaggaaatttatacaaattaagactaactttcttggaattcactattctggcaataaattttggtagactaatacagtacagctagacccagaaatttggaaggctgtagatcagaggttctagttccctttccctccttttatatcctcctctccttgagtaatgaagtgaccagcctgtgtagtgtgacaaacgtgtctcattcagcaggaaaaactaatgatatggatcatcacccagattctctcacttggtaccagcatttctgtaggtattagagaagagttctaagttttctaaaccttaactgttccttaaggattttagccagtattttaatagaacatgattaatgaaagtgacaaattttaaattttctctaatagtcctcatcataaactttttaaaggaaaataagcaaactaaaaagaacattggtttagataaatacttatactttgcaaagtcaaaaatggcttgatttttggaaacaatatagaggtattcata

SEQ ID NO: 6448 - DNA, 1249 bp, Homo sapiens
tagcagctttactgaagtataatccttgcataataaattgcatgtgtgtaaagtaagttttgatatttttatcccctcttgaaactactgccacaattaagatgacaaatatttccatcacttccaaaatttccttacgaccttttgtaatctctccctcctgtccttttctgcccccatatcccctggcaaccactgttatgctgtcattataaattagtttgcttcttctagaattttatataaatgaatgtgtatacatcccccgcccccacacacacacatatagtttctgtcactcagcataattaatttgggatttatccatgttattgtgtatatcaatatatcattactttttaattactgagtaatatttcactgtttggatctacaacaatttgtttactaccatccaaatgatgatagacatttgaattgtttctgtttcttaggtattataaataaagctgctttgatcatttgcgtgcaggtctctgtgtggacatatgctttcatttctctttcataattacttaggaatggaattggttgggctctatggtgggtgtctgtttaactttttaagaaactgccaaactgttttctaaactggttgtcccattttcattttcactagcagtgtgtggcatgttccagttgttccacatgctcatgagcttagtgtgatcaatcactttcatattagacattatatcaggtgttttatgttttcagttttatttccctaatgactaatgatgttgagcatcttttcctgtgcttatttgccattcatgtatcttcctagatgaagtattgttcaaatcttttgcccatatttgtatcgggttttttcatatttattgtatagagagtttttatatattatgaatatgtcctttatcatatatattatttgaaaatattttctttaagtgtgtgacctatcatttcattctctccatagcatctttcaaagtatcaaagtttttaaattttaatgaagtctagtttatcaatttttttcttttatggatagtgcttttggtgtcatatttaagaaatcttggcctaatgcaaggttacaattattgtctcctctgttttcttttagaagtttcacaattttaggtttcagggtttaggactatggtttttgagttaatttttgtttgtagtgtgagataagggtttgaagggttgaagtgctttgtgtggtggtggtagtggtgctatggatatccaa

SEQ ID NO: 6449 - DNA, 1534 bp, Homo sapiens
agttgtttgtttggacttccctgtcttcccccaaagagttgaaatcttaaatctatttaaaaggatataaaagctttggatatgtatttttagtaacagaagcatctggttctgtgaataaaggaatgtatagatgtttggatggaaacaaaagcactagactgagtttcctcttataggtattaaaaatagcacttttaggaaactgattattgtaaatgtttaattttgtctcaaatatagttggcattggaagtttagcctttacttgaatgtatactgtagatttttaacaaagcgagttctatatttattatgtttagtgtggtttgaaattacctctttcatatgttttaaataaagtgaaatttatgtatgttttgtacatagatacacatgattatgttaagaggctttaagatttaaaagtttcacacaaccataagtatagtatttcatgccagtaaaatttttttagtggtattctgtttacagatgtattaggaccattgatgcattacatttaagaattctctttaatacatctgggcaataaatattgaaaggtattccatgaagctgagttctttagataatcaacactactaacattacatttttgagatttttatgacattagatttttattttgtatatgtagaatattataatttttaaaaggactattgatgatagaagaataggggcaagacgacaaaagtacctttgaataaaacaatttaagaaattggtttaagatattggatgatagaagatatttaagatatctagatggtgatattttccttacaagatgggtaccagtatagtaatatctgtatactaactagggctttgtattgtcaataattttttaataattttttaatgaggtatttaccactgaagaaatatgataatataaaaccatcaaattttataattgagatgatactctggaaaaacatgtcatttcattttcagaaaactcttaagctctcttcagtctctgtaatgtttctgattgcatgtttcttcatgaaaagtatgttgttgttttgatagtaataataataaatgtaggctcagctctttcccaggattttcatcaaaaagctttaagtgcctaaccctgcttgtctctgtacatagaagcctgcacagatccaacccttgctaggtatcatagtttaggcccatttaccttcccctgtactggcagttcagccgcttacatgcactcaccctgtttgtggctattttaaattcatattattaaaaaacaaaaaaaacccacctatttgtgttgtccattcactatacgtaactatgtaactctttggagttgcatagcagcagccattttttcagggctgataggatatcattaagagtgtcttatgagacattagtggatatactcatagtaaccatatttatagttttaaagagctagctcttgagcattagtcactaccttcagcttgatgcatggtcacttctttactatttaaaatactacacattgtacaaa

SEQ ID NO: 6450 - DNA, 1299 bp, Homo sapiens
ttcaaatattgattagaggtatactatgaataaagcattctagataaactttttataaggtatgttttgcttagggtaaggctttgttagcactatagtttttataaaggcaggctcagagtttgtatatcctttttcttagaattctttgacacttgtactagcagtttgatttctaaataatataaatcatatttatatgtaaaattcaaattttttctagttcaattttagtctctgaatgtgattgttgttactttttgtttaaaaaaatttttttaaataactggtctgaagtgacatgtctttctgatataccagccattatattctaccttctattctatctttgcaacagatttatttgaaaatgcctatgggtcttcaatgaagggaagagaacttgaagagctgaaggataatattgaattcagaggtcataagccacttaacagcatcactgtttcaaagaaacgcaattggctatatcagagtactctgaggcctcttaatctggaagaagaaaataagaaatgccaagatagaagtcatttatccatctcacctgtgtctctacctaaacatcagctatcacagtctttcctcaaatcatctaaagagtactgtacatatgtggtatgtaacgctacaaactcttcattatcgaaaaactgtgctttagattttaatgaggaaaatgatgcagatgatgaaggagaaatatggtacaatcccattcctgaggatgatgaccttggtatatcaagtgccttgagttttggtgaggccgactctgctgttctgaagctccctgctgtcaatttgagcatgttgtctggcagtgacctgatgaaagcagagcggcatactgaagactcactgtgctcttccgaacatgcaggtgatattcagaccacacggtcaaatggaatgaatcctatacatcctgcccattccacagaatttgtgcagcagtacaagcaaaagctaggacacaagacacaagaaggtataatggtggaggacagtcccatgttgaaatctccttttgcaggtaaaaatgatcatatatgtgtctttctttcttcttccatttttgaattatttgataatagctaaaactaaatataaaagatgtttgttatattcatgtactttttcttgtgaagtgaatatattttcatgaaaataaaactcaaaaagttttataaacattttaacgtacacgctggtttaattattactatcacagacttgatttttattttatttttttgagaaagggtctcactctgtcac

SEQ ID NO: 6451 - DNA, 1190 bp, Homo sapiens
accgccctcccccacgccttcccgcggcagagttatgccaagtatgtgaggagccggcgagggccagcgccggtcatggggagccgccgccgcctccgcctccgcctccgcgagcgcggttttctccccagcggggctccgacctctccccctggcgggggtgagcctcgcggctaaggcagaggggatggcggaccctctgaggaggacgctgtccaggctccggggaaggcggggtccccgcggcaccggggggctagggctccgggcggcagccgcagctgcggtggcggcctcttcggcagccgcgggagacgcctggggtgccgcagacaccctcccacgtgagcacgccgggggacacgggcggagcctacagcagccctcgccgtcacctgaggcgtggggtcccggggcgcgggtccccggagggcacccggagcagttgggggcgctcgggcctcggccgcgcggcgggcaggaggccgccccccagagccatgggctcgctcacgcccctccgcactccccggagggctccgaggacagcggagaggaggaggaagacgacaaggacgaagacgactacgacgccgactactacgaaaacctgcccggcggctcgcagtctgcgcccgagcctgagggggcggaggcggaacggcgtcccccgcctcccccagcggcgggctcctccctgggggcggagggcggccgcctggagacaggcaggctgcggacccagttgcgagaggcctattatctgctgatccaggccatgcacgacctgccccctgactcgggcgcgcggcggggcggcaggggcttggcggatcacagcttccccgcgggagcccgggctccgggccagccgccttcccgcggcgccgcgtaccgccgagcctgcccccgggacggggagcggggaggcggcggacgccctcggcagcaggtgtccccgccccggtcgcctcagagggagccgcggggaggccagctgcggactcctcggatgcggccgtcctgcagcagaagcctcgagagcctccgggtgggtgccaagccgcctcccttccagcggtggccgagcgacagctggatcaggtgcggcgcgcaccgggactgggacgagcccccgccacgtggaggcaggatggacggctggagtggggaccgcgcccgggcggctg

SEQ ID NO: 6452 - DNA, 2814 bp, Homo sapiens
atattctgaagaatgtcttcttgatcagtcagataagcttgctttttttttttttttttttcatgaatcatgtttggttcctgtgaaagtccctggtccagggatcctcctcctttctcttttacttctgaattctgaaattcagttagttacttttgcctttcgctcttctatcacagccaccttgaccttgggtaaaacccaaggtctttccttctggctaccttcctgcaggtccaccctgtctgccattggtctcctctgcctctgactacatctgccaccaacaaccctcccctcacccctgccaggggcagacaggcttctcagcagaactgtgactgaaatcagagctgctgtctggggcagtgttaactacacagaggcacatcctgacagggtttgccccagagatctaaattccagaaggagggcaccacacctaggaaggtaaatccagtatcagaaggttgctaaaagattaaagatcaagaagcttggaaacatcccatgggtacaatgtcttagaaagtctttaagtcacataccatgaatttttgcttcattactgaccatatatgaccttggaggaactcttttttttttttccttctactcatttctgtttccacctaccctgactcaccgtatttccagtcttctacccctgcagttatcctagtccagcaaagtcatttctttcaaaagagacatcatgtctgaaaataattactggtagtctaatatgagccagagtaaacagctcctcatggtcaatgaacatgttcaggaagcgatcaccttgatgcttgaacccaaccccagacagtggacaattctactttgaaatatccgtgaatatttactgtgggatccaatttaaacttctttcttctctagcctttaaattacacaactttgaactgacacggatctcttacaaagaacaatgcggcactgaaggaagagatgattcctttactcaaacctgcaggaatcagcctattaacaggcaggggaaacggtactttccaatgaatggtaactgatccaggcacattatcacacttcctagtcatctccacctttcctgtattgcctgtggcttgttgtttaagattaagaatcaaagagattaagaagtatcacttcaaatcttgctctgctcacttctatgtttgcagtcaaattattccttatgttggtgacctaaagagaattactttcattcatttcatttcccccgtagcagatggaaggagaaacctctgagaaaatgaaaacatccttaaccactatctttcccttttatttgattattttatgtcagaaatttgcaaaagtttttttctcctccttctcttccttgttgcttaactttttaattcatgccatatgcagatatccaattatgtgcatcctgtgaataaaccacgtcttggtcactgtcatattttgaaccatctcatcagagatgaataatatctttttaccagagagagaacgaatgttagccacatgcccaagttaacaaagaaaaaatgttctcaaggttgtccttttgggttaaatctggcccttccttggcaaaagcaaaaattctccctgtgagagctcaacatctcaaatacaaccacaggaaaaatggcccaatctgccagtttaggcttaccagcatataatttttaatatctttacttctatcatcccaaatcaaagaactcttctctattatgtttaatcaattgcaagcaaatagatttttctttgtaacaatttgttctgcagaaggctgtttttcacttttcctttcttttgcttctttctgtctttccttctcttttgtctggagaaatcacttagactctgtgtgcctcttctacattgcattctgctctgctatgttacctgctaggctggcttctttggactccctatatgattgatgatgtgaaaacctaaattacttgcagcatagtattacttctttgatgttctcattagcataatgttatttttgaaaaggaaagatactatcacataagttttcctcatctgttgtgatatacaccaatggataaactaacggaaactgctttttgacattaaaagacaggagaaattatatttaactaagtaaaagttaagtcagaattacttgggtgatgtgattcaatttagttaaaggatgatatagagaaaatacattatttagcattatttcttcagctataatgaattgctatagaaatcaggcagatctttctaatgtgtattgattggtcttttcagctactctgaacagattactaaggccatctcctcatctctaagggagaaaaatagtctgtagatgaataatgtaaggtaaagagttgcatgtcagtctttgtaattatttacactttaactttctccagaactcagacatgatttcaacatggtgttagatttgtgcattttattttcctgaccacctcattccagccaatgtatggttatccactctgtgtgccaaaaccaatcatgcctttcacggccctttagttcagagaagttctgcactgatttttagtctcttgatgtctcaatcttacatgtataccaatcacaatggaataaagtgttgagttgtactgtgatcaacagtgtatgtctcttttctttgcaacagaaactgccatggggaatgaagtcatcatttctttgctgtcagtcatgggatattttctctcttgtcccttaggctatgaacttagaaaaataccatacctgtaaatcaattgccatcaaagcttgggttaaaataatatt

SEQ ID NO: 6453 - DNA, 1146 bp, Homo sapiens
tccctgagataaaaactataattcttttgatggcagttacattcccaactcttagcacaagatctaggacatagtatgaactcaataaatttttgttgaatgaaagaaaaatgcaaatttataagccttttcagagacctactgaatcaaactctgagagtggagcccagcaatctgttgtaaaagctgtttgagtaatactgttgcactctaagcttgagaaccactgcaatagaactaagagaacattcatttcaccttcaggcctattctctgacatcacttgaaaaatcctctctgccttctgtaacccttaaccaacaacagtgccctgtccatgtaggggaaacttctgggctgtattacaagtgggtaggaaggtataaggatatcatagtgggaagtattgcttagaatgccagtacttgtttgctgtggaaggtttctaggaatggattgcttagtctaaagtaagcactaccaccatccacgttttcactcaacacagtgccttttaattggtgactaacatcaaaacaccttgacaaaccgttaaaacagtatcagaaaccatgtgtacatccctgtgcctcttagattgctaagttctgctctcattcttacttcaaaggacactttttaaagaattgttaatgcttttttataatacaagtcatagccctgttggcaaaaagaaaaaagattcagtgagaaagaaaaatcactgataattccatcatccagggagaaccactgttatttaagtatatggccttccagacttttctgtgcatttatagatatttttaatgggatcaaagtgtacatactgttttgtaactttttttcactcaacaataccatgactgtcttgctgtgtcaagtatatttctacatctcttaatggctgcatgatattccatcatatgtgccacattttattaaactactgttcaatttttaggtttccaactttcattaataaagtgctttaaagaacattgtgttgctaaatctcgtatgtgttcatattttctcacgataaatgctttgaagtggaattgctagtgaagagggtatgccagtttttaaaagcttttgttactgccatgttgccccctagaaaactctaagcaatttatactt

SEQ ID NO: 6454 - DNA, 1680 bp, Homo sapiens
ggaggtggaggttgcagtgagctgagattgtgccactacactgcagcctgggtgacagagcaagaccctttctcatgaatgaatgaatgaatgaatgagtgatttttttaattctcctttttttccgaaatcctgtaaaactcttctccttaaagatttcctttaagacttgtttattgtcatgtctaaaagcctttttttaattactaaatttaaactggattgaattgctttgtcttagatgaggctgagaaggttgtttctgaacagaaagtaatgatgacgtccctcttttttgtagtatgtccgtggttcagaccctgtattaaagcttttggacgacaatgggaacattgctgaagaactgagcattctcaaatggaacacagacagtgtagaagaattcctgagtgaaaagttggaacgcatataaatcttgcttaaattttgtcctatccttttgttaccttatcaaatgaaatattacagcacctagaaaataatttagttttgcttgcttccattgatcagtcttttacttgaggcattaaatatctaattaaatcgtgaaatggcagtatagtccatgatatctaaggagttggcaagcttaacaaaacccattttttataaatgtccatcctcctgcatttgttgataccactaacaaaatgctttgtaacagacttgcggttaattatgcaaatgatagtttgtgataattggtccagttttacgaacaacagatttctaaattagagaggttaacaagacagatgattactatgcctcatgtgctgtgtgctctttgaaaggaatgacagcagactacaaagcaaataagatatactgagcctcaacagattgcctgctcctcagagtctctcctatttttgtattacccagctttctttttaatacaaatgttatttatagtttacaatgaatgcactgcataaaaactttgtagcttcattattgtaaaacatattcaagatcctacagtaagagtgaaacattcacaaagatttgcgttaatgaagactacacagaaaacctttctagggatttgtgtggatcagatacatacttggcaaatttttgagttttacattcttacagaaaagtccatttaaaagtgatcatttgtaagaccaaaatataaataaaaagtttcaaaaatctatctgaatttggaattcttctggtttgttctttcatgtttaaaaatgatgtttttcaatgcatttttttcatgtaagccctttttttagccaaaatgtaaaaatggctgtaatatttaaaacttataacatcttattgttggtaatagtgctttatatttgtctgattttatttttcaaagttttttcatttatgaacacattttcattggtatattatttaaggaatatctcttgatatagaatttttatattaaaaatgatttttctttgcttaaccttctgtgtggttcaaagtgacttcttcataagatcaaattggtctaatattctattatgtcggctttacctcaggataaattcttcataatctagaaacttcgctgttgattttgaattaaattattttaatgaaggatagttggaaatctataaaggcagctctatcagagaatgtttataaagtatgtacgtatgtatgtatgtatttatttat

SEQ ID NO: 6455 - DNA, 1219 bp, Homo sapiens
aacacctctgtgcatataaactagaaaatctagaagaaatggatgaattcctggacacatacaacctcccaagactgagccaggaagaaatagaacccctgaactgaccaaaaacaagctccaaaattgaatagcctaccaaccaaaaaagcccagaaccagaggggttcatagccaaattctaccagatgtgcaaaaatagtgttggagaaaccacggacaatcatctaactgagtttcagacttaatataatcacttttatattttaagtggaatctaccctgggaagtagtcttgcaactcagatacgtgttttttttttttttgcatgaattggttgaattcatggattatctataagtataaggagatttcatttaggctcatctcaaagtttgaaaaatgctgtttatttgaaaaatattaacttccaattttaagcagcaattcattctaataagtaattttaacaatattttatttacagattgcccaaggactccagatactccaaataatgaccctcgttgttctactagcaacaatagattgaaggccttacaaaaacaattggatatagaacttaaagtaaaacaaggtgcagagaatatgatacagatgtattcaaatggatcttcaaaggtaagtgtagttaataaatgtaactatatagtcagtcattatttgcagattccatagttataaatttacctattcaataaaatttattagtaactccaacatcagtactggtggcatggcactttggcagtcatttgtgtacatgcatggagcaggggaaatttgaattatatgacatgcttgtttccagctgagttcgaacaaggtgattttgccttcttaagctatggtacactaaaaagtatcctttttcagatatatttagtgctgttttttttcacatttttgtgcttttaattggtaatttcactgtttaaacactatattgtgacatctgaaatcattttgacctcagaatttgaaagaatggataaaagaatttggaaacatgtttttctttgttgttgttttttttgtttttttaggtaacattttaaaaattgtttattcctaccaagacccagttaataaaaaattttaccttatgggtaaaggatacacaggagctttccatatctgcaacttttccgtaaatctaaaattatttaaaaagaaattatctaaaagaatttagtc

SEQ ID NO: 6456 - DNA, 1176 bp, Homo sapiens
cggtctccccatgttacaatatttggatatctttcagctctaaaatctttttttcagatttgtaatttagatgtgtaatgacaaaaatgaaaggctctgaatttcaatatcatatcaaatatttttatttcagtgtttattgatgtaaggactaagttattgtaatgttataggaattcatttcttttcatgattttaatcactgcaaattggaaagtcagataaatggtgcaattaaaatttttttttcctttctagcaaaacctgtgataagtcctcttgaacttcggatggaagaattaaggcatcattttaggatagagtttgcagtagcagaaggtgcaaagaatgtaatgaaattacttggctcaggaaaagtaacagacagaaaagcactttcagaagtaattttaaataaaaatttttatttggtttaataaatacattattcaaagtatgtgattatttaaatgacaacaattgtcttttccctgtgcaaggctcaagcaagatttaatgaatcaagtcagaagttggaccttttaaagtattcattagagcaaagattaaacgaagtccccaagaatcatcccaaaagcaggattattattgaagaactttcacttgttgctgcatcaccaacactaagtccacgtcaaagtatgatatctacgcaaaatcaatatagtacactatccaaaccagcagcactaacaggtatgtagtgtatagccattgttttttgtgtgtatttttgtctataactggttctgatttaataattgaaagaaaaacctgtgcatagatttttaaaattatgataagatacacatagaataaaatttgttgtattaaccattttaattttattcaatttggaagcatttgctatattcacaatattgtgtgaccatcaccactacctagtttcaaagcattttcatcaccccaaaaggaaacgcatacctgttaagcagtcactccccattcccccttcctcccagctgctagcaactactaattgtctgtctctacagatttgtctattctagatttgtcatatgatagaaattatataatttgtgaccttttttgcctggcttcttttacttagcatattgttgtcaaggttcattcatgttgtagtatgtatgagtacttcactcacttttaatg

SEQ ID NO: 6457 - DNA, 1159 bp, Homo sapiens
tcactgcaacctccgcctcctgggttcaagtgattccactgcctcagcctccctagtagctgggattacaggcatgcaccaccacgcccactagttttgtatttttagtagagatagggtttctccatgttggtcaggctgctcttgaactcctgatctcaggtgagccgcccgcctcggcctaccaaagtgctgggattacaggcatgagccaccgtgctcagcccagtttttcatattttttagataagtttaatataaaagcgatggctccagctactcgggaggctgaggtaggaggattgcttgtggctgggaattcaagacctctctaggcaacatagtgagacccacctctaaaaaaagaaaaaaaaatttttttaaagaatgagtatctgaattttacttttcactccaacatttatattgacttttgaaatgtttttccttaattttatcattatcaaataagttgttttctgggtatttctatggattcacgtgtatttaatattttacaggattcagagactgtttttgatattcagaatgacagaaatagtatacttccaaaatctcaatctgaatacaagcctgatactcctcagtcaggcctagaatatagtggtattcaagaacttgaggacagaaggtaaagaatatataccaaattttgcgactacatgtttggtaccatactttattgtcttattattaattgaaatttctcttttcagatctcagcaaaggtttcagtttaatctacaagatttcaggtgttgtgctgtcttgggaagaggacattttggaaaggtaatctttttggaattttttggaatatctacaacattaataactcaagtggaaaataattattttaattttatttcaggtgcttttagctgaatataaaaacacaaatgagatgtttgctataaaagccttaaagaaaggagatattgtggctcgagatgaagtagacaggttagtttttaaaaatgaaattgtttatttttctgaatttgtaagttaagagaaatgatatatgtattacaacagcaaaactttatgattttacagtaatatgtgaagaaattaaatataatgtatctatatttgacataaggtagacattagtttttcttttttgccccttttt

SEQ ID NO: 6458 - DNA, 2514 bp, Homo sapiens
tacttttggatcaatagtctatttttaaaaagaaagaaaaaaaccacttttttatagtccctagctttgccatatgcccgccttaagtggaaggaaagttaatcacttaactatgttttataaaaagaaaaaagggcttggaatgctattactgttcacacaaagtatgattctgtttgaataaggcaaatgctcctttttttaaaaaaaaagacattactgtaatatcaaaaaccgtggcagtttgtatacaactcggggcttgattttttttaaaaaaacagaatgaattgatgtcttattttataaatgttctatatttattaggagaaaactttatattgccttttttatcaatcatgtaacaggcttatagctttccaacagagctgcttgccaaacaattttttttgtttattaaacagtgctgaaacaaacaggatcagcatttacttaagatgttaagaatgaggacttttaatcagccgaaccaagatattgttacctgtatgcattcccaaagtctagatgctcagtatgttcagtcatatctttcagaatcagtgaaccgattaccctttttttggtattcactctacatctgccaacctagttcaccttggttttgtgtctgctgtagaagggaaccataacttggttaaaccgtagggattatcattgtatacatgctgtgaacatgtatatgtgcaagttttaatgtattctatgttgtaggcttattatttaattttaccacttcatcacttttgtacagtggccaagcagacacctcaaactccagcatttacattaagtgcatttgtacattttaggccactggatccagattttatattggcagttattgagggcaaaagcaatatattgtaacagaatgtataaatatttttgataaaacagtctatattttattaaaaaatgaattataacactaaagctgtacctcaaaagtctcaaaaataatttgatgaaatattttatacaactcttcaaaggatccgtctgtggctttttatactcttttagggttgtctttttacaaaccatgactttccacttgcctgtagttttttgtttgttttggtttggtttgattttatatttttttctcctaatctatgactttattgttttttcttagtttagtaatagcatctttgatcctgtgcttagcatgttagggtcattatacctcaggaatagcaagctgttaagtaaccatactgaattaactatttaattacagtgagctcatctcttaaaaattgttcaggtgtaaatcttatgagaaacatgaaaaagcacactgatttatggagagttgagctaaaaacatttataaatatttgctgggatgttttagcatcttttcattgtactctgagaacaattaaaattgtccagagatcatttatattaccttccaaattgtttattacccaagatcctttgggagaaaatcttatagaatgggggaacaatatgtggtttaaagttattttaaaatgccagttaatttcctcggcaaaggacaatagaggaacttagcttaattgtctggctttaatttaaactgtgttaatacaacattaaaataaaacactaaatacttttgaggtacagtctgctcacttttttggttctcaaatagcaaagaaagtaatgtctaaaataggctcttagcattaaaaactgacagcatttcgtaactacacagtgtacagaatttttttttaattgaagtcaatcactaaaaaaattagaaggcagggtctatttacacaattaagctgaagaaagcactaattttttgtagtttaaaatatatatatattttagtcagatttaaaattttaagctttatagagtgtaaatatattttgctattactgtatgtgtatgtgactgctcaagcactttgtaaagaaattaggatattttagaatggtacactatgcattcaaatgaaatgtgcctttcactatgtcattctaagaaaacaagtgttttttgcagtcataaattatcacaaatgcacaaattaaagtctatatagattgaaatttgtaactttggttttaagtattctttccttttagaaacttcctaatgattaaaatatactttaacttttctgtgttcaaaatctcaaagactaattaactttaataaacattcttgcaagtactttttgtcctagtgaaggcttaaaaccatgaacattcagagcaaactgtccacttcattgggaataatgggaaaagtttgtattctgctcctgtaaggtcagtagcatcttttatttgaagcatatttatggactgcttactgtgtatagatactgagaataggaagtttttttttttaaagcaacaaaatgttgatgaatgaagaacagcctgttttaattaagatgcaagcaccagtattgtatgtacttttctcttgtttgaggttagcttattttaatttaggacctggcttctcaaaaag

SEQ ID NO: 6459 - DNA, 1107 bp, Homo sapiens
tcgcctgagggaagcgagaagaggccgcgaccgggaagaaaacgctgagtcgccactggagagaagtggactccatagcagcagaccccgccagagaggcccgcccacccgttcgcccctccccctgccccgttcacaatgcagcctgcttctgcaaagtggtacgatcaaaggcactatgtcttcattgaattttgtgttgaagacagtaaggatgttaatgtaaattttgaaaaatccaaacttacattcagttgtctcggaggaagtgataattttaagcatttaaatgaaattgatctttttcactgtattgatacaaacgattccaagcataaaagaacggacagatcaattttatgttgtttacgaaaaggagaatctggacagtcatggccaaggttaacaaaagaaagggcaaagcttaattggcttagtgttgacttcaataattggaaagactgggaagatgattcagatgaagacatgtctaattttgatcgtttctctgagatgatgaataacatgggtggtgatgaggatgtagatttaccagaagtagatggagcagatgatgattcacaagacagtgatgatgaaaaaatgccagatctgcagtaaggaatattgtcatcacctgggttttgagaaagaaaaataacttctctgcaagatttcatgattgagagaattcctgagttgatctaaaagcagatgctgtagctgcctactttaacccatttttcaacctgtttgttttttaaagggcttcactaagggttgatatgtaccattgtagggggcaattttaagtcagctaaggcaataaccttatgcatgaacatttcccagactttcatgaagctgttgaggtcctaggcaattaatgcggcagttgtgataaataaaaacatctcacctaagtctccttttcttcataatatagatactgacatgatgataggaagctctcagcttagggaaagagagctaaattttagattatagaacatggattcaaaagtggctgaacaaattggctgacaccttactggtaacctgctattcctctggtgttatccttcaggattgttccactaaaattta

SEQ ID NO: 6460 - DNA, 1204 bp, Homo sapiens
ctctccaagtccaagattttgctttcgtcctcagggtgttcagctgacatagattccggcaaacagtcattgccctacccacagccaggtttggagtcagctggcatagaaagcccaacttccagtgtcctggacaagaaggagggtgaacaggccaaagccatctttgaaaaagtgaaaagattccgcatgcatgtggagcagaaggacatcatttatagagtatatctgaaacagataatagtcaaagtcattttgtttgtgctcatcataacttatgttccatattttttaacccacatcactcttgaaatcgactgttcagttgatgtgcaggcttttacaggatataagcgctaccagtgtgtctattccttggcagaaatctttaaggtcctggcttcattttatgtcattttggttatactttatggtctgacctcttcctacagcctgtggtggatgctgaggagttccctgaagcaatattcctttgaggcgttaagagaaaaaagcaactacagtgacatccctgatgtcaagaatgactttgccttcatccttcatctggctgatcagtatgatcctctttattccaaacgcttctccatattcctatcagaggtcagtgagaacaaactgaaacagatcaacctcaataatgaatggacagttgagaaactgaaaagtaagcttgtgaaaaatgcccaggacaagatagaactgcatctttttatgctcaacggtcttccagacaatgtctttgagttaactgaaatggaagtgctaagcctggagcttatcccagaggtgaagctgccctctgcagtctcacagctggtcaacctcaaggagcttcgtgtgtaccattcatctctggtcgtagaccatcctgcactggcctttctagaggagaatttaaaaatcctccgcctgaaatttactgaaatgggaaaaatcccacgctgggtatttcacctcaagaatctcaaggaactttatctttcgggctgtgttctccctgaacagttgagtactatgcagttggagggctttcaggacttaaaaaatctaaggaccctgtacttgaagagcagcctctcccggatcccacaagttgttacagacctcctgccttcattgcagaaactgtcccttgataatgagggaagcaaactggttgtgttgaacaacttgaaaaaga

SEQ ID NO: 6461 - DNA, 1158 bp, Homo sapiens
caaaaaaaaaaaaaaaatgctccagggctttaaatgagaagtaaaattttctaagttaataaagatgaagaatgggtgactattatgatgaaccataactaaatgtcttattaaagcaactgagtgtctagccctaaattaaccaggtaaaaactgttaacactaacctgaagttttgtgaataactgttctttaacttattgagatgttgcaagaaatgcacatccagggtggactgggagctatgaaatgactaaattcctccttgcagtgtttaccttcaagattgtataggtattctctcctcttcttcccccagtccccattacttatttgcacacttgttttaactgacttcctgttttgatatttatcaccaagaccataaactcatcaatatgaattttcttgatgtatactcacgactgtctttgatttatgttcctaaatttttttagatagggtatgttgtgcttggcagaattcttttttggcttaatttttacttcctttcccagcttgcttgagtcttccttaacctggttttctcttaacaccaatgatgaaccctgagaaaatgcctgcatttggcctttgcctagaacaggagctgagtatttaagatgtattatcctcggggcatcctgaaaattaatgtattccctaaaatttcttcttgtctatcatcaaggcctttttttatttgttaagaatttttatattaaatgtaaaacatataaatattttctattgtataatcttggattcaacatctgtgaggatcatttttgtaagatacatagaatttgtgcatttctttatgaacttactgttagtgttcttggtttcggctgtttatgactcatgtttatgtacattctgctccaaaatgtttttgtactctgcaactaattacttttggataacaaaagccttgtgtttaatgccctaaagtatttgggggtttccttgtgagagggtggccgaatcatctacctctctcttccatagttgctgtgcaatcgtacgggtaaaattcttaattacttacaaaaactgtgatagaggggagaggtacagatttggtttttaaattgattttaaaatactttatagaaatttagtaagagttaaagcaaaagactttttttccctcca

SEQ ID NO: 6462 - DNA, 1152 bp, Homo sapiens
ttatatccatgtttttcgttgttattttcattttttaaagtgtgagttgatgtttattttagtgtttcacaatagaattatcatgtatactgattccagtgtggcatgtgattaagttttggacatgaatatgccaaaagtgcttaaatgtttttggccacataactagctagaatttcaaaacaaaattcagatttgctaccattcacctgacgaacttctccatggctcgtcactggtttggttcaactgcagaagtcattggctaaattttccttatcacctacgtaaatttctagaagaatttactagcaggattaataatgaatattataaactgctttccacacactagggtataattattggtgcaatctatgttgttcttgatgccatggttttacatcttttaatttaaaccttatacaccagtgtttaggtcgcttttgagacaaggtagccctgatgcaaggaaaaatgaggctactacttcacataaaaaatagggtgttaataccacctttactgtactgttggagcagatctttattttacaagtgttcatattcacataagagaattttaaatgaagaaaattaagtttgttaaattataattatgagactttcgttggcatttgatttcaagaatacatatgcattttccaaaaaataaatgtggaggttattcagaacaaaattcatagcttacggtagtaatggcatggattaattttatttgcatgcacacacagacacacatacttcatatatgcaaattatagcattagtttttgatatatctagtggtttttttttcaaaattgcaggaggttgtagattaaattaagtatgatagcacgttttttaattcattaatcatgaagtgctctgttccctaagttatgacatttagaagaaatcacatgctcaaccttaatctgagaacctaagtgtttttgagcattccagtaaaggagtagtgttcttttcctaacttacatcagggtacatctgtgtggcacacagatactatcttttcattcttcactcccagtcttaatttctttcccctgtatgtcactgtattttatgtcacttcacattgtgttaaacagggtaaatagagatcctcagtatctcagtgctgtgg

SEQ ID NO: 6463 - DNA, 1108 bp, Homo sapiens
aaaaattttttttcggttcaagtgttttgtgattaaaattttatgtttaattaaaatattgcataatattgatgggttcaaaaaccattaaaataatcaaacaattattctgtgcccttaacattattttcttgtgttttcaataaaattttcttttcatctttccatcttcacattctcttagcatcatcctatgcacataaggtatgttgttttccttctccactcacctaccgcactaaatttgatcagcaattgtacagtaacagaatatatttgtgccagaagatttgcaatgatatttgagcatgtatttatttaggaggaagccagtgcctgtaattatgtctcattgagtagttttactttgcccatcctgcagtatttagagctgatctgtacccaaagcaggacaatgtaactgtagatctgctttgttttcagtaactgtacattgcatcagaatctgtttatttctatctggaaacagacagaatggtgggggagggaaggagttattttgcatcctagtttgtattatgaagtcatcatatatatatttgaaatagtataagctaattactgttgcagaatgccctcgatataattatttcttttcagctggatgtgaaaagctgaagcagtgaaaacctgcagtcttatttcactggtttccttctgtttcttgtccatcacttctgtatccacagggagctatctactacatacctttggtaacaggctacattctcttcagattttttatatgaataatttcatcagcactaaagcattaacatagaataatgagccaaagtactgagtcgagatggctttcagttgagtttaatttcatatttaacttttgcatttaacttgtataatacactactgctgagaaaaacaattatgaatgccttctgcatgttgtacattatctctaacagagatggtgcaattttaagaatacaaaggggtatagagttagaatggatgtgttcgtgcatatatatgttgtatttaaatattaatgtttacaagaagattttttttaaattcttcaaatacttcacttagtgaaataatgggccaatctggaatagagaca

SEQ ID NO: 6464 - DNA, 1109 bp, Homo sapiens
cacattgaccattttctgagctctagactgatcgtagtaagttttgtgacttaacaatgaaagaaagtagaaagatgctttgggttttcaaaatgttgttttttaaaattgttctttgggtgaatttactcagtgctgctttgagttgtatacagaaacaaatgttgggaattgctcctcagaaatgtgttcctaagttgtgttttcaactttacatcatgaggtgaagcattagggaaagagattctttcgatttgtttaataatctaattatacagaccaaagtgctttacgtttctgctctatgttaatgttttagaatggtgattttgctgattaatttagacctggaattgaaataatgtgctcagaataataacatggttatagttcttgtatgataaagtattcaatttcagaatagtgttggaatcctgagtttgaataatgtgttgtatttagaaacatagccctatctgttttaaacaaataatttgttggccgattgtccatggttgagcatgacaaaaatacctcgtcgaaaggcaagcttaggtaactgctggcaaaacactgggtgcactatttttctggataaaatttatagttattttctatattacccttcaaaagggatctcttcaggttaaaaatcacgcttatgctgaagtctttatctggtgttaactaaaaatctcatatgggttcataaccgaggtcactaataattcatttttatcacttgtaaaaatttgctcaaaattccaaaaaaatattgatttgttttttagtgattttgcaggctgacccccaacctaagttttgataacatctggtaagtcagtatagttctgtgacttcatgttttaactaagaaggaaaattcatagatattcctattagattttataaaccttcaaaagtctgaaacttaattttgagtctaaattttctgacactggccccttttaatattgtaagtttttgttcactttcttaagtaaaaaaaacatttaattactagttagcccttaactgggaaactcaggtaatgaactgctgacttttctaaagttctttaactgatcaattctgtatagagggatatt

SEQ ID NO: 6465 - DNA, 3103 bp, Homo sapiens
agcatgcgaagactcagaggaaaacaagcagagaataacaggtgcccagactctaccaaagcatgtttctaccagcagtgatgaagggagccccagtgccagtacaccaatgatcaataaaactggctttaaattttcagctgagaagcctgtgattgaagttcccagcatgacaatcctggataaaaaggatggagagcaggccaaagccctgtttgagaaagtgaggaagttccgtgcccatgtggaagatagtgacttgatctataaactctatgtggtccaaacagttatcaaaacagccaagttcatttttattctctgctatacagcgaactttgtcaacgcaatcagctttgaacacgtctgcaagcccaaagttgagcatctgattggttatgaggtatttgagtgcacccacaatatggcttacatgttgaaaaagcttctcatcagttacatatccattatttgtgtttatggctttatctgcctctacactctcttctggttattcaggatacctttgaaggaatattctttcgaaaaagtcagagaagagagcagttttagtgacattccagatgtcaaaaacgattttgcgttccttcttcacatggtagaccagtatgaccagctatattccaagcgttttggtgtgttcttgtcagaagttagtgaaaataaacttagggaaattagtttgaaccatgagtggacatttgaaaaactcaggcagcacatttcacgcaacgcccaggacaagcaggagttgcatctgttcatgctgtcgggggtgcccgatgctgtctttgacctcacagacctggatgtgctaaagcttgaactaattccagaagctaaaattcctgctaagatttctcaaatgactaacctccaagagctccacctctgccactgccctgcaaaagttgaacagactgcttttagctttcttcgcgatcacttgagatgccttcacgtgaagttcactgatgtggctgaaattcctgcctgggtgtatttgctcaaaaaccttcgagagttgtacttaataggcaatttgaactctgaaaacaataagatgataggacttgaatctctccgagagttgcggcaccttaagattctccacgtgaagagcaatttgaccaaagttccctccaacattacagatgtggctccacatcttacaaagttagtcattcataatgacggcactaaactcttggtactgaacagccttaagaaaatgatgaatgtcgctgagctggaactccagaactgtgagctagagagaatcccacatgctattttcagcctctctaatttacaggaactggatttaaagtccaataacattcgcacaattgaggaaatcatcagtttccagcatttaaaacgactgacttgtttaaaattatggcataacaaaattgttactattcctccctctattacccatgtcaaaaacttggagtcactttatttctctaacaacaagctcgaatccttaccagtggcagtatttagtttacagaaactcagatgcttagatgtgagctacaacaacatttcaatgattccaatagaaataggattgcttcagaacctgcagcatttgcatatcactgggaacaaagtggacattctgccaaaacaattgtttaaatgcataaagttgaggactttgaatctgggacagaactgcatcacctcactcccagagaaagttggtcagctctcccagctcactcagctggagctgaaggggaactgcttggaccgcctgccagcccagctgggccagtgtcggatgctcaagaaaagcgggcttgttgtggaagatcacctttttgataccctgccactcgaagtcaaagaggcattgaatcaagacataaatattccctttgcaaatgggatttaaactaagataatatatgcacagtgatgtgcaggaacaacttcctagattgcaagtgctcacgtacaagttattacaagataatgcattttaggagtagatacatcttttaaaataaaacagagaggatgcatagaaggctgatagaagacataactgaatgttcaatgtttgtagggttttaagtcattcatttccaaatcatttttttttttcttttggggaaagggaaggaaaaattataatcactaatcttggttctttttaaattgtttgtaacttggatgctgccgctactgaatgtttacaaattgcttgcctgctaaagtaaatgattaaattgacattttcttactatatcaccttttttgaggggtcttaatttactttgcttaattggtgcaatattgctttaactccgttcactaaagacaaacacatcaagtccaaacttgtaaatttagatttgctgaaatactgatttatttcctgttttaatttaaagtgcctcaagtaagcacctctcacaacagttgactggtactgctgctcctgagcacctcgtgtcatagattttatactcttacagacttggaatgcagtagaggtatgtggatttttaggggttttgtttttttaagaataagtaacaagaaataacacatttcttaataatagcttttttgacatagtttggagttctgattatatggtacatttttctaccagtaatatagggttgccaataaatagaaaatgttttctaaaaataaattttattacaacaaaataaaaattttaatgacttattaacacaacctccagtatcaccaccatttggaagataacacagaatcacaagtatcatttaatttcttgcccttttcagtgttgttctggtgttggtgggaaaataataggaaatgtagttcattgggtagggaaactcttacctttccctatcttaatgacaagctgtattttctgtgtttttgtgcagctaggcgtcatagccagacaaatcctaggagaatacactttttagataatgatttccttcattatctaactgaccagtatctaatcaatctcagaaaaatccaaaaaattccctgccacctgtttagatattagttggcagatgtttcataggccttctacaggactcttcaagag

SEQ ID NO: 6466 - DNA, 1201 bp, Homo sapiens
ctgttcactcaaatagggcagagtactattctatctagatgtgtaagtgttttttttaaaatcacatggaacggttttttttatactaaaaagtggagggagatttgtttaaacaagtatttctaaaagaaatatgtacatagttctggaaattatttgtggtaaggaaatattctttactccagttgcatttctcagacaataaagtggtgcatccatgctacctcctactttgtcaacaaagatgctatttaccctttacatttttgtatcataatagattttaaaaatctaatgttctttattgcaagacattcttttgttaacaggtttgtttctttttaatgttttacctaaaatttgacatgcttacaggacaggtttgcctcttactttatttaacattgtagaaatgtaattaataaacaatgctcactacacagtttagaatagacgttctcatttatattatcttccaaatttgatcagttagcaaaacttaatacaccaattaaaatatttctacatatgagaatgtttacaatttaaattttagaacttgttttggatgtgattatatgtacgaaaatcgtgtaacactatgctcatgctaagaaccgacataacagaattactgaaataaatgtgctgtgaggaatggaaaatatggtgcaggtgtcttggtcatgataaattgtgattctttttaaaaattttttccaaaaacaattaggtattttaatctgaaatcagattcctttacaaacaacaagtttttgtatgcaagcaccattttatttcatgtagtatggctaatactatagttgaaccaaggatatgcattgattctttgcttcgtatgtaaataaagttaaaaacagttaaaataaggagtattttggtagagtatatacatacctcactgccagtgaaattgctttcctatggtatatctccttaccagaaaaatctctaaataaaaaaaggtttaaagaaaattaaaatgtgaaacatttcttatttttatcattggtggtaatagttcacttcaggttgtgtttcattggatttaaattgtttatccttgccaggttacttggatcacagagcatagtttttctagaatcacctcattggtcaatataatgtatgtgagaaaaatcattttccccctttcatgattaatcaaacctctaaattc

SEQ ID NO: 6467 - DNA, 1318 bp, Homo sapiens
agcgaaaaatggatgtaagcaagataactcgttataccgaggattgctttagtgattctaattgtgtacccaataaatcaaaaatgcaagaagtagactttctagaacaaaatgaagagctacaagcagtagactcacagaaatatgcattatcaaaagtgaagcctgaatcaactgatgaagacttagaatctgtggatgccttccaacatctaatttataacccagataagtgtggagaagagagttcacctgttcatactagcacttttctttcaaataccttaaaaaagaaatgtgaagagagtgattctgagtcacctgctactttcagtaccgaagagccatcattctacccctgtacaaagtgcaatgtgaattttagggagaagaagcacctccacaggcatatgatgtatcatttagatgggaatagtcactttcgccatcttaatgtcccaaggccatatgcttgtagagaatgtggacggacatttcgagatcgcaattcacttctaaaacatatgattattcaccaggagagaagacagaagttgatggaggaaattcgtgaattgaaagaacttcaggatgaaggaagaagtgcacgattacagtgtcctcagtgtgtgtttggtaccaattgccctaaaacatttgtgcaacatgctaaaacccatgaaaaagataaaaggtactactgctgtgaagagtgtaacttcatggcagtgacagaaaatgaattggaatgccatcgaggcattgcacatggggcagtggtaaaatgccctatggtcacttctgatattgcccagagaaaaacacaaaaaaagactttcatgaaagactctgtagtaggatcatccaaaaaatcagctacctacatatgtaagatgtgtccttttactacttcagccaaaagtgttttaaaaaagcacacggagtacttgcattcatcatcatgtgttgattcatttggtagtcctcttggacttgataaaagaaaaaatgacatccttgaagaacctgtagatagtgatagcactaaaacattaactaaacaacagtcaaccacatttccaaagaactctgctttaaaacaagatgtgaagcgaacatttggatcaacctcacaatcaagtagtttttcaaaaattcataagcggccacacagaatacagaaagctcggaaaagcattgcccaatcaggtgtaaacatgtgcaatcaaaacagctctcctcataagaatgttacaattaaaagcagcgttgaccaaaaacctaagtatttccatcaagcagcaaaagaaaagtctaa

SEQ ID NO: 6468 - DNA, 1231 bp, Homo sapiens
ggaaaggtgttcacaaaacaaatcccacataatcacaggaaacaagattccactgagtggcccagtacctaaggagctggatcagcagtccaccacaaaagcttctgttaaaagaccctacacaaatgcacaaattcagattaaacaaggaaaagacggaaaggttctatctcttttatttcttaagtaccgacactgttttagaaatatactccttcaaccaacagagggagatagaatactaggatagtacttataatttaaaaaacttttttttgcatttgttatatgtattcatttgattaaattttcactaagatttgtactgaatcattttggttactattttaaaactaaaatttactttgtcagtttataacatctgtcattaactattatgaaatcatattttatgacaaaaatggaaaatattaaattttccctgcatgttaaaaagttcagattaattatcctttttaaaagaaagcattagttataggggaggaattctgaagtgtctatctccattttagctgcacagcaaaatgtaacatccatgcaggtggtttttgaatttttttttagttatatatatttgtggactatgataacattgtatgggtgttgagttctgtctagactattttctcctttcacagaagtggtttggtgcctgagaatgacttggatgcagctgtttttgtttcatctcacttaactctttcaaaactatggcagagtacagctggcagaaagtgttacagatataatccttattttccttgtttttgttggtattgtaggagggatctgtaggcctttctgtccagcgctctgtttttggagaaagaaatttcaatatacacagctccatttcacatgagagccctgcagtgaaagtaagtaatgtagcttaatagcataatggtcagtcagtcatacactgaagagaatttaggtaataactagattaacatttattatcagaaatttttttaaactagagtttggctttggcagaaggtattactgctttaagcatttagtcaaaacttgttttctccagtttttttctgaacttttctggtggaattttttctcatttttggttagctattactgtctttctctagaggaacatttagaacattaagggctttctgtcattgctagagtgtgagctccatacagttagctaactattctgacacatagttgatagtgtaaagat

SEQ ID NO: 6469 - DNA, 1289 bp, Homo sapiens
gagatgctacattgccaatgattttataaataatttaaaattaatttacaaatttatagatgcaaaccaaaagatctttttaaaagagagagagaggaaaaaaatcaccttttatttgtttgggtctcattgtcagaattattattcagatcaagaaatctgtgtcgataaaacctaatctcatattggagagtgaatgtcgttaagtatttctgaaatgtttctaaaaaatgaacatgaaaaaaataaggtattttctccctagcttctcattacagtatttctaattgcttcacactttacagttttaatacaaagtacaagctctacttttataacgtgtactacaagtttctttaaaagtattgttgtatttcagctgaactcttgtatctgcagtcttttgttatttctgcaggctacacccttaatttgcagaggccattttgttgtttgtttgatgctgaagctgttgttaaaatgccccaaactccaaggcagattgtctgtataatacgctatagcttttcaccatgtggtgtttaccagctgttactctgtattttaaaaagccagagatttcttctgtctaaactgtttctatagcattttctaaacaaaaaaaatggtttttttctttgccttgtaataagattgtaaatccatttcctgcttgtgttcttagtgggcatgattgtgagtgtgtgtggggtgctcacacgcgtgccagtctttttgtactgtaactacctcatggtttgaatgatgattgtactgctggttgtgttaacagagcacattttgttgggtgagtcctatgtgatttttttcatgtttgttttatctgggggttgttcatgaaactgacagatgtttttctaaaaaggactattatcagtttccaaatacaatacttctctcttctggtttttcctgaatgagcctgattttgttgctggttttcatcatctatgagggtaaaacgagtacccttaaaatccctgtggccagtttgaacacccctgttgtattcttttctctgttcagtgtgtcagctattttgtgaagatgcttagatgtatagttttgataaccacagttttaaatcttttatctgtgcataataaaaagatatatatcagttattaatatgtgtcttgttatcattaaattctaccctaaggctcatgtaacttttttcactgtgactttctcctgaatggatcgtctgctccgtgttgatgaggaagtgggaggagaaaggctaagaggtccagagcagagggaag

SEQ ID NO: 6470 - DNA, 1137 bp, Homo sapiens
cccctcttccctttagggccattttgagtgccagatctagttattttgctgcaatgctgagtggctgttgggctgaaagctcccaagagtacgttactcttcaagggtaagcatatttttacagggccatttgactgcaaatgattgtaaattgtatttcatacaaagcactttttatgaatctgatttccctggatgttcaaggaaatatttctcatgtagaattcaacaaagtacattttctgaaacgggaagtaatagagagcatttattaatagaggtattgtgttaatctgcttatgcttctgtaacagaatatccaaactgggtgatttaaacaacaggtatttattttctcacggttctggaaactggaagttcaagataaacatgccagcagttttggtgtctgatgagggctctgcccctgggttgcattctgccgccttcttgctgtacactcatgtggcctttccttggtgcgtgcacttggagagagagttttatggtatttcttcttataaggaaacgaatcctatcagatcaaggacccatgtgacctcatttaaccttaattactttctcagaggccccatctctaaatatgaccacactgggggttagggctttaccatatgaatttggagggaacacagacatttcagttcataacaggtagtttttaaatttttcttttatttttatttttttgagatgggatcttgctgtgttgcccaggctggagtgcagtgacacaatcatggctcaggagtttgaggctgcagtgggccatgattataccactacattccagcctgggtaacagagccaaaccctgtctcaaaaaaaatatatatatatatatatttacacacacacacacacacacacacacacatatacgcacacacacatatatatacacacagtatatattttatataacttaaagtatctccagttatctcaaaaggatcttaattgtttaaactgttaatatgcaaagcaaatatttacattcaatttcttttttttgtttgttttttgagatggagtctcattcggtcacccaggctggagtcaagtggtgggatctcagctcactgcaacctccagctgcctcccaggttcaagtga

SEQ ID NO: 6471 - DNA, 1096 bp, Homo sapiens
ctccattctaccaggaaacagaccaaattcaacaaatattagaccacagctgcaccaaaaaagcataatgaaaaagaaagctggtcacaaagctaactccaaacacaaagacaaagaacagacagtagtagatgtcactgagcagttaggcgattgcaaattagatagtcaggagaaagatgctacatgtgaacttcctttacagaaagtaaatactcagagttcttcaaatagcactttgcctgaaagattaaaagcgtcagaaaattctgaaagtgaatacagtaggtcagaaataactctagtaggcataagtaagaaaagtgcagagcattttaagagaaaatttgccaaatcaaaccaagtgtctaggtcagtgtctagttcagtgcaggtgtgtcctgaagttggaaagagaaacttacttaaagttttgaaggagactttgattgagtggaagacagaagaaacattgaggtttttgtatggccagaattatgcttctgtgtgtctgaaacccgaagcctctctggttaaagaagaacttgatgaagatgacataatctcagatccagatagtcatttccctgcctggagggaatctcagaacagcttggatgagtctttaccttttaggggctcaggtacagccattaaaccactgccaagttacgagaatttgaaaaaagaaactgaaaagttaaatctgaggatcagggagttttacagaggacggtatgttttgggtgaagaaaccaccaaatcacaagactcagaagaggtatgtcttacagacattgagtttttccagatcgttaacatttggaaaactcaccacagcaaatcttggagcaggaaggatattgaagagttaattgttaaattttcaaatagtttctttagtcattctgccttttggtttacagtgccatctccactgttggcattactattttacaaataagttgacgtttacccctagcaaattttcatcagtgtgcaatatttttttctaatgtaaaaatagcctaaaatggtgggacaaagttttccctaattcttcatacaataaatgaagcctctgaagaggcttgct

SEQ ID NO: 6472 - DNA, 1209 bp, Homo sapiens
ttttcttcttcaatttagctcagtggtaggtcaaattgtttgcttttgctattaagcttatgatttggaaacgtaaaatttcatggtggatattataatcagaactattcaaaagggaaaacatgccagccattttatatgatgaagtctcttattccatagaaaactgtagaaagatatctgtatctttggagaaggagaaagaaaggaaagaactccagaatcccatcactgttctttaaagcatgcatcacagacctttaagagtatgctttattgagtaaaggttatagtttgactttaagataagaaattttctagaatcatgtttgaattctaaacgttgatattcttaagtaccatttctgattaggaattaggtgttaaaagaatcatggtaaggaaaccttaatccgttgaaactcttgtaatttggacaacaaaaaactagaaataacactcttttctttgaagatctgattcaaatacaccttagaagagtttaaaatctcccaggcctttaggatgcaataggatattatgccttggtttgactccttttcattcaaattaatgtaagtatgttgttcaagactttgaagcattgaacaatgttctcgatgaattttatttaattactgacattttgtgatatttgaatgttattaagttaaacacttagagttgagtatattcaggggagaaaagtgaatgaaatgactcataataagaaagcttgctcccttgggacagttaccttcctggtgtcattgccatcctgggttgacaagctgagagtagaggatacaagtgatgtgaataaaatggaaattgcattgagttaatgaaacagacacttttagatcaagaaaacacttcaacagcctttttagaaattggcacactcctatagtcccacctactcaagaggctgaggcaggaggatcactagagtacaggagtttggggctgtagtgtgtaatgatcacacctgtgaaagaataaccactgcactccaacctgggcaacatggcaagaccctgtctctttaaaaaaaaaaaaaatcctgggaaaagaagtcaaagatgtaattttacacaatttctgcccccaccgtcttttttgtttgtttgtttgtttgtttgttttttggctagatactaggtattcagtgtttgctgagatgacaggtttctactaatcagccag

SEQ ID NO: 6473 - DNA, 2051 bp, Homo sapiens
cttccatgtgttggttactagagtagtaggttaactacagacatactgttttgtttgtacatatttataaatctgtaccacctaacattgaacatcattttatatgaagaacatacatgttgcaaaatgactgctttcagcatctaacaggacttctgtaaataataggttaaaagttaaaaataaaacactaatgttttaagagctttagtattttgcttagcattcaatactagcagattcataactgatgcctgttcaaaaacactgttggtggaatcttttatttcatgtgtatgtaactactaaatttttcatgactgaagaggttatagcacatattagttagtgctaatattctactgaatataatttaagcaatgggctaaggtccaagaaacatagcaattatatctacaaataatctattaacatgatcttcagaatctctagtttttgttctatagataaagccataagaatcctttcctaccagtttttcctatatcatttagatattatttcctagaaaacaggatgcctgtcactgataagttagagaaaacacccaaattatacttgcactatggaaagacgacatgaatatgttgactgggtactttctactctcatttttgttagcctatgaaaaaaaaaacattttgttaacctatggaaaaagccttggaagagaaaagtagaattcagtatgtatggaggcacagttttgcacagtatgttgcatgcggcaaaaaaaaaaatatgaaatagagtagaagagataaaagtagttttctgtcaaaaactaggagttaagccttcaggtacgttgtggactaggctttccagcaaggtttttgtagctatttgcttgcctgagaaatgaaattgaaaacatacccctgcgtgtctgtccttaacaccaggctaaattctggtggttaaataacttatctgtggttacaagctagtaagtagcagagccaagattttttttaatatagagacaggtgtctcactgtgttgtccaggctggtcttgaactcctggcctcaagtggtcctcctgcctcagcctcccaaagtgtggggattacaggtgcgagctactgctcccagcaagagccaagattttaacctagatctccctaacaccaaagcttttgaaagggttcagctgaagaatttctcaattctctgttttgttttgtttttatttttgttttttgagatgaagtctcactgcactcaggctggagtgcagtggtacgatcttggctcactgcaacctccacctcccgggttcaagcgattctcctgcctcagctcccaagtagctgggactacaggtgcacgccaccacaactggctaatttttgtatttttagtagagatggggtttcgctatgttggccaggctgatctcaaacttctgacctcaggtgatccacccactttgacctcccaaagtgctgggattactagacgtaagccaccacacctggcaattccctgcttttttgacaacataatttaaatgaatttgatttaaatgtttcctgaatatatatacagatagatagatgagtatcaacacttacaagctctacacagtctgtgagtgtagatactacttactcgtaggattgtcttgtgctttggggatttttgttcggagttctatactatcagcccagaaagctatcaatgtccaagtgaagtgagatgatgcatggccacattattgctttgaccctcacatcaagaaatctgaatgatctggaccaggggtcagcaaagtgcagcctacaagctattgcagtcagctgccagtttttacttttttaaatagttgggaaaaaaattccaaagactgatattttgtgtcacatgaaaattatatgaaattcaaattgcagtgtccataagtaaagttttattggggcacacccatgctcacccttttaaatattgtgtatggccgctttgtgctacagtagcagagttgagtcattgcaagggagaccatatggcccaggtagcctaaaatat

SEQ ID NO: 6474 - DNA, 1173 bp, Homo sapiens
caataatgtgaatgatgcttcctaaagttgtttaatatggtgaccctaggcagtgaattctaaaattgcctgtctttcttctcaggtctctcttttctccaataaattctttttttttttttttttttttttttttttttgaagtagagactagagacagggtttcaacatgttggccaggctgatctcaaactcctgacctcaggtgatctgcccgccttggcctcccaaagtgctgggattacaggtgtgagagccactgcgcctggccaataaattctatcttaaatatacttaagatctgcaaaggtctttttatgaaacccttttattcagatgataatagtgcctgattaataggattttctagggattaaataaaataatgtgtggaaagtgttttatatatcacaggcctgaaataagcgctcagtaatattagctcttattttgatactgagagtatttgttgcaatataattttttatgctttagcgccacttagctcgtactactgggagatggaaagacccacccaagaaaaatgctatgaatgagttacaagatgaactgatgaccattcgacttagagaagctgaaacacaagcagaaataagagaaataaaacaaaggatgatggaaatggaaacacaggtatgatgggaaagcccagtatctttaaaaagtatcattagctgatcaagggtttgtgcacagattgtatcatccctagaacagagataaaaggtaaagatatgaagctgtatagaccgcagttttctagcccaaatgaagatggcaaaaaattattatattggatttcagagatttaatccttctttgacccattcaacaaagttcaaggaagtcaaattttatttgacttttttgggtaaaactcatagcattgccctgttgcatgacttgagaaggaacaccatgcagagcaaaatttctcaacctcaacacttttaacatttttggctagaagatactttgttttacggagctggtccatgcgttgtagatgtttagcagcatccctggcctctacccactagatgccagtaacggctctcctacctcaggttgcgatgaccaaaaatgtttctgcacacattgccaaatgtcccctgggggacaaaattgccccaattgggaaccacagatgta

SEQ ID NO: 6475 - DNA, 1172 bp, Homo sapiens
agcaaaatgaaaaaagagaagtgatttggttaattttgggggctctgccttacttttaagccttagacacattgtaaacgttttaggattggttatttcatagatttgttgtacctcttccaagtataagttcttttttcctgaagcctacccaaatacttttctcatcagatttcccctaatttgaatttttaatggagacgaagggaaattataatggggctagtagctcaaaaatttttaacgtaatttgctttttcaaattttcaaactgctataataggtgaaaaaaatatagcagtaattttattgatgtgaccaaaatttatttaaattatgtatattattaaaactatattttaaaacaatggttaaattgcagtaataaagctctaagtatcatcaatgcctcttctaatatcactgtccgattagatcttgaacagtttttaattatattttagattgttagaaacggatagtaagtctttaagatctgtaaatgggtcaagaagaaacagtggctcttctcttgtgtcgagttcatcagcctctagcaacctcagtcaccttgaagaagattcttggattctttggggaagaattgttaatgaatgggaagatgtacgcaaaaagaaggaaaagcaagttaaggtattcatgttctttgttgaagttcttattcttattccatagtgcgtcagacataacttaatagaggattgggaaaaaaaccccaaatacaacttccaagctatatattaaagaggtctgctttatttgttttcacttacttgtacccctaaaagttttaatttgtagacatcagttgttacagaggtcctgatcatatagaaatatataactgaaaattattttatttacttattattattttataaagactcactttgttgctcaggctggagtgcagtgatgcagtcatagctcactataacctcgaatttctgggcttaagctgttctcctgcctcaggctcctgagtagctatgattacaggtgtgtgtcaccacacctcgctaattttttattttcctttttgtagagatagggtcttgctttgttgcccaggctggtctcaaactcctggcctcaagcagtcttcctacctccgcctctccaagtgttgtgagctactacacccggcccga

SEQ ID NO: 6476 - DNA, 1162 bp, Homo sapiens
ttggcctcacttagagtaggcaatgaatggatattgagaattgttatcattttgttttaaactgctttgtttggagagtatttatgatttgaggtactttttatatttttgtcttaaggtttttaacaaatttaaaactttgattaacatataaaatatcccactggtataaaataagctctacaagtaagtcttatgtatggtcttttattctctaaacagagactctacaggggcaggtaattcactggtccacaagcggtctcctttacgtcgaaaccaaaagaccccaacatccttgaccaagctgtctttacaggatggacataaagccaaaaagccagcatgtaaatttgaagagggtcaggatgtcctagctagatggtcagatggcttgttttatcttggcactatcaaaaaggcaagttactttaatgtatcttttgctgtttttgcagtaagcatttaataatcttaaatttaacttcatgtttttaattttaagagatcaccgttaagtatttctctgtattgcagataaacatattgaaacagagctgcttcatcatatttgaagacagttctaaatcctgggttctctggaaggacattcaaacaggcaggtgctactatttctcttgaacatgatttaaattaaaatttgattttcttcaacttgtcatattatgatgttgtctgttgaatacagtgtatttagataactcagtattacttcctaggagaggttaaaaaatcagcatagtcgttattatagaccataagaagaacaagaatactctagaggacagatgcatcactaatttatacctgtaagctatgttaagacccttctaagaactttgaagaaaaatctttagtaactaatctcagtaacggtttgggattcaattcaactgttgcttgcttatatttgtagaaagcaagtgtttattgggagcatactgtttgtcagatgatttgggaaattaggacatataaaactgatttagaataatagaaatattcgttaataagaatggtttaaaattaccatttagttatgggttttttatgtttaaatgggaaaatgaggctatatttgtgtgccaataaaaatgaatgaaagtatgccttggtttggttataggtatgcttcttgtga

SEQ ID NO: 6477 - DNA, 1104 bp, Homo sapiens
ttatgaaagtaggcatgttaagttaaaggtagaaagaacacagagagcagagagataccattcgtgtactttgtcttgtgaagcattatgatgtacttagcaaacattgcgcatatgtgctgctcactgagtcataaaagtggttttgttttatggaattttttatgactctcttttttaatgtgttttaaatattttaggagccactggaagtggggaaatggtctgtacaatatgtcaagaagagtattcagaagctcccaatgaaatggttatatgtgacaagtgtggccaaggtaaccattgatttcttttaatcttgttacatactgaatgactatgttgaagattaatgactaaaaatactttacattgataatttgaaattatcctttttattaattatattaatgtaggaaataatgctaaaatgcattcttgaaattgtgttgaaagtattaatgaaaccgaatttgctttatgctttttttgatattaaggatatcatcagttgtgtcacacacctcatattgattgcagtgtgattgattcagatgaaaaatggctctgtcggcagtgtgtttttgcaacaacaacaaaggtatattttaagtgttttgggctaaagctctgatggaatttgtaagacattatcaacataatgattgtgtacactgaaagtttgttggaatgaaatgagcaatgaatgctgggtagaaagaggtgctatttatttgactaatgatgcttaagtgactttttaatgatgctttcacttatttgatgatagtaatacgggaattggtgcagtaatttgaaagaagaaaagaaaaatagagattattattaatcagacagtttgtgatatggtaaaagtttggaaaggaaatttctccagaagtgtcagagtcgtttttaaagtatagaattgtgtttaaaattttagccttcactctttcacatttttttccctctaatgtagaggggtggtgcacttaagaaaggaccaaatgccaaagcattgcaagtcatgaagcagacattaccctatagtgtggcagaccttgaatgggatgcaggtcataaaaccaatgtccagcagtg

SEQ ID NO: 6478 - DNA, 3081 bp, Homo sapiens
ctccaagaacgtgacaaaatctaaagtaatgagcccaagtgatagtccatttatatagcatttattgtttgggtttggctcatttttatatcatcaaggatatatggtatagtagagtaatccagaaaagagaacatattgtatgggcataggatgctaaaaaagctcagtagacaattctggccttctctgttacatagattatctgactccagaaaaagaacgcgtacaggaagatcttggcctgctgcaataccacatttgcggagaagaagaggtcgtcttccaagaagagcactccagactcagaactcagaaattgtaaaagatgatgaaggcaaagaagattatcagtttgatgaactcaacacagagattctgaataacttagcagatcaggagttacaactcaatcatctaaagaactccattaccagttattttggtgctgcaggtagaatagcatgtggcgaaaaataccgagttttggcacgtcgggtgacacttgatggaaaggtgcagtatcttgtggaatgggaaggagcaactgcatcctgactgtaggactgaacattatgttcactgcactctgattttctgtaggtacagttcaaagccctaaaggagtctggcttttactatctttcttaaaaaaaaaaaaaagtcaaaaaaattcaaaaaaggggatgatactagccttaacatgtacctgtcaatgttatggatattgtcataaaaaggtatcttttaaaaatcagaacagagacttaattttttaaatcttaagatttgtagaatgtttctaggataggatattaaaaatgattgaaacccatgcatggtgttagacaatttttctaattattccattgagtcagttttttgtgattagtgattatcagagcaaacatcatgtagatagcacaagtatttggagaaacgttgtttgttttgttaccaaaatgttggaaaaatttatttcaataccttttagatttcataaagtgcagtgtatataatgcctactgaaagactgtaaaatattgaaattttctttcaagcaaagtgtaaaaaaatatattgagcctgtaaattgctctgtgactagacttcattgtcgtcttaatatattcttgcatgtgcatatatatacacacgtgtatatatatgtgtgtgattatgtgacctatgcaatacaaattatgggaatgggcagctttggagtatatatcccataattcttttttcaggaatagttgcagtatttacacagcagcatttcttctcaggcttttattgggtgctgttgcttgctatgtatgaagagaaatgtgtcagacaagtttagtgtgttctgaagaagggtgtgaacaacagtgttcatgggcttttagaatgcttttcacttttagtccttgtaactcagctgttcagtacctaaaacaaattcaaataatatgaacattatctcctactagaagtaacgttttcaagttttcatggcacattatgattgtaaatgtctctcatttttaacagtaagtctataggagtcccgtgaagattcctgaaatgtctgtagtaactgttagtcatgtttgaataagtgtagtatgaacaaagtattttattgcacagggttaacaaacagtatgttgccagctgaggctactgctgttttattacaacattacctcttgtttttataaagtgtaccaagatttaaattgataactttattttacttgtaaaaaaaaagtttcttttatcaccagtgttacagttgtcttctgtttctttttgttttgttttatttgttttcctttttagccaaagagtgaacagaagattttcttattttggtggctattcattttacttttaaaagtgattggtggattttagactaattatgggggaatttgccaccaaaataaaaaatatgtaaagtgtagtgattacagagtggttaaaatgtgggttagtacttatttattccattaattgattatttgactgtttataaagaaagttgctttatttctttaaacatcttcaaaagatgatcctttcttgtcacattatagccaaaagaagcagagaacttcattgtctgcatttggttcctggttggccaggtataaatgagctttacaaaagtgcaaattaaaaactgttacttctgtttacctccaccaaaacttgattttcccctagctattaatttaaggttgcctttcctgcagctgcaatattttgaataacacacagagtttgtgttgatttttgaatgtttgtttatatctaggggtaatgaaaaatgtaaatcccgtgtatccttattcactccacctgtatcatattatttcattttccccaaagtcctttaattctaactgaacaccagcagtatttttagaaatttttctttaacatacttggaagatgatttatccagctgaactgtctttagacgtaattattgtgaatgtctgttttattttctcatggtggttcacatggctctgatgttcagtttgtatttttggaattgctttacttagaaattaaaacagaccaacattaaatgtgtgtattttttaaagagctaatgagttttgcttctgtatttgcttgaaaatacacactagtgcagtagttgactgcttttatttagctagggtggtaaggattttctaattccactgctagtatgttcacttgaattaatctttataaaactttgctttcattttcttcatccctcttataatattaataactatcacatgttcatcttaagtggtcttaaagtacgtttagtgagcatgtacactttatatttgaaagacaatatatctctattgtgtccccaaactttaaaaaattcagacttaattttccaactatgtttgcttcttacatagaattgttagggttcatataaaaggatttcctgggccaggtgcggtggctcacacctgtaatcccagcacttagggaggccgaggcgggtggaacatgagatcaggagattgagaccatcctggctaacacagtgaaaccccgtctctactaaaa

SEQ ID NO: 6479 - DNA, 1162 bp, Homo sapiens
aaaatattttgagatataaaagtaggaaacaggtataattttaatgtgaaaattaagtcttcactttctgtgcaagtaatcctgctgatccagttgtacttaagtgtgtaacaggaatattttgcagaatataggtttaactgaatgaagccatattaataactgcattttcctaactttgaaaaattttgcaaatgtcttaggtgatttaaataaatgagtattgggcctaattgcaacaccagtctgtttttaacaggttctattacccagaacttttttgtaaatgcggcagttacaaattaactgtggaagttttcagttttaagttataaatcacctgagaattacctaatgatggattgaataaatctttagactacaaaagcccaacttttctctatttacatatgcatctctcctataatgtaaatagaataatagctttgaaatacaattaggtttttgagatttttataaccaaatacatttcagtgtaacatattagcagaaagcattagtctttgtactttgcttacattcccaaaagctgacattttcacgattcttaaaaacacaaagttacacttactaaaattaggacatgttttctctttgaaatgaagaatatagtttaaaagcttcctcctccatagggacacattttctctaacccttaactaaagtgtaggattttaaaattaaatgtgaggtaaaataagtttatttttaatagtatctgtcaagttaatatctgtcaacagttaataatcatgttatgttaattttaacatgattgctgacttggataattcattattaccagcagttatgaaggaaatattgctaaaatgatctgggcctaccataaataaatatctccttttctgagctctaagaattatcagaaacaggaaagaatttagaaaaacttgagaaaacctaatccaaaataaaattcacttaagtagaactataaataaatatctagaatctgactggctcatcatgacatcctactcataacataaatcaaaggagatgattaatttccagttagctggaagaaactttggctgtaggtttttattttctacaagaattctggtttgaattatttttgtaagcaggtacattttataaaatgtaagccctactgtaa

SEQ ID NO: 6480 - DNA, 1691 bp, Homo sapiens
gaaataaaacagggccatttataagagatccaagtttgagaaatttcttagacctgtgtagttagaaaaaagcaatctctaattatatttacctatagagtttatgttctccagatgtgtgacaattacatagtacttggacagtatccaagtatgataataaactgtctgaaattggcctaatctacatttaaccaaagtgtatatattgtgggtttgtaaaaaattgttatttttttttatgttttgggtgtttaggctagacagcaacaagcagaattggcccaacaggaatggcttcaaatgcagcaagctgcccaacaagcccagcttgctgctgcctcagccagtgcatctaatcaggcgggatcttctcaggatgaagaagatgatgatgatatctgaaattcaccagctgagtttctatttcttctataaatgtttttccctgcacaacaaaaacagtgaaagaaatgcttatctgtaattttgtatgcatcttggtggacttgtcattggtattctagggatgtctgctattaagtttcatctattgtgtgctatacatgtaaaaactgtctctttgaactattgaaaatttaaggttcagtataatatcaattttgaatttttaatggtgtttatgaaattttagatagcagcgagtccttcgtttgatcaataaacagtgttacagataacttcaagtttataaaaatacagtgaaatttctacaaagctctaaatctgcatttgcatttcctctgcccttttaactaaactaaaacttgtgaattttaaattattaaggggggggtgctgtgtgaatcagtagacattggattgggttggtgaaagagttcagttctgtagtatctgaatttgtcttttaaaatgagtacatatataggcaataaatatatatgctcagatcaatatacttgtttagaaaaacttcaagacattcaaaaactaggaaggagtatgtttaatagtatttgtataaatttggtggttatgtttttttattttgtttctgttttgtgtagaggtaaaaactatagttttattacagcataattcattttgagctccactatgacatttcaaagactgcccagtttggaagtctgtcatgatttttactctttcactccaattcagtaattgttgatagtattacttacctagtccatccatactcatattattcaaatatataggtggtacttttgaaacaattacattggttctcttggtttaactgaggtttatgaatattcaaacctttgctgggggaaagaaatgaaagttaatgagcatgcttgctatgagagagggatttttaatttaacttgtagttatagtttacttattgtttttagaattacttttacattttcccaactagatggcctagagtccaacattaccttttgagatgacattattgtctccataattgagtgatagctttaaaaaaaagattagttttgcttaagaagttatgttacaactgatcagccctatatgaattaactgatcagccctatatgaaacataagttgtgttataacttatcagccgtatatggaacataaatagtttctacctgcttgttagagaagctttaatttggttctaataaatacagtatggtagtgtttataggaatccaggatgttgaagaa

SEQ ID NO: 6481 - DNA, 3135 bp, Homo sapiens
aatctcatacttttgtatgtttcatcttgaaaatatcttttgggaaataccactttagtgattatttagcatttagcagttacacataggaaaatacacagttacatagaaaaatacacatttgaagatagaggaaaccttgaatggaggggaagtgttgacaaattttaatttttaaaggagaaactttttgactatctgggttagaggaagatatgtgtaccgcctttagggcattttgttatttccgctgaatcattagttattaggatagataaatttttccaattagtttcagcaagcgttgttggaaacactgtgcagtcaaggattgtgcagtgctggttgtgtgaccacaccctgagtcagtggtgtggggaagtaaagtgtgaagaagcagtaagattggtttttaattttgcccatgttttaaattttcctggtgttttcggtagctgactataaaatgatagagacatttgggacaggcactttaaactgaacaccccttttggttttaccaaaggtcttcagtaattgttcttttctttttcctcctggactgcaggttcctgaagagggtttctgaggaaatgggcaagatgttgaaggaggttacatgcagctgcttttgggggagggtattagagttgtcaggctcaaagagagtgagagaagcaagttgcatgagtgcatgcagacatgattttttttttactaacttcattagcatttccatacattgtttttaaaaatcataataccaacccttaagttcctagttcacagttattcccacaaaagaaaaagccaacaatagtgtaccatttttctatttattttattgctgtctaatcaataaagaatgcagagctgtcaaaaaatgtgtcttacattagctgtcccaacaggattgtcttccctcccagctctgttttaattggcttttagacccactatctgtcagatccttgccatctgtcagtgtctgcctgcgccacctccgtgcttgcttaacatcctgttgcatgtctagcgtgattgagctagatttttcaggcatgtctttagattcccttgttcttgtcaaagccttgttttgttttacatttgtagtgcaaatcactttgtcaaacatctccagcactaatgtttccatcttagtatttgtgcacactgctataacttccccactgcaaacattccagttttggcattacgaagaagtagctgtgaacctgaagtatttatgataagaaaaagaaaacatctctgctgtagcctacagcccagttgaaagaactctttgaaacgtgatacatcttcagcacctcagtctgggaagaatctagtcagcactgaaatcctggcataataaacacagaagatattcaccacctcaagacaaaggactattgtcaaaagtcagctgcttccattcaaatgctgccttaaacttgagtgcctaaatctgttgattgccaacactaccactacagtatcccacaaagggctttatgtgtcagctcagtgcgacctgctttaactctgcagcaccgctgcagctgccgatgtagcctcggtaggtggctattagagctctaccatatacagtggtgcatcttcaaatttatgcatcaaactaaagacatgtccaagtccattttaatttcctcagtggttttatgagaagttttatgggcctcccccaattgtctttttattttgggttatgacgatcatgtttgataattacaatgatagtctctttccacgtgatgcttttgtttgaacctgataaaatttagtgaaactttgtaatgatctatgtgcacttttacttgtaaaatggaatttctgtatgtttatacttgtaaatatgattgttgttagtgctcctgttgctcatggtgtcctgcctcgcatttgtgattctgttaatgacatgtatcttaactaatttcttagtggtgttgtaatagggagatggggcaggtggggggttatttgtaccactgaatcttcattaatttggttctttactgttttgaggggagaaagaacgtgaaatggtttgtgtattattgaattttaagcaatattttagaagctgtgtgactgctttaataactttttcccagtgttatttgaatcatactacccgttatactaaagctgaatgacaattgtgtgaaagttactgccttcataagatcaagtcaccactgttacacagctgacatatagtgtattacctttgcagctagtaaactataaagtttagatattgaatctcgttacagggttatttatataatgtgacattattcagtactgacagactacatgaagtagttttaaaatctagtgctatttttattttaaaggttagcaatgaggaggaaatgtgatctggctgtgtttgtcttctgtacaaagcctgaagtgcttatggttttttggctaacagccacagagggcaaagtttaagactttcttgtaaggactaactgttcttttcaagctactgtttgtttttctaaaagcaggatttgcttccgtaggaggcaagttccttgatgtggaatagtgcaacctgtatatgggttattataataggaaagacatttgtacttgcacagtttaaatcattcttaaattttgaacatgtgaattgtcccaaaaaatctttaattttttggtaatttttactctttttgtgcacatgttgatttcttaatggtaaatccttcatttaaagatagtgttctctgttgagaatatttacatggaataaaacaatcttttcatggcctgttaaggtgtttagtgtgtgatctttcattgctatgtgaatcagagatgtgatgattttgttcttgaatgtgccaagtctcagataatacagagtagatgacaaattccataagtgggacaagttttttttgttttttgcaaagcagttttggaaattgtattctaattttggtttctctaagctttcctaaaggaaaaaaaaagtttgctgtctctttagagtgaatttaaattgcatgcaataatttggatttatctttcttctccagtagctgtgttgcatagactttccttttacaccatctgtccactgcaacc

SEQ ID NO: 6482 - DNA, 1100 bp, Homo sapiens
ggggctcagtggaggtggccctgggattccccgaggagagattctcaggcgttttgggggacctgctgtctccatggacctctcatggtacagggtactaggagccacatgcacttctgagcacctttgccccaggagctccctctttgtgcccccaggtccagggttgaatgtggccctgtccggggacatcttgctttctgactgaaagtgcaccctctgtggcctactttggccctccacagtcagcctgctaaggggcgttctctctgttgagattggccgtctaaactgtgctgccggcacattttagagcaaaaggagcaaatggcacaaaaacagccctgctcttggctgatttggtttagttttctcctagtcccattggccctgaacctgaccgctgatctcctggctttcagacacaacacaatggccatcggcattgcagtggacattctgggatgcacgggcactttggaggaccgagcggccactctgagtaagatcatccaggtggcggtggaactgaaggattccatgggggacctctattccttctcagctctcatgaaagccctggaaatgccacaggtaaatttccaattactttatgtgtacttaatgttctgtaaagagatctgcatgccatgtttggcaaatcagactattttagtcaatctcaaaagtaaattgaatcttagtgaaagctgcttcatttaggggacagtgtcctaagtatttggggtctacttttttttttcttttttgagacagaatctcactctgccacctaggctagcagtggcacaatctcagctcactgcaacctccacctcccaggcttaagtgattctcatgcctcagcctcaagtagctgggactataggcaggcaccaccacacccagctaatttttgtatttttagtagggacagggtttcaccaggttggcctggaactcctgacttcacatgatctgcccgcctcagcctcccgaagtgctggaattacaggcatgagccactgtacctggactggggtctatttttttttttttttaaacgaagtctcgctctgttgtccaggctgcagtacaat

SEQ ID NO: 6483 - DNA, 1116 bp, Homo sapiens
caggcaagcccacttcctgatccagtgtatttcaactttggctcttgacaggttgctaggatacttggagtctctgaagagatgaggaggaacatgggggtgagctcaggcctggaactcattaccttgcctcacggacaccagctgcgcctggacataattgaaaggtgagcagtgccgtcctctgcacttccgaccctcccagctccttccaggcatcagagcagcaggttttagaacaaagagaggcgcagcaccagcctagccctggggtaacagtacttcagggcgcatggcctacagcgactcttcccagaagcctgagcctgagaattcctggagttgcacacaaagacagcacaactcaggaacaaagaatgtgttcccgtccctgctcctggaggagtggatggagagaatagatggcctgaagccagtgactcaattggcctgtgtgagcaggagtcacagatcctgcagcctggggcagagctggggccccagcacctggagtctcctgggtctcctgcccagcaagctgcccctttgtctctttgggggttaagattgcttgaggaattaggaggagtttgtgggaaaggctgggaagagcagagtctagacagtgttttctttgaggggtggacaaatagggtcagaggttaggggatgacggcactggtccggggcctccgaggcatccctcccctcttctcatgaaaagccagggccctgggcatccattgaaatggaatgtttaggaattagaaagacaccaacaatgaggtatgtttttaagaaaagaagctctagactagatatccatattaccacaaagccagcctttttgacacattttttaaaagttgatttgggcaagactatcttgttaagttttctgtctgtccagcccatgtcctagttgccattactgactgcccatggctttccatgaagttccaggtcacagtgctgtccaggaaagctttctgtggtaacagacgcattctgcactggctattacagtagccaccagccacatgtcactctcgggcacctgaaatgtgactgatgtgattgaaggatgactttttataattagaatttgctgttttc

SEQ ID NO: 6484 - DNA, 1874 bp, Homo sapiens
tgtctaggctccactcaccaaaagttaagaattaaataggctggggtacaggtgtagatactttttaaataactgcctgggaatttctaatattctggttcagattcatagcacacacatgaagaataagcatattatatattaaatgttgaggtgtttcttttgttatgttaaatgcttacctacatactaaagtgcttttttgttttccaatttaacacgctggagttttgtttgttgttgtttcttttagaactgctttctgaagcaagtttccaagaagctcttcaggaaagcattcctgacattcaagcgcacgagtgggtgccgctgtggctactgcggtattcggtcattgtgaaaagtagaggaattatcaaatcaaaaggctacattttacaagctaaaagaaggggttcttaactgacttaggagcataacttacctgtaatttccttcaatatgagagaaaattgagatgtgtaaaaatctagttactgcctgtaaatggtgtcattgaggcagatattctttcgtcatatttgacagtatgttgtctgtcaagttttaaatacttatcttgcctccatatcaatccattctcatgaacctctgtattgctttccttaaactattgttttctaattgaaattgtctataaagaaaatacttgcaatatatttttcctttatttttatgactaatataaatcaagaaaatttgttgttagatatattttggcctaggtatcagggtaatgtatatacatattttttatttccaaaaaaaattcattaattgcttcttaactcttattataaccaagcaatttaattacaattgttaaaactgaaatactggaagaagatatttttcctgtcattgatgagatatatcagagtaactggagtagctgggatttactagtagtgtaaataaaattcactcttcaatacatgaatggaaacttaaatttttttttatgtgtccttgcttatagtttagctgtaataatttaaccttgtattcttgtgccatattctgtctttttattacttataaagacaaaccaaagtaaatctgaaaggagactagaagctttgaaattattgtttgggggttttataaaagcaactactgtcacctccatccagattcttttaaattattgatccatccatagtatatattgctactcattcaagaatcctcaataagtattgagtatttaccatatgttgggatactgtgggctctggagagaggagggggcaatagagctaggaattaagaatcagttgagtaaaatgtgtaatatttattccccattaataactgactaggaaggactaaaagccagaaaggggatgaaaaaaaaatccttaattcagggccgacattatctacttaaacaactttgagatatggtcttaattattttaaagcagaataatataattgaaagtttatagctaaaagagactatataggtcatttagtataattcttcattagtttacgaaccacaaaattgcaaataaataagctatgaactttgatgtacactataaatctccttaattctataaatttgtgtctgtaacctgaatagtttgaaaacttctttaaaaatctcttgtatttcatccgggcgcagtggctcacacctgtaatcccagcactttgggaggccgaggtgggcagatcacgaggtcaggagtttgagaccagcctgaccaacatggtaaaaccccatctctactaaaatacaaaaattggctgggcgtggtggcactcgcctgtaatctcagctacttgggaggctgaggcaggagaatcgcttgaacccgggaggcggaggttacagtgagccg

SEQ ID NO: 6485 - DNA, 1224 bp, Homo sapiens
cgtggcggggactcgcggacaccctgacattgaagtcccacggcagtcgcggtcggccctctctccgcccgaccccgtcgggcaaagagacctgtcggccgggtggggagagagagcgcgcggggagcgcccgctccagcccgggaaagctgcacggctacgggccttcttacccgtgcaggccgagggcgcggcgccgcttgtggagcaggcagagcagcaggaacgcggcaccagccagcgaggagtttcgcgccgtcaagtacttgctgaaggccgccatggcactgccggtaccagcgagccggcgaggggacgcggcggcggcggcggcggcggctaccttactgcacgcagcgcgggggagactgggaggagagcagagggcggggccggccgcgcaggaccgccccctggctcgcgccgccgcgccgcccgcgctctggagcccactttgtactttggcccggcgggagcgcgctcggcagcctccgtgggcggaacagttcccgggacgcgctctgcgcacgcgcggactccttcagggtctccggaaacgcggcgcggaggagctgttgctactcagccctgcgaggcgtcagtgctgcccctgcctcacccctaccctcccactcttcgcgcgcacaccccggctttcacaataactggatgagcgggcctggcctgcagcgacgacctagtgggccctgcctctccactcccgcggtgatgtaccgttaccaccctcttaaaggagcccaggaaggaggcggacggccccgtcacagagcgtgtagggaaaacacagcacagtgattatcaggacgaaaccaaacaatcggaactccgcagaggtgtagggagatgtgaggagaatgacacagatcaaagagctttttccaagccagtattttccaaaccgcgggttataatctctagcgcattgtgaaattggtttggtagatcgggatcatcaccctccgtttttaataaaattgagaatagaacaaaatagaaaagtttcacagtacatcacgtagtaaaggagttgtttagagaaatttcgatttcagtgttttgcacgtatgtatcgccagcggcgatgtaaaatgtatgcagatctggtcagaaaaaagtttgagaaacactgttctttgcaaagggacattcagaagtaacaatcgtgcgttgtattaatgctggcctcactcccagaatcagaag

SEQ ID NO: 6486 - DNA, 1546 bp, Homo sapiens
gatattgctaattgtgtatatgttggtttaattaataatatgtactaagaatgtccttattcttgtggttaaaaacctgcctaaattaaattgggcttcaatcactgtaacctgattcatcctgggatgtaaaccattcgaagtcagctaattggacttttatggctctatcttttccttcagtgaagaaccctatttaaaactgggtcatcatttgtcctgttctagcaagatagtcttcagtttcattttcctgtgccctgtggtagttggaaacaaatcataatgtattatttaaatgtttaacatcattgcataacagcgtttattatacagtggcagatttctttagctgccacagtaatactcattccttgtgtgtgtcttggagtgcatttgactccaggaaaagccattttggttttccttaactaaatgataaatgtacccctctcagtctgcagtattgagttgtttaaagtatatgtgcagtcttgcttacaaggaggggttaccatgtatcacacctaatcttcccaatgtttgggatattaaaacacaaagtccttaacatgccaggctcaaggtcttataagagttctagatttttaagagaattagacaaatttgtgtgtgttagaagcccattcattagaagtgtggtggttatttggtattaaactccaaatgagccataggaaggcactacatgaaataatgcactgagtatgcaatgctatcactgtctttgactgtgattttatgtttaaaaagtatgttctaaaattattatatatacatgggtgaattatgtttccgaggcactgttttatctctgtgaatcttgaataacttttttatatttgggttatgatgtcaaacgatcctaagcgaagatgatttcagttcatcaaatcatcattaatgactttatgtattatttgcacagggagaattgaaactgagtataatcaataagctagatacgaaatcagtttctcaaactgagcttcagaaaggggcattttgtactcttgtttttgcataactggttttgtttttttgcagaattaactataacaatcactggctaccgaagtaaactgatgtactgaattccataatacataacattcaatttttaccacttctgtttagcgaacttgtatacttattttctgttcagattaaaaaaaaaaaaaaaaaactcagatatcctatacaacctttgcttgttctttttattctggtatctaaatactgagaagttcatttataattcagccttgacttgaaaacatagatagtttaatcttgacttgaaaaacacaaaaataaattcagaaaatgcttttagcacagtgtctcttttttaaagttttgccaagtgtggtttttaattgaatgaatttctcttttagaaaagttcagtaaaatctgtgtacctgacaaatgctaccaaacagccaggagaccttaaaagatactattcgtcttggaaaagattttaaggcatgggaaagtttcagattttcagatttctggg

SEQ ID NO: 6487 - DNA, 1115 bp, Homo sapiens
aaataaactgttctctcctgtttattgccactgacaggagaggtttctctttacctctggtcctgcacccctctgagccatcctacccacagccttcagtcattgtcctaaagcctagctctaattccactgcctctccttttgtgcacacacacttctctgcttccctggccgttctctatcttggagaggcatttcaaacgccacttccaccagaaggccttgctactgcaccaactagttactatctcttcttcacccaaatcctggtagcactttggatctcccactttgcacttagggttcaccttccgttataatcattgccatcaatctcagcatcgtttttaggcacttctttccagccattgttcttacctccaactacatatcttttctggactgtgcattattcagtttattaaatgcccattaaatgtgtttagccattgtcaattactctgaaacgttcaggttttgacaaattctttcctaatgtaagtgtggtggaaagagtgaaagaaagtcaaattgcacaaaaataggatggtgtaatttggggttatgccgtcaattttgtccactgataaatgggatttgagctctccaagttgactagatgccctttatttttcagaaatattctacatcattggagctgtggtatttgtggtcatcatccttgtcatcatcctggctatatctctacacaagtgtagaaaggcaggagtggggcagagctggaaggagaactccccactgaatgtttcataaaggaagcactgttggagctactgcaaatgctatattgcactgtgaccgagaacttttaagaggatagaatacatggaaacgcaaatgagtatttcggagcatgaagaccctggagttcaaaaaactcttgatatgacctgttattaccattagcattctggttttgacatcagcattagtcactttgaaatgtaacgaatggtactacaaccaattccaagttttaatttttaacaccatggcaccttttgcacataacatgctttagattatatattccgcactcaaggagtaaccaggtcgtccaagcaaaaacaaatgggaaaatgtcttaaaaaatc

SEQ ID NO: 6488 - DNA, 1736 bp, Homo sapiens
aaccaaatgaaagttcatgtattactgttcatattcaatgtgaattctataatttataaattattcacaagaatagattctagctgctgttttaacttttatactatgttctaataccaggcagggatgttagcaccaggtaccagaagagacatctatgatcagaagctaacattacagccggtggacaactcgacaatttccctacagatgggtaccaacaaagttgcttcccagaaaggaatgagtgtgtatgggcttgggcggcaagtatatgatcccaaatactgtgctgctcctacagaacctgtcattcacaacggaagccaaggaacaggaacaaatggttcggaaatcagtgatagtgattatcaggcagaataccctgatgagtatcatggcgagtaccaggatgactaccccagagattaccaatatagcgaccaaggcattgattattagatccacacagaaggagctcagtatttagtcctttgtttttattcagtgagaaccaagctagccttgagtaatttttatcttgtcttcctaaaacactattaagcttattgtacttttaagaaaaattgccttacgtacattcctttttcctttttctgcctcttccctcaatagttgccttttagtgctgtaatagttaaatcctacagcataatcaataactcgcatatgaagtaaaaaggaatactgtgaaaggggagtactcttgtacagccagttcttttatgcaaaaatctatgcatttttacaatcttatattaaactggtattttcaaacaataggaaactttttttttttttttttttttttacagtttagtgtatctggtttctacatggaagactaaactcatgcttattgctaaatgtggtctttgccaactaaatttaagatgcagcattttagaaatttacatatcaatgtttctacagtattgtttgctaatttttaaataaagtcatgatcagtgtgcatttgtgattatatgtgtactcattctcttacctagcgaacaagatcttttcagagtggtgtttctaaaagagcatgtacaaaagtggcctgtggacatttaggcctgggtgatgcatttgctcttcctgtttgtgccaatgtatcaatgtagagttgctctgttttcttcaactgtatttattgctgcatttctcagcataaacttatcccattgtattttttataaataaatattttttttgaactttcatatgaaccacaggctgattattttctggctagcttctagataggtagggtcagatttttttttaagtacctttttcctaggtactgttacaaggtacattaacattttatttacttcacacaacactgcactctatgcttaaggagattgaggcttaggaaaccattacacatagtaaatgacagaattctaatcattttctgacccttgcttatttcactgacttggctggcccagattcatcttaaattcaacttggaataatcttaaaatctttaggaatattgacaggaggggtggggaattttcctatcttagggtaagtaaacatgaataagaaacatgctaggtcagccataggatgtgctgcttggtaataagccagggtttatagtgaaacataaaccttcagtcctgacagagggaaggacaaacaatagctaggtgtcatagtgacaaaaatgcagtcactaaaagaaaattagtaac

SEQ ID NO: 6489 - DNA, 1125 bp, Homo sapiens
ctatgtcagatagaaattttcccttctaccatatctctcctcactctcacttgcttgaagaggaaaatcacatggaagcttcatcagcttttcttgcaaaatctgctaatactcacacttgtctttctcttttaataaaaggcatagatgtttagttatctaagaccaataaacaccaaagcctatcgtcttctgcctgtcaagagactgcactatctgtcatcccctttctcatttatttctctctatattggccacttttcaccagtttcaagcattctcagcttctttcattttaaatgaatttaccttcaactttcaatccatccatctataactctacgtactttctatcaccctgcctcccctctcccttttcactcataaccagacttcttaaatagtctatctttgttgtttattatctcatttctctacttactattatttggttttagcactgttgacccaaattgctcttcctcagcgtcaccagcgattagtagagtagctaaatgctagtgatatgatttagtccttgtcttacttaatacctagataatatttggcactgtgcaccattgtcttaaaattctctttcttcctggtctctgatacttctcacctggatttatcctacctctctatttcttccttgtcttgtaactccccttctacctgggaggcctcacctgctgtcacagctccattaaacctcttatgattcagacagagttcacatcacattttctagctcagacctctcctaagagacccacactaagaacctggcggactaatgaatatcttcaaacagtgtgttcaatctagctcctgtttttggtgtccgctgtgttaggaaagtgcaagataccaacttcagtctcattaacaagccagtaaacatggtatttttccctttccttccaacctgtcatcagatattattgattatacctcctaaatttttgttgaatctggccttttttctccaactcttgctaccattgcagtctaagccagtgttattcaagatgctggtctctcaaggtagtagtgtgtgtcaaactgaaatcagcatacttctagcaacagtatgcttaatgtcaatattggcataaattt

SEQ ID NO: 6490 - DNA, 1108 bp, Homo sapiens
catcctctcgctgtccagctgcttgtgtcttctgcgatgtgttcctctccacgtccagctgcttgtgtgtctgcctgctagaatcttggaggtttttataggcacaggatgggggcgtggtgagccagggtggtcttaggaaatgcaacatttgggcgctgaaggcaggggtgcctgtcctcacttagacccgtgggcacgggtttgggggtggagccctcgccagggaccacgccctcctctacccagcacttcctttccctcctttcctgttatttaaagggaccacgcccttcccagcacttccctcccgttatcacttacaaaagctagtttatcaagttctagctccttccctgacttgctgtccaacattggtatctttttgttttgaccatccttataaatgggatgggaggcagctgatcctgtaaattaaaaaggactggaaattagaagacctgaatgtgcatgtttgcttgttggtttacaagctgcatgtccttgggtaagtcacttatcttccctgggctctattctttcatctgtaaagcccatctcacagagcagctgtgaggatccaatgaagtgatgccagcaaaaggtgcttgcttcgtacatgtttttgatgatgtctttgccatttgattgcagtgttaaacttaataaattttgcatgtaaaatgtatactttttataaaaaatatttgatattcatcttgaaaacattatgctgaataaaataaagcagacgcaggacgactattgtattaatatgatttcacttatatgaggtacctaaactagtcagatttacagagacagaaagtacaatggcgagtaccaggagctggtgggagaaaggaaatgggaagttagcgtttttttttttttttttttttccttttttgagatggagtctcgctctgtcgcccaggctggagtgcagtggcatgactggattctaggctaagtggagctgcagacaactttgacccgtttgacaaacttactgtgggctcagctcactgcaacttctgcctcccgggttcgagtgatcctcctgcctcttcctcctgagtagctgggattacaggcatgtgccacc

SEQ ID NO: 6491 - DNA, 1132 bp, Homo sapiens
aagggatctccctttgttgcccaggctgatctcgaactcctgggctcaagcaatccccttgcctcagactcccaaagtgttgggattataggcatgagccattgcacctggccccaaatagaccaaatcttttgattagaaccaaattattcttcttctgcttatgggtggttggtatccacaaattgcaaatgcctagtcttcactcctctcagtttttctttttgtttctgtaataaacactctgggaagtttttcaaaagttatttcttttgatagtaattattgttaaattaaatgcttttatatctttagcaatgttgccaaaaacaatgagcaaaatcatgttttcttctaaagaagtgatgcaatatgaaataaagatgtgtgtgcttttcagaaagaaatgaaagaaattctagaaaattgtggttgggctggcattaatagctgaggcaataaaaaaattctctggtctgcagaaatcaatcttaagggcaaaggtagtctatagtatgggttatcaagtaaatgaatcaaattcactttagtactttatttttgtcaaggattttgtctctaatgtgtgttaagcaatacctcatcccttccacatcctgcaccagtccaggctgcagtgggaaaagacaaatgcagcagatgccaactaggaagctctcagggcacatgtagtgtttggctgaaattctatttatctgtatattctcatgaggcagggaaaaaaagaacaaaggtccttgtttaagataatccattataggttggaatgaaaggaaagattcttctaagagtcctttttaaatcagattaggatattcacagttcctatccacatcctgcttctttcttccttgtgcagcccctaccaagctcatctctgcacccaggtcacagatggttaccagcctggaatgcccttctcagtgaaacgggaaatgttcccttgtcccccttgcagggtgtggaatggggatgtggctggcttcttcagtgccccactgctcaaatctaggggagcatacagatgggcaggctgtggggctccgaccccacagcaatgtctaggggtgaatgtttgcagctgaagccccagtgggcatgtgttaccacg

SEQ ID NO: 6492 - DNA, 1153 bp, Homo sapiens
gtgcagtggtgcaatctcggctcactgcaagctctgcctcctgggttcacaccattctcctgcctcagcctcctgagtagctgggactacaggtgcccgccaccatgccgggctaattttttttatatttttagtagagacagggtttcaccattcacaggatggtctcgatctcctgaccttgtgatctgcctgcctcagcttcccaaagtgctgggattacaggcgtgagccaccacgcccagcctatggtaaatatattttgaactacaaaggtgctgtggtactttaaagaaaaactatttttactagtttatctgaatggtctgtggactttatttagaaactgtttttcagtttagttttttggacatatcctttgctcagtgtattttgttacttctctagtaaaggtagaagtgaagcagatgccattgtaggttttaccagcatttaaatatattatgaattgcttagcaatgaaatgcaagtatgcatcttttacttaaagatactatttatgtattcagctacagagatgaaatagcattttatgtgttaattgttttggctataaaatttaagtccttacagcatttggggattatacacttggatttcaaaattgataaaacccttgtgaacatatctaatagatattctgtttacttgtagaaataatataatgtgtctggttctgttttgttagacattttttatgttctactgaatcagaatagtcagtgttatattccttatttcaagaattcatctattttatggctacatctcatatgtgctatgaggacttctagccagtgggtggcgctgtaataccgaagtactgcactgctttgttcctgtttccttgtgctgattcctttctagtatttaggtaacattaccggatggcatttcccttaaattccaccaactcttaatctttattttaaaaatggctactttttttgggtggttggggtaagggttaaaaccttaaattagtaaccgctgtttattttccagtttatttgttttctgtgattatttataataattgatatttgtttttacaagtcccctgaccctgtaataatgaatgcagctatcttaggcaaagcaaataaataaactgggcatttttaaaataaaa

SEQ ID NO: 6493 - DNA, 1109 bp, Homo sapiens
cctgtattctcagctactggggaagctgaggcaagagaatcacttgaacccgggaggcggaggttgcagtgagccgagattgtgccactgcactccagctcgggcaacagagcgagatctatgtctcgagaaaaaaaaaacagcattgaaaagagatctttgtttccttatttttcaggtaaggaagtggaggattaaatgatttgcccaaagtctcacagtaatttgtagagctgagattgaaattcgggtgaaacttcacatatcacattctttttatcaggtatgttgagaatatggtttgctgaacacagaaagcaagtagttatctagaattatggtccagttgtgtaaaagcttttatattttaattatatatgacaataatgggcttttacccttctttttgagatggcagtttctggatttactcttggtacctgcatacttctgttgcacattagttatgtggctaattatcccaatggaaaagtaacacagtcatgccatggaatgattcctgaacatggtcatagtccacagtctgttcctgttcatgacatttacgtgagtcagatgacattcaggccaggagatcagattgaaggtaccgtgctgggattaactgtttacattttggatttcactcttttactgtttattgaatctttattattacttgatttagaagatttcacttaaatctgttttcttttgtaagatactatcatacttcttatttttggttccagatgactgtattacttaagtagtctgtgtattccccatccagaacaggctttaaaataagtttttatcgttatttactatttttattaattgtgctatcacttcaagagaagagaaaaatgaagtttattttatcttgtttaaaatataataaacccttgtccttcttgatatcatataattttaagaacaattctctaatttctctggtaaaatgtaggctgattattaaagataaatctataacagcattttgcaaactattttttgcaactctagaaatgcaaaatgttaacaggtactctgttacatagagagtatatagaaaaataagtttggaatattctgtgtgatatata

SEQ ID NO: 6494 - DNA, 1237 bp, Homo sapiens
atttaatcaggtttagtctgtttctattttaataattttaaaaaattatacaagcaaattagatattagacatgttagttacaatggtaacacatttttaggtgtcgaaacacaattttcaaaattcctaatgaaagttataaaaatgtaaacaagaattgtaaaaatggacaaagtagtcaaatatattttcaaagcacaattttattagacaggcataatttacattttgcttttctagtgggtttgaaaatgtttattggagattgggctatgtagtttataatttttaattcataaaaaagtaatcatacatgagaaggtagacctgtgccctaggatcatgtcacatatacagataatgccatttccttgtgtgtgtgatgtgtgttttgatgacctccacaggccttactgtatcaagcttttataatgatgactccttcattatttaaattcctatactttttatttgttatcacgcaactactttgttcaatgtgaaaatgtgctaactcatgggagaagagtgccaattgatagttcttttagcaattaagaatatggtatttgggaagaaaagtttgaaatgcaacaaatggatatttcaacacagtagtattatattatcagttctttagtaagtgattttagagatgttgtaggctacttttacggtggaatatatagtatagagatgcaaaacttaaatgtttacatcaatttatattgaatgtcacataatttcatggaaggaaaggtagcttgatatttagattctaagatataatctgaaaggaaactaattatgttctctacacttactgtaatactgattattcttacatatcaaattattgaactttaaaaatttcattgtatagtcattaaactgagttgggttttttcttaaagggtttagcatcactcatttgatttacacattcacattataatatttaattatcatgggtgtatgctttacataaaaaaggtttataaaagttatttatgctatattgaaagtcatcttaagaatctccaggttatttaaagtagttataggagcagagaacaagcacctttatcaaaatctggtcctatgtgccttgctttaccaaatacctgatttttctggagggtgttcctgtaattcacaactgtagacacatgggcaaaattaggatttttaagaataaatacatttctatttttttggttgtttcaacattagctc

SEQ ID NO: 6495 - DNA, 1788 bp, Homo sapiens
taataaagagaagagcaattagcttgtaattcataagttaatactaaaaggtatgtagtttctccttatgagtaaaagtatttgtgtaaaaatcctaattactttattcttcctcagaattccatcatccctggccctcccttcctatttggagcctgttcagtactgctggctctgcttgttgccttgtttattccggaacataccaatttaagcttaaggtccagcagttggagaaagcactgtggcagtcacagccatcctcataatacacaagcgccaggagaggccaaagaacctttactccaggacacaaatgtgtgacgactgaaatcaggaagatttttctatcagcacccaggtcttagttttcacctctagttctggatgtacattccatttccatccacagtgtactttaagattgtcttaagaaatgtatctgcatgaactccgtgggaactaaaggaagtgggaacttagaaccagacagttttccaaagatgttacaatttcttttgaaaaaccttttgtttattagcaccaatttcttgccactaagctatttgttttattatacatcctttaattaaaaactatatatgtaacttcttagatattagcaaatgtctctgctaccatttccttaaggtgttgagctttaactctatgctgactcagtgagacacagtaggtagtatggttgtggacctatttgttttaacattgtaaaattttgagtcagattttaatattgtaaaatcttgggtcaaataattcaaagccttaatgcagatgcactaaaacaaagaaatggtaaatgaattgtttgcatttaaaaaaaaaaactcttaagaaaactgtactaaatctgaatcatgttttgagcttgtttgcagtacttttaaacattattcactactgtttttgaagtgagaaagtatcagccatttagcatttaagttggggtatttagagcctgtaatctaaatgctggctcaaatttattccccagctacttcttataccactattcttttaatgtttgcataatcataagcacctcaacacttgaatacataatctaaaaattatatagtaaagctggtagccttgaaaatgtcagtgtgatatctattatgtagataaatatatatagtggcctttcaggactgtcacagtaacactttatttacagagctaatgtttgtcctaaattttcaggaccctagaggagagctttatacaattaccgatgtgaatttctctaaagtgtatatttttgtgtccagttatattatttaaaaaagtgttactttgtaaaaattgtatataaagaactgtatagtttacactgttttcatcttgtgtgtggttattgcttaatgctttttaaacttggaacactcactatggttaaataaggtcttaaaagaaatgtaaatattctgttaataaagttaaatattttaatgattttttttttaaaaaagtcttgatctgtgagttcctacagggtctgttttggctttgttaccatatttttacagtaacaaatcaaagcattattcattctttctttgcatccatttcttttccctcactaaaaaatgctcttcaaggaagacaagaggaaagaaacaaaaatgcagtatgcgttttgaagtacttgattttcaaagtgtagatgctgcataatagtttattaacaaagctcaaagtttacagaaataacattaaatgcaacactttttgattattaacacatgtacaattttacactgcaaa

SEQ ID NO: 6496 - DNA, 1106 bp, Homo sapiens
acatagtgggtatacagtaaataattattaaatatttgaaatctgagatgaaagttaatgaatgtaggtatgggaattgtacaagggataggaagtaccttggagaacttctgtaagctccaggcatatactcaaagatgggaagagtaggaatcagcattttcaaaagtcattggggatgcccatttttttctgtactgtacaggaagaagggtttgcctgatcttacaccattgttagagcttgagctctgaacaagtgaaggtttactctttgttcttttttttttttttttttttttttttttcatttctaggccattccccgatttaaccagaaaggagaagtatataaggcacagataatgaatgtgagctggtcagctgatcacagagttattgatggtgctacaatgtcacgcttctccaatttgtggaaatcctatttagaaaacccagcttttatgctactagatctgaaatgaagactgataagacattcttgaactttttgagcttccaaagagtatgtaaaccctagctgtgccagcacatgttcatctttacaatttatattgtaaatgatttgtatcgtatgattaaggatctaaggcacaatatttgtcactgttctattagactttttactgaaaatgaataatggtgtaatggttctcctggggctgtcacattttataggtcagagtgtgacttcttaatatggtgctgatgtttttgtgtcaatggcttgaaactggcaagattaacaaaattaggccgggcatggtggctcacgcctgtaatcccagcactttgggaggcccaggtgggcggatcacctgaggttagaagtttgagaccagcctggccaacatggtgaaacctggcctctactaaaaatacaaaaattagccgggtgtggtggtgggtacctataatcccagctacttgggaggctgaggcaggagaatcgcttgaacctgggaggtggaggttgcagtgagctgagatcgtgctattgcactccagcctgggcgacagagcaagacgccatctcaaaaacaaaaaaacaaaattcatgttactaaaagacaggtagccatatac

SEQ ID NO: 6497 - DNA, 1150 bp, Homo sapiens
gccaccgcactgagccaaattctttaattctgatggaattacctgcagactaattgtaacacgcatgcttttctaggatttgggaggggaatttgtttgtttggtagatggcgtctagctatgttgcccaggccagccttgaattcctggcctcaagcaattcttacaccttagcttctcaaagtcctgggattacaggcatgagccaccatgcctggctgcaagttttaatttttgaaattgaggcatagcattatagggtcataacttaacttataaactggctttataaattagtacattttaaataggactaatgaagcctatattttcctccactagtatatttaaaggtataagacttgtgtatcccaaacactcagaatattaaataactaaagatcttattctaaaaggtgcattgagtgggtttttgaggcctaaaaattgtataccagtgctaattgggatataccaaactttttgtctcttagtaattagttttgttttgttttgttttgttttgttttaatgttgtgcttatcttaaggtgtaaatgcagacaaagttggaattgaagctgccgaaatgctattagcaaatcttagacatggtggtactgtggatgagtatctgcaagaccaggtaatgacacatttaggttaaaaaccctctaacctgttagatttgaatatgtggtagattgaatatcaatttaaataattgactttcagacactaattagcaagtcctacttcaataatttaaaaaaatattctgggatttgcattcctcaaatttcagccctcattttactttacgtgtctacagtgttttgcgcaattgaccactccttcctttttgaagtattttctttccttggtttctgaaatactgttatcttcctatctcactggccatacattctagtctcctttgctagtttattatggttttcatcttctcaacaacaatttttttttttttggtggagacagagtcttgctatgttgcccaggctggtctcgaactcctggtttcaagtgatcctcctgcttcagcttcctgagtagctaggcctacaggcacatgctgtcatgcctacctaatttaaaacttttttttgttttaatttttatagagacgaggt

SEQ ID NO: 6498 - DNA, 1139 bp, Homo sapiens
aagcttgttaatatctatgatagcatgcccttaagatactccaacattatgatttcccagtttggttttccatatgccaactacaaaagaaaaatataaaagtaaaacaaacaaaaacaaacctgaaaactgcttggcatttgagtagcttctccatgctatgtatttttttaagcaacatcatgaattttatctactccagaagtctctacaatagaaaaaaaagtgcagtgcttctaggatataaaattcacattacttttgaaagccaagaagttggtcttatccagttaggtcttcttatgaagagttttcatccagggatataactccttggtcagtgattttattgtttacatcctgagactgttctacagtttctttgactcctggcatttgccttaaggacctatagcaagctgtttctaggatcagaaactcaagagaggcatttctctgctttttcactaaaggtcagttgttttaatttgaaacctgaaatgcctctttagcaaaagcctgtggtatggggtaaagccatgtaagaagagaatagtctcagtcacatatgaagaggaaaatttgcagctgccagtgctttccttgtggccctgccaaccagctcttccaggacgaactcagtccagcatggttttgatgtaaccatccatgcttttatttttgttaagtcttttgtgactgggacagttaattttagtagctgaagaacgtctagttgtttgcttgatatttgtgaacatttactgcatggatcacaaaacaatataccctgtatttcttacacgccacttatatgcagcaaggagtaaatgtgttactagattcgggtagtgcattttgtcactgaatctgaccttgagaatgtacattaattcttatattttacataatgtatgtgttgtttaagaaatgtataaaaaacctgaaaaaaatgagtaagaactggcagaagttaaaaccctttgtatcaaaagatctttattggtagagcactggttatcttctggatactaaaaagttgtattacaaagccaaacacttgcattcacaactttaaaaaaagatccaaggaactattcataatgatgaaatttcaactacatacaaggaggagaaaa

SEQ ID NO: 6499 - DNA, 1228 bp, Homo sapiens
caatagaacacgtggctgcctagactcttaatcactgatatctaccacaccaggatttaatgccagttgggaggaaatggcgaaagggcaggcgctggagcccatgcatccgggaacactggtggtaggcggtcgggtgggcgtgagcgggctctccatctcccagcccagtctgcaggtcgccacctcaggattttcttcctgagtccgggtggcaggattccatcccaggtcagcccctcacaccccctggtagttgccacctcctggcgtccctccaacagctccagcacctttctcatcccgcccccgccgcaagccacgccctccgccgcgcaggccccgcccgcgaccggcctccctcctttcctgtcccaggacgcgttgcgcggcccgggccggaagtaagcgaattcccgggtgtgtgtctgtgtctgtctgtgtctcgcagcggcgcgcggccccggacaagcgctggggattcccgtttgaggcgtcactactgtcactgccatcaccccacggagccacttctagaggggagtagacccggcccttcgccgggcagagaagatgttgcccctgtccatcaaagacgatgaatacaaaccacccaagttcaatttgttcggcaagatctcgggctggtttaggtgcggggtgctgtgtttgcggggagggggtgtccggcagaaagggagaaggcccagacctcaggatggcccgaggtccagtgagggagagtcaaaaactccccgtcaacccctagctgtgaagaaaggagcatgtgaactgggagggtcttgaagagggtacccagcctcggggtcccggcacctccttaactctcccggctcttttccacgtgtatcattcccaggtctatactgtccgacaagacttcccggaacctgtttttcttcctgtgcctgaacctctctttcgcttttgtggaactactctacggcatctggagcaactggtaaccaaaggggaaaatggtttgggcggaagctgggtgtgagggagacgaagcactgtttgcttaatgccacgtagctcctcactaggaggttcaggtcctacctttgttacctacctctgctgctgagttgctttctcatacccacaccaatctggtagggctacagttcttgagtaagatctgggcctatcctgtgcaacctctcttgtcacgctcccctccagttccatcagacaagactga

SEQ ID NO: 6500 - DNA, 1168 bp, Homo sapiens
aagatagcctcaaatacagtgaaagattatgtatccaaaaaaaaaaaaaaaaaaaaaagaaaaggagcagggaaggacagttctagttaaagccaaatggatgtgagtctgacaagggtgtctttgatttatatttcctaactgcaaattacacagaaagtgagaatggggaataacttttattaagtatttatgtgccaggcggttagtgtggccttcatgttattacatttaatcctcaaatttctacaaaggaataattttgcatgattttatgattgacggagcattttcaaatctcctctaattctcataacatctctgtgaggaaggaatttttatccttattttacagatgaggaagctgtttggagataatttaagtgacttgcctggggaatctagccagtagtagagtactgattaatcaggtgctgacatctgctctgctttgtgtatgtaattcagcagtgcttcaaagatccaagaagctgtagcagatctcaatacactctcctataaaattagtgaataatcaccatgacaaaattggtatggcggaacagtcattatacattatttagactcattccttcttccagtgcccttatgattatttcctacctttaccattgatcttaaactgtgcaggctaaaaagaggaaccagaactcccttaagcacttttaagactatttaaaaaataaagttttgttggcattgaagagtaagctgcttaagggactgaatgaaaagatagtaccctttgtggctgtatgaagagagaaactgaatttctatccaagagaccttaatttagtttattagggaattatcttccccaaaagtacaagtaattttgcactgcaggagaaggataagtagatttgatttacatcacattttatacacacctttcaaaaggaagaaatctgtttcataaatagtagtaatctatgcttaaacttaacatttaatgttgacttcttacaacagccttgaaaattatttgtaattttgatcatgatgttggaaagcttgtaataaagaatatctttctcttctgcatccttttatcctcaaacttagcatggattcacatgctgagtaaatgtttggttaactagtgaacattttagatagttgtgtcaaaaataagggttaggga

SEQ ID NO: 6501 - DNA, 1193 bp, Homo sapiens
cactcttgagcagctgcttgagcccattcctattctgtggagtgtagtttcatttcaaaaaatttttgcttttctcttattgctttgtttgtgcagtttgttcaattttttgttcaaaatatcaagatcctggacaccctccaccggtaacactattacttgaatccaattagagtataaagcctgtattacagggagatgatagggaaaataaacatattttgttctccaggagaaaaattcagaaattcattttttaatattttattatagtcagagatttgtagtactacttagtgcatttaaatttaatagcatttaatgctattaaaaaccagcattctgcctcctaaaggtgtactgcaggcaacttaaggaactagtaactattaatatcttgtgtaaagtggaatattctagaattcatatacatactcatttttcattgtaccctttatagtagatgttggaaagaaatctattatctaaaattatttacaaattctccttttcaaagaaactgtatttgtcatccttttagaatttcattgaatagtacatgttgttgctttttattttcttgtgttcaacagaatcttggaattttaggaagtgttttcctttaactttttgttttcaggtaattttagacttacagaaaagttgttagaaaagaaaaaagaattatatataactttcaactattttctccccaaaatagttaccatatttgcttttgttttatatttctcttttttctccctcaatctatgtacatatatatgtacacacatgcacacacacacactacacacattcatacacattattttctgaatctacccatgttatagaaatggtgccccggcaacgaaagccaaaacagacaaatgggatctaattaaactaaagagcatctgcacagcaaaagaaactaccatcagagtgaacaggcaacctacagaatggcagaaaatttttaaaatctacccatctgacaaagggcaaatatccagaatctacaaagaactcaaacaaatttacaagaaaaaaacaaacaaccccatcaaaaagtggacaaaggatatgaacagacacttctcaaaagaagacatttatgcagccaaaagacacatgaaaaaatgctcatcatcaatggccatcagagaaatgcaaatcaaaaccacaataag

SEQ ID NO: 6502 - DNA, 1123 bp, Homo sapiens
tggtgctgaaaaataagaaaaaaattaaactgcattctgctgttcttctttagaagcattcctgcgtaaatactgctgtaatactgtcatgcaaagtgtatcctttcttgtcgtatcctttttggggcagtgtttttttgtttttttcctagaaatgtttgtccttcccccacctgttgatccaggttaaggaatacttttttacactttattcaaatgaaatatttctaaaattatttgtatagactgaacagatcttttatgtgtttttagatttgttgttgaattttctgtgctgtcctttatataattttttgagggaaagttagtgaatcaggtcaacttacttagagaatgtgttcatttactttaacccagaatacagtcttgtttcttctatttgtatgtttcctaaacctaattcaataacatatgctttctgttgtgtaatatatctggtttaggtatttataatgtgtttaaaatttgggcaaaggaaatgtttttcttttaaaaagtacttacattgaaaattaagatgtctggattactatgtaaattctagagagtagcagacctctcatctgaagtcttagtgaatctcttttgacatagatagcaatagaagtatctttcttctttcccctttctttttctaaacaagagaagaaaagcgtaatagaggggagaacacataatgcccactaagggtagtgcattaaggaaaaacagtcttggcaggtatataggaatagtggtttccagactggttgatgaccgtaatcaccaagaacagtggttctcagtcttggctgcacattgcagtgatctggaacttaaatactaattttaaaagggtgcagtggctcatacctgtaatcccagcactttgcaagtccgagatgggagaatcacttgagcccaggagtttgagaccagcctgggcaatgtagggagaccctgtccctacaaaaaatacaaaaattagccaagtgtggtggcttgcacctctggtctcagctacttgggatgctaaggcaggaggattacttgagccccagaggttgaggttgcagtgaaccatgatcacaccactgcattctagcctgggtgacagagtgag

SEQ ID NO: 6503 - DNA, 1442 bp, Homo sapiens
atattttgtttcgcgggggagtgagggggaagaacacggatgaaaatgtcagtttttgaagggtccatgcacatccctgacacctcacaccttatctaagtctgaagctggggagaaaggggttcatttagacttcatacatttccagtacgactttagtatctctccagagccatattttctcagtccgaattaattccccctccctaggtgcctgtaggctatggtacttcttcctcattgttttctaggtaaacttcactactggtaattaaggggaaggatatgaggaagcagtttaaatagccctgttctcattactctgaccacatacatcatagggtgctaaagttgatgaacacattaatccgttaagtaaaatggactttgtaattgtacagcatacctaagaaactcagaaggtgcatttaagagagagacctgaaagaaatagtatggatttttaaaaattcttgtctctactattataaccaaaaaatatttcttgtatgtcccataaaaatatttgtgtaattcttatgaaacaggctggtagaggaggtttctgagcctagcccaagggcttattcatcaccatgggtaaattatttaaactcacttaattaaggaaaatattttcccagctagaaaagtatactcattctcatttaaactctctcatttggagggatcatgtgagttggcctacttacaagtagtgaaagttcccttttcagttttgttttgttttgttttgtttttctctttcactcagccaaatgtgaaagttgtgaatttaggaaaatcacttgtaatgaagtgtgaatcttgttatcaaatttatttctctgatgtttccttccttatccttgtagccaataaaacattgacattctcacgttttatagatgaggtaaaaagtcttgtgtgctgtgagttataatgcttttgcctttttaatattattagttcttaagtgttacagccccttcagaatataacttcaggacaattcaaactatgcttaatgtatgattttcgagcttctgtatgctaagaaaataggtgtgaaaaactggtgttctgaaatagcctaacatttattgtaattctgaattttctgcccttttattcattgcatattaaagtattagagtataaaaactaatttgctaaactttggttgtatataacacagatcttccatcatggagagatatacatgtacaaaattatcaatttacaagataattgagtagcaagcagtacagttgtaaccgtcaccattttgatgctaagatagtgatcatctcatgtaaatgctacagtcacagcaagctagacttaagctagagggaaaatagagctccttataaggtgttctatgttttaaatcaaatatttatttagagtttgagtgtgtgattttgagtaggtttctg

SEQ ID NO: 6504 - DNA, 1797 bp, Homo sapiens
aggggagaggtagaagagaagaaacataaagaagacaaagatgataggcggcacagagatgacaaaagagattccaagaaagagaaaaaacacagtagaagcagaagcagagaaaggaaacacagaagtaggagtcgaagtagaaatgcagggaaacgaagtagaagtagaagcaaagagaaatcaagtaaacataaaaatgaaagtaaagaaaaatcaaataaacgaagtcgaagtggcagtcaaggaagaactgacagtgttgaaaaatcaaaaaaacgggaacatagtcccagcaaagaaaaatctagaaagcgtagtagaagcaaagaacgttcccacaaacgagatcacagtgatagtaaggaccagtcagacaaacatgatcgtcgaaggagccaaagtatagaacaagagagccaagaaaaacagcataaaaacaaagatgagactgtgtgaaaatattttgtaaaagtggatcacattgaatcctataaatgattaaatctgcttttttcccccacgttgagattgtgcagtagttcgcactcctcaagctctccctgtaggctgcattttcatttcctctttcgtgtagggaagtgcctttgtaattccatttattgcattggtgttttcacccaattgttaagtttgatacatgatgcacagattgttcttgcatttttattgtttgtttttgaaatgtacagtctgtacatatgtcctgaaaatgttttaattcctttggcatggttgccatgttggttaaatttgtataaggcaataaactgccactaatctatttttgttttgtaggtgtgggattatggtttgtgtactgaagttagcatggctgtgcttttcgtaatagaatgctaaagactttgagaatggatcttggatgtctattataggagaagtatgtgctgccaatgtacaagaaggcagcattgtaggattaacattcttgtctactgtatattatcttggaaggctcttgttaatatgttacacttaatattctccacagttacctttagagagaatttatgagaagttagtttctgatgcagaggtttttaggctgtgatttcatcaaaagtccttttagcattctacctcaaagggacacttagtatgcctaaaatttattcacttagttttccttttttatttgaaaaaatacatgacatgtaatctttttttcttgaattctttctcagattttaaagtactatattaaagaaaaaaattaatgtctaaagcctagcattcttgcagaaccctatactaacatgtaatggggagagggtggggcagatgagtagagaaacagattcaagcctcaagcttccaaagcatttttataaatggaaaatccttaaattatgaaacagcttgatatagtgtcctttttttaaaattcagaactttttttattgataatggagattgctgtttgagtttttaaacttaatctagaacagaggagtattaaaagtaatgctgtgctgcattatttaagactatcagcaaattatttgatagattgttcttacaacttgtattctgattacagaaccatcatgagtgtggaataaatactggattaaatcctttatcctgggtcttggcttttcccccatttgttaaatttttttagcatatttatattgtggaaattgatgaaacgtcagtagagtcacactttgtgtacagggatgtcttagtgcccagatgacaagtgaattttggagaaatgcatagactgggattgggcatgtggtaatcaat

SEQ ID NO: 6505 - DNA, 1162 bp, Homo sapiens
gctacaaaaatgtaatttaaatccttagatataagaggaaataacagattaataaggaaacaagagcaagatctattttttaaaaaggaaaagaaattagataataagaaagacctcttagaaaattaaaatatgatggtagaaaaaagtaaatccgaagcagcctgaggtaatctgtgaaaatggttcgctattcacttgacccggagaaccccacggaatcatgcaaatcaagaggttccaatcttcgtgttcactttaagaacactcgtgaaactgctcaggccatcaagggtatgcatatacgaaaagccacgaagtatctgaaagatgtcactttacagaaacagtgtgtaccattccgacgttacaatggtggagttggcaggtgtgcgcaggccaagcagtggggctggacacaaggtcggtggcccaaaaagagtgctgaatttttgctgcacatgcttaaaaacacagagagtaatgctgaacttaagggtttagatgtagattctctggtcattgagcatatccaagtgaacaaagcacctaagatgcgccgccggacctacagagctcatggtcggattaacccatacatgagctctccctgccacattgagatgatccttacggaaaaggaacagattgttcctaaaccagaagaggaggttgcccagaagaaaaggatatcccagaagaaactgaagaaacaaaaacttatggcacgggagtaaattcagcattaaaataaatgtaattaaaaggaaaaaaaaaagtaaatccatagaaaatagaggtgaggaaattgctaaataatatttttttaatttcctagaacttaagtttccaacttaaaagggcccatgaaatacccagaagaataaggaaaaatagaatcactctaaggtctatcttctatatcatcatgaagtttcagactatcagggaagagaagaacctgaaaaattccagagtagaaggagcaataggcctcacccaaagaatgaggaatcaaccagcctcgccaacatggtaaacatggtgaaactccatctctactaaaaatacaaaaattagttgggtgtggtggtatgtacctgtagtcccagctagtagggtagcttaggcacaagaatcacttgaacccaggaggccgggg

SEQ ID NO: 6506 - DNA, 1406 bp, Homo sapiens
tcattagggaaggaactaggctgtgttcagacttcttttgaagagagagaattttcaagacttcttttcactctttgatttggatctggcaaattggggaggggatgctgggtgggaaacagttatgaaatgccaagaaattctttggctttagaaatttatctttcatgtacccatccgggaacataaaagagaggcatagtgctcattgcaaaaagagaacagatgaagtagctgtgttatgtgctggtatcttgagagttttgccaagaaaatctgggcctacataaaatttgagaattatctgtgtgatgagaccagaaagcagtggcttagacaagaaaaaatctttctgttcaccagtatcctcaaatggagacttcacttgatcagatggtatatgaaaaatgaatcaactattgctatttcgtaaaacctttttatattttctaaatttacttagtgctaaatactgttactcagttttaaatgccacgactaggggaaaaagaaactattgaagaaataattgtttagtatatttgcagttggggtagaagaaagaaatctagtatattgattcatatactagtaaattcatctagtataagaacttgtgatgttagattgaagttttgtcatcttataaaagacaacaaacttattttctgtttaagtctgagtgttatggcaatttttagttgattacttatttttcttagccaaattttaattttcttcatattgcattgctctttagttgtctctggaaattctatttactttaaggacatgagaaattcaaatgagagaagttgctgatattcatcagtgtgtttggacagttcatagggtccacaaatcaaatgaggttgtttcctgaagtagaagaaaacagaactttgcaattgatactgaagtactttgccatggagttagtaactcctgagcagaccattttagatggctcagcatttggcaggaagacttctccattccctgcttatatctatggaaggatcagctgttggatgtctagaacttctctatttaaaaaaaaagagtaggtctaaaattaaattattataagcaagcatagacatgggtcttccagttgaattgtccattaccgtaaaacttaatggtggacaagttagctgtggttgattcctgtgtggcagtaaattgtcttctgtctgcttactccaaataataaaagctgctaggaagtttagattttgaaataggcagtttaatgctttgagggtttctagaaatacagaaagtcatcaagtaaacactgcatgtctaatcatctcagagttgtggctgttatctcttcaggaattggtccacagggtaaatttcaacaattcatacgttttccattgtcatttctgaggacc

SEQ ID NO: 6507 - DNA, 1198 bp, Homo sapiens
agccgtgttcgcgctactgcactccagcctgggcgacacagcaagaacgggtctccaaaaaaaaaaaaccacgattctgtaaggtggaaattagtactgccttttcctgggacctatgttcccctccgagccacgcgagggcagcaacgcgcgcactctgaggaacacccccttcctcaggactcgtccgcctgtgctcggtggtttctcccagaatcctccaaggcgcgggagggggcggagagcttaaaagtcgcggggggagcggacttccgctgttttagggagggagagcggcctgggtcctgggtgttgtgtgcggagctgtggcgtcgcgtgtgaggcgcgtgcagggtgagtgtgagtggacgcgtgagtgtgtgagtgtgcgcgcttggagcgtgttaggcgagtgcgtgcgcccacccctgcgcccctcctcccgcttacactttgatcttatttgatcggatcgtgaccccagccccgccgggccgacccgaaatgaaaagctctcctcctgcgaagccccctcggggcgctgtgcagcgaggccccttaggcggcggccacgctgtggtccccgaggtcccggagctggccctgcggggcccggcgctcagaagtgatgaattgatcagatagacgaggccgggcttgtccccggccactgattatcgaggcgattctgatctgggcacggccaccgggctgcgggctgccggtggcgtaggggcgagcacgtgaacggcggcggcgggcggggatgctgagcgcggtggccaagggtaaatgagccgctgcccctccccctggagctggaaggtcgcggaggcctttttggccgctgatatactttcctcccactttcccatttctccttgtttttcttttttcttttgttcctttttttttttttttgagacagggtcttgctctgtcgcccagactggagtgcagaaccgcaatatcggctcactgcaacttcgacctccttggctcaagcgatcctcacatctctgtctcccgaataggtggaactacaggcgcgcgtcaccacgctcggctaatttttgtatcttttggtagagacggggtttcaccatgttttgccaggctggtctcgaactccagcctcaagtgatccgcccgcctcggcttcccaaagtgctgggattacaggcatgagccaccgcgc

SEQ ID NO: 6508 - DNA, 1558 bp, Homo sapiens
gcacaaagctgctctgagcccagcctttgttccccgacaccccagccgtagcagggcccatctgtgcctctttcattcattccctggtgaacattaaactcactgcaggctggggtgtgcaggaggctgcagagcacagaccacgagacgactctggaggtcagggccctgagtccgccctcatgtggccctgggaccaatgagagcctggaaaaaaaaaatctacattctcctctgcaccccaggcaatgtcgattgtctgggaagggttgtccttgtgcaggatttgaggggtaatttaaaagggtaaaaaaaagaaataaacaaaaaaaacccccgagagaatgctatagacctcttggaaaatcatcattcccagtttcatggctagaattacttctcaaactttgtaagttactacttctccattgagtagcaagttgccttctctagttatgagacacagtagtgtttgagttaagcgatgacttcacaaagttaagttgttcgtggaataaagtttggaaagatggaggttgtagaattaagaaatcatatatcaagcttggcgcggtggctcacgtctataatcccagcactttgggaagcctaggcaggcggatcactcgagcccaggagttcgagaccagcctaggtaaaatggcaaaaccctgtctctacaaaaaatacaaaaattagccgagcatagtgttgcacacctgtctgtagtcccagctgaggctgaggtgggaggatcactggagcctggaaggttgaggctgcagtgagccaagattgtgccattgcactccagcctggatgacggcgtaagaccctgtctccaaaaaaaaaaaataatttaaaaataataaaatcatatgtcttgtatgtctctttcttgctctgtttccttaggatgtggacaacaaagtagagaggatttggggtgattgtacagtcaggaagaagtactctcatgtggacctggtggtgatggtagatggctttgaaggcgaaaagggggccgtggtggctgggagtcgagggtacttcttgaaggtaagagctgggaaccagtgaggataggattatgaaaaagaaacaaaatatatatatatatatttttttttttttttgtagagaaacataatctgtttaaagaggcccacagatctaccagttgtacttgcctttctgcaaatgtattggcaattagatgcaattctctttctaaagcaagagagggcttatcaggattccgtagaacaaaagccactaagtggtcctccataatgaatgtctgttttgctgactgaatcagaacagtctctgcctttaagtagctcagtataattggacagtcagacaagtaacaaagaatcaaaatccactgtcataagctctgtggtttgtgtaggcccaaagtgctttgagaacatcaggataattctcttaacggtgtgcctggatgatttgctgggcttcagtgttcagaacgaatctcaaggttcagaatgtcagttgctgggatctgtggtcttttcttggcctcctgctt

SEQ ID NO: 6509 - DNA, 1099 bp, Homo sapiens
tgaggcaggtggatcacctgaggtcaggagttcgagatcagcttggccaacatggtgaaaccttgtctctactaacaatacaaaaattagctgagcgtggtggcgcgtgcctgtaatcccagctactcaggaggctgaggtgggagagtcgcttgaacctgggaggtggaggttgcagtgagccgagattgtgccactgcactccagtctgggcagcagagtgaggctctgtctcaaaagcaaaaaaaagataagtggaaaatattctttcctcttaatttacatttctttgatctctgtcagggaccccattttggactgacccattcctttatctttttagtattctctccccactcccaggcagggattaaaggaaatttttcctgcactattattgatctctttcttgtggtttcttattctagccaaggtcctccccacttcctcttaactggtatagctccttccttccacaggtgattggcaaaggcagtgaaaagtctgatgacaactcctatgatgagaagtacctgattgccacctcagagcagcccattgctgccctgcaccgggatgagtggctccggccggaggacctgcccatcaagtatgctggcctgtctacctgcttccgtcaggaggtgggctcccatggccgtgacacccgtggcatcttccgagtccatcagtttgagaaggtgagtagatgggtcagggtaaggagtggaactttctctgtctccagaatggttagatgagagataggatctgtgttgctgaggcccatcctggctccagcttttcctctcattgcttacctctgtgtttctggggaagtgcatggtggagtggcgtggattatggaccctgaaaccaggctgcggctttaccactcaccagctgtgtaacattgggcataatgcataagcccccagtgctccatttctgcctttgtatgaggaggataacagtaacagtgcctgcctcaccaggcctattgtggcctattgtgaggattatcccagtcactatatgtaaagcactcagaacaggggctggcatgcatacgggaagctcgcaccataagcatttgctc

SEQ ID NO: 6510 - DNA, 1192 bp, Homo sapiens
gcaagggccaggatcctcctttacaaatatattcctgcttgaaatcattgaggtaggactagcttagagaccagaactgttttaaaagcctcttagcacttctgttccctacaaaggactctgtggaaagcgagaggctgtatttaatccagaagagcccctagcttctatgcctagcatgggttggggacttattaacagcagtttctctcgttacagccatccccacatggggagaccaactgcataccaacttgctgctgcacctccaaaggattgggatagccagcagggcagaggagaggagaaaatgttgtagcccctttgtggagctcccactgttgccctaatagccagttcctttctcaggggaggctgatgttcaggctgtttatttacctgctgcctttcatctgcaatctacaaaccctttactttaataacagcttctgttagtttagtgcctctctcctaggaggttaaaatactccctatagatgatctcttttatctttgtgatggtcccagaaggtagggtggggacatgattatatgattatgcttattccatcctttggaagacagaaatacaaggacggtaagggagatgagacaacgtggcctgatggaggtcggaagtcctgactcctcggcagtgctttatgtttctttgggaggttgagagctggaatgtgaactgggctgtcacttaggagcctttatctcacctcagcttccttagtccctgagcagcgacttgggcctgctggagcatagtaccaaggaaaggggccatgtgctccattttccactgggggcttgagattgatcctattaatcttgctgctggaaaccctgtcaaaactgaggtaggtgcgtgaaggggtgacagtggctctcttgtcttgcctggctatgccagctgggggcccacaggcagacccgcctgggccgtagcccattgccccagctctgggataacaaagccgggacaaggggacaaagagcaagctgctcccatttgtaattcagaaggaccagaaactcacatttcctgtggcctcaactatttggtttgaagaaaggcagcgtacacagtgtgcaggaggctagttttgccccaccccctataccattccagaagcccactgggaactctcacagggccctgaacgcccctgctctgccttag

SEQ ID NO: 6511 - DNA, 1493 bp, Homo sapiens
cagagtctgagtcttagttttcaaatacctcatggtcagggggagagtactaatcccacactcgctcccttcatccagtatttcttttcgaggtcagttaaacttgctgctaactcatttcttttgttaacccccatgaagttcctgtttcccagcgactaaatcttcctgtcatgggtgccactcgcagcaatctgcagccccccaggaaagtggcagtcccaggacctaccaggtcagtctggtcctcccttgcccatcctgtctccctaccccgccatcatctgggattccaagctgttatgcacatcagccctgaattttgtatggaaagatggagagaggaggggagcctggggcaggggaagggggatcccatttcttcccaccctgaggagcttgaattctgctgggtgacaaatgggcttgaggaagaagggcattttaaagcagttattccttctatttctttaggtaaagagatcaggacagcaagcaagacttcagtagcaaaccactacagtcagtacctggactcgcctctacccagcagaccctgactccagcagattctggcccagggacaggaggaagagatgccaccagggctggtctcccaggagtagagaccatgggaaatggggtggattaggattgagctggagaagacttaaactctctgggttgaaagaagattaggggaaaagaggtcaccttccagcagtgaaatgaacaaatagaagatgagaagtacaggcaagtggtttgtctttatccacccccactgttgtggtcagccccagagaattttatcttcttccttggcattggttcactggacatttccacgtgagcggcctccgtagctaacctccctgccctctgaggagccatcttcctgaatcgcattctctactggactctggcctgcttggagaggtggcagcaggcacctggtcttcagaaattgtttcctgtgaattctgtgactcctaataggccagtttgtgataagcttactctatgagtcttcatttttctaaaataaagtgaatgtatttttatattctctgtatatctggaagtcgatcctgctcctatttctttctctttttttagacagaatcttgctctgtcacccaggctggagtttaatggcgcgatctgggctcactgcaacttccaccttctgggttcaagcaattctcctttctcagcctcccgagtagctgagattacaggcgcctgccacccacgtccggctaattttttgtatttctagtagagacggggtttcaccatgttggccaggctggtctcaaactcctaacctcaggtgatccacccgcctcagcctcccaaagtgctgggattacaggtgtgagccaccgcacccagcccctgctccaatttctctttttttttttttttttttttttgagacggagttttgttcttggtgcccaggctggagcacaatggtgcgatctcag

SEQ ID NO: 6512 - DNA, 1217 bp, Homo sapiens
ttttcctctaacagtacctctttgtctcgaatcccttactgctgaattattggcttgggttggtaacttagcaaggtttggcgcacttggggctgctgggcggctggctgactcgggcctctatgacactattggtagcggggagagaagggagaagctggagttagatttcagggtgttaagaagaaggataagtggatttgctgcatctccatcctggcatcatttctgatgtccgtaaatgctaaaggcctattaggccccatagaaccaggtatctcatcgcccagaggccacatctcacagccagcatgggcatcggggcctagggtcatgtccctggctctgttgtggggcttttatgcagtctcccttgcataatctcctgttcccttttgcatgggcatgatgcctggtttgtttcctgtctcagccgtgaggaggaagacataacagtgttggtgactccagagaaaccacttcgacggggcctctcccaccgaagtgacccaaatgcagtggcacctgccccccagggtgtgaggctcagcctaggccccctcagtccagagaagctggaggagatcctcgatgaggccaaccggctggccgctcagctggagcagtgtgccctgcaggatcgggagagcgcaggcgagggcctggggcctcgccgagtgaagcccagtcctcggcgggagacctttgtgctgaaggatagtcctgtccgagacctgctgcccactgtgaactctttgacgcggagcaccccctccccaagcagcctgacgcctcgactccggagtaatgataggaaggggtcagtcagggctctccgggctacatctggaaagaggccctccaacatgaagagggtgagttgagagagttgagttggaggtgtgccccagacatggtgtgtgccatgatgcagggagtggtttccttattggtaaaacagggatagcatttctacatctagaattgttggaattaaatgagaaccatgaaaaaagagaaccaaaactcttaccacagtgtctgagtatatgtctatgataaactcaataaatggtattggcaatagtgatggtgatggtgatgtggtgatgttagcagctaacttctacccttccttactgggatgtagacaactctccacctctatttcttaattccttaagccacagaacagatattttttccactctagtctt

SEQ ID NO: 6513 - DNA, 1108 bp, Homo sapiens
cgtttgcagaaactgcccctcccctcattgagggtcactgctcaagagtgcaggagtggactctccactgatgggtctccctccccatcctggtttccaccccgggctggctagctctgttggtttgaagactgacagccagcctggctcattctcattattggctagttagctttctttatcaacctgctcactcacaaatgtgtgccctcagccagagagtaagaaagcccaaatctgttacagcttctaaaaaaatagatttctaatttgtcctactcatgttaggagcattatctttgaaggtaaaacatagtgtatcattgtgtaaactcccaggcttgatgtagcagaagagatcatttctggaggcttcagcaatggaatttagcattataagagagattggacaaaccagtccaaagtggtccgagttcttaaatccaggtagggaactcactcttctttcttctctggacctaattgggcattgggctttagtgagaccacagaccaggcccgtctctcctgtaggcttttaattcaatggcaactctatttcaaagaataaaagcctttggagagttgcggcagttctgggggcgggctcaggagagtccatagatcagccgtaactggaacgtagaatctacgtctgcctctgaatggacttcccacctcctctctcttgctctgatgcttgcctctgggcctctccatgcccaaggtggtctttcatccttgacaggctggtaatgtgctggccacctccagctcctgcatcgagtctgtaaaccagagctggttctcatggccttcgtcacgataccaggatacggaggggagcccagggccatccatacccaccccagggtaacggggctggcctggcattagtcattatttagtttccaggccaaccatccagatagagattccctctttcctttgagcagtgctctcaagagctccgtgcctgtccacaatgacctagagtgcatcctgctcattgtcagtgtagcccctcgcccctatattcatccaggatacttggaagtgctaaaataggaagggattcggctttcaactttgctaccatcttccctga

SEQ ID NO: 6514 - DNA, 1094 bp, Homo sapiens
agctgtgctttgtgtgtgtgccagtagacttacgcaaggacagggtacaaacttagctggaagtctgcccaggctgaatgatctcttccctagagttgattgtcgggtacacagtgtgaacccccgaagacggaacctcacagtcttccatgttcccttcttaactgtcgtgtggctcgttgctaaatcatgacaatggctgcctatctgctgcttcttaggttgctgttgtacatggaaccaggactagagattttttcagatttatagacttaaaaaattagaattttattaccaggctttccttctcaccccttttttctgactttgccaagtaatttgttgacacgaaaattttggaggaaccaattgaaaacacacttccagtctagatgatgctttgtgtgatacattaagttcttattttggattaaaagaagttttccatttgatacctctctaaattaaataaattatagaatgtagttgggtggattttggggtggccatatagtaatggaaagctgcaataattagttttaatacagcttgaatatttgctatatagaaatatagtatggaaagtttttggtcttaatgtagctactgtgcgggtcacagtttctcccaatgattatgactgggacattctttggtagataccatttgctactagtttattttgtggctagaaagtcagttttgtgtgtttttttttttttttatttgaagtgccaaattaactttagtcagaatgtgagcagatggctaagttctctcctccccagaatggattaacagctgcgtggaaagtgggggagagagtggatggagacttttagagatgttaaaactgcagtagaatgaaatgagtcagggagcttcagttagaaaataaagttgaggcagtttttgtgaagataatatggttagggctggagtgcactagtctttttgcttattcattttgcatggttttaaaattaaaaataattccgaagatacaccagctcacaaatgaaaacgtcagcctctgccccaccctccctcctgcccaaagtgaatttggtactcagaaaagaactgtttatacc

SEQ ID NO: 6515 - DNA, 1192 bp, Homo sapiens
gccaatgaacacatggtgaaattgaacctgtgctcttggctaattagtatcttgtcctaaacaaagagctccctggtcctgagtggagaatatctggttgcttacctctgacagctcctactgactgagggcgtaggtgtgcaagacacacacagcagcctcttagtttggaaggaacttgagagattttctatccagcttcccacttcaaaacaaatagggtttttcctaatcctcagatggatgttgagatggaaggaatactcttttggcatgaggaaatgcgattgctagtaggctctagactagtgtaactttttgtttgcaattccaaaatgaaggaataggttgagtcagacattcccactttccctctccttgttcttcctatagcctggcagctgcctcccgtgggtgggttctgtgctgtgtactttcctgaacagtgtgtctctcctttaggtgaagagaaggactataccatatggctggcacactccacagaccctgaagattatgaagatggctgcattttgggctacaaagaacagtttctgcggctacgcaagtcatccgtgtgtcagaatggtcgagactatgttgtgaccaagcagccctccatctgcctctgttccctggaggactttctctggtatcagcattcctcagatttctctgtctccctttccctgttggaggaggtgaaagacagttttcttatagggctaacaaatattgaaatccagccgggtgcggtggctcacacctgtaatcccagcactttgggatgccaaggcaggcagatcacttgaggccgggagttcgagaccagcctggtcaacatggtgaaaccctatctctacaaaaaacaaacaaacaaaaaaaaattagcagggcatggtggcgcacgcctataatcccaagctgctcaggtggctgagacacaagaatcacttgaacctgggaggcagaggttgcagtgagctgagatcatgccattgcactccagcctgggggacagagcaagactcttgtcccaaaaaaaactgaaaccctttcccccaagagtggagaactgctgcttcttatcaaggaagctgaggcacagagaaaggaaaccagaattgttaataatgaaacagatagcacgtattagacagttaattattgggcagaaccagcaacaaacccg

SEQ ID NO: 6516 - DNA, 9023 bp, Homo sapiens
catgtggaagaaattaggtacaaaacagggtaaatttgaattttctaaaccattgggctacctcttagatcatttgggcattattgttcattggatattaccaataatattatcttctaaattaaaagaggaattcaaatgtacacaagactagtctatccctttccccttcttcaaagattactttggttggtgactttattgtggctcacaataaggtttgggggttttttttcctgaaaaaatgtattctacttatttgccatttacttgagttctggagatacttgtaatgcaccatactaagtaagatgtttgacatacttgctaaatacttttttcagtgagataaagggaaaatctttgaaggaaggacggattgtgcataattaataggcatcttcttgccttctttgtttcaagtctatgactttgaaagaagccatcaagtcttcactcatcatcctcaaacaagtaatggaggagaagctgaatgcaacaaacattgaggtactttctgttttattgttggatttttttcggttttttttttaagagatgaggtctggctatattgcctagactggtcttgaactcatgagttcaagtagtcctcccaccccagcctctcgagtagctgggactacaggtgcacacaccatgcctggttaatgttttttaatttttttagagatggggtcttgctgtgttgcccagactggtcttaaactcctggcctcaggcaattctcctgcctcagcctactgagtacctgggactataggtgagagccactgcacctggctgttttattgttttttattcagatatcatagctggcattgctgaagactacatagatcatggaaatgacatttttgtatgtttagttcctaagaaattattaacagcctttgaataataagcagcttcagtaaagtggtgctggcagaagccagaattcagtgagttaaagaatgaggcctggcgaggtggctcacgcctgtaatcccagcactttgggaggccaaggcaggcagatcacttgaagccaggagttcgagaccagtctggccagcatggcaaaaccccgactctaccaaaaatacaaatactagccaggtgtggcggcacgcacctgtagttccagctactcgggaggctgaggcatcagaattgattgaacccaggatttggaagttgcagtgagctgagattgtgatactgcgctccaacctgggcgatagagcgagactctgtctcaaaaataaaataaaaagaatgaaagggagatgatgagtggagaaaacaatagtatgctgctttctcaagaagtttgattagtgtcagcagaagatagcattaaagaaaaggattgtgtcttttttaggatgtggaaaagtcttgaaaatataaacggagatgaaactagtgtatagaaaaatgttgaaagagttgggcgcagtggcctgtaatcccagcactttgggaggctgagacaggtggatcgcttgagggcaggagttcaagaccagcctgcccaacatggtgaaaccccatctctactaaaaatacaaaaattagccaggcgtggtggtggacgcctgtaatcccagctacttgggaagctgaggcatgagaatcacttgaacccgggaggtggaggttacagtgagccgagattgcaccactgcactccagcctgggcgacagaacgagactccgtcccgaaaaaaaaaaaagctgaaagaaataaaaggagaggttaggatagtgatggaaaagttatagaagaggtaaggcatggtacacatgaaggagttggttttgaaaagtaaaattcattcagcatcatattgagtacccattatatagcaggtattatgctagatgcccagggttacagacacagaaaatccaattcctattcaagtagtatactgtgtagtgcagggaacatatagataataagaacctggggtgatacttctataatagcagtaaaaacagattcctgtgagtatgtataacttagactaaagcattagggaagcttcttggaagaggtgatgtctggaaaagggagcagaaaggtattccaggaagacgggacaacatgtgcaaagggttcaagatgtaaaaataatattgtgggtaaaggaaactttgaggttttgtctgactgctgaggtgtgggatgtatataagatggtgggggacggtaagggatgagactggagaggtatggaccagcttgggaatgtccttttttagtatgctaagagtagacaggagcaaaggaagtaatgacgagtaaagataggtgggtttggcggtaaacctggagagatgtcccacatttccccagatttttcctagtgattgtaaagtcatctgccgagggtaggtgaatgcaacagtaaaattgagaatgggaaatatttggaaaagttgttatgagaagacagggaagagtaaaaggattgctgggccatattaaaatcgtagttgaggccagtaatcccagcactttgggaggccaaggcaggaagatcacgtgaggccagaagttcgagactagcctggccaacatagtgaaaccccgtctctactaaaaaaatacaaaaaattagctgggtgtggtggtgcgtgcctgtaatctcagctattcgggaggctgaggcatgagaattgcttgaacctgggcagtagaggttgcagtgagctgagattgcactccagctgcactccatcctgggcaacagcacgaaactctgtctcaaaaaataaataaataaaatttaaaggccaaccaaggctgtaattatatatcagtaattaaaccaatcagtacttaccaggatatttgttgaccacactcatgagaaaatggatggttggattaatccatggtaggggattgactagttaagaacagaagattagagaggactggagagtattgttggtgaatgtctcacccatagaaccagctttcataggctgctgtgaaaggtcagtctaagaaggactgacatttgggagccactgcgctagagcccatctgctttaagttcttagtccattagttgttccttggagctccagcctccctacatgaactgcttcccctaagaaaaggaaaatatccggccaggcgtggtggctcatgcctgtaatctcagcactttgggaggccgaggctggcggatcacgaggtcaggagattgagaccatcctggctaacagggtgaaaccccttctctactaaaaatacaaaaaaaattagccgggtatggtggcgggcgcctatagtcccagctactccagaggctgaggcaggagaagtgtgaacccgtgaggcggagcttgcagtgagccgagatcatgccgcgccactgcactccagcctgggcgacagagcgagactgtctcaaaatatatatatatatccaagttacatcttacatctttctttttaagaaaatctttatatgtacctccttctgtcgagtgtccttactttcaatgaacttttttgagatataatttatatacagtaaaatgtacctattttaagtttacaattcagcggatgttgacaaatgtacaacccccagtatctgtcaccccagtcattatattgatcctcccaaaaagttctctcatgtccctttgtagtctcttcccccacattgatctactttttgtcactatagatttgttttgtgttctagaatttcatataaatgtttttgtttgtttttttaagagatgaggtctggctgtattgcctagactggtcttgaactcatgagctcaagtagtcctcccaccccagcctctcgagtagctgggactacaggtgcacacaccatgcctggctaatgttttttaatttttttagagatggggtcttgctgtgttgcccagactggtcttaaactcctggcctcaggcagttctcctgcctcagcctcctgagtaattgggactataggtgattatagggactatacttctttcacttggcatgattttgagattcacctgtgttgcatcaattctgttacatttcattgctgagtgctatctcatccatcctattttttcacctttattgccaagtctcctccaaacagaacctgtattatctccactgcttcacctctcatttactcctcaatcactactatttgtttcagcttttattatttccatgagactgctccttgctaagataactcttatttgtcagatttcatggtcactctttggaactatcatttgacttttttgaaggattcacctcagatttgacagttctaaaattaaaatcattatctttcctaaaaaccatttcatcttcccatatttctaatcttggttgatgacacccccagggtacttgtcattcacacgagaaacctggaagactttgactttccttcccttttactcagtcatttctttgctcccttataaataactcccaaatccatgtcccttctccatccctacttccagtgccgccttttgttcaggttcccatttttcccctaccttgtatattttcagaggcttcctaattaatcttgccctcctccatttcagtccattttttcctcattgtgctactatagtggattttctaagctatatctaatcttaatggttctccacttaaaaaatattttctggctggacatgtggctcacacctgtaatcccagcactttggtaagccaagatgggtggatcacttgaggccaggagttcaagaccagccaggccaatatggtgaaacccctgtctctaataaaaatacaagaaattagctaagcacggtgacatgtgcctgtaatcccaggtacttgggaggctgaggcatgagaattgcttgaacccaggaggcggaggttgcagtgagctggaatcacgccactgcactccagagcgagactctgtctcaaaaaaaaaaaaaaaaaaaaccttttctgacttctattgtctgtgagataaattccaaaattcttttcatggcataattcactacttcttaagtcatttgtttaatctattagagactttgctaagcattttacatgcaattacatctcttaatcttcacaacacttctatgagatagatattcctattccgaaaatcttattttacagaagaggaaactggctttgagacggtagggccaacaggtaaatggtagagtcaggatttgaatccaggtctggtcttaggtcttatacttttaaccactttaacgtactgtctcccatgagctctgaccccctactccctctccttttcacgtcatattccatgtgcaagctgtggtctagccatacagaattactttcagttttgcaaatatgtcgtgttcttttgtggttctgtgcatttgcacattgtttgcccttcctgtctttgactgtctgacccattcttgccatgctttaatacacaactcaaaagttgcttctccctgaagccttcctgggctcctccagatcactcttaaacatattcttagttctattacaacacttacctgacattgaacacatttggcatctagcacttagtaaataaagactttcttcatctttggatccttagtcacaagtacatgtaactaatacacaggtgcttagtaattaattattggtgaaataaattgaaagaaaatatctgttctacctgcctcatagagatgttttttgaaagtgagataataaatagaaaagtatctttcatattatgcaaatacatttattattatgcaaatgtaagggattatttttacttatctagtgatgagcaacttcctgaaggcagtccttggctcagacgctattattaatagtattgatttgcgttccagttcttctgtaggactgttccactcagagttttcccagtttctgctttttagcccctgtaatgttttgagaaggctagcctgagtcatgagtgaaattctttaggccctcactctttagattattgctcttatatttctctgtcctcatgtcattgatcatcaagtaaagatatatcttaagagaagcagtagtaacatttttatttatttatttatttatttatttgagacaggatctcactttgttgcctgggctaagtgcagtggtgcgatctcagctcactgcaacctccacatcccatgttcgagcaattcttgtgcctcagctgggcctacaggcgtgtgccaccatgcccgactaattattgtatttttagtagagacagggttttgccatgttcaccaggctggtctcgaactcctgacctcaagtgatctgcctgccccagcctcccaaagtgccataattgaaggaattacaggctaccacgcctggccaagagaagcagtaataatatttgtatgtttaaatatccttggaatggaactcatggtctacatggtaaactaattgtttacctatattttgcagatatatttgggacttttctgacatttcatgtaattagagatatatcttttaggagaatctagaggagactacaagctttgagaggagaactttttttttaagtctgttcccagatatcagatgtcttaagacttgcagcagtctttctgaattttacttatagatgaggcagaggatactaaacatcatataactggattatgctgattctctctagcaactttcaagttacattaaatattagtactgaaaattactttaaaatgccctactatatttaattttaaaaaattattattaattaatttattgttttagacagagcctctttctgtcacccaggctggagtgcagtgggatgatcacaactcactgcagccacaacctcccagggttaagcaattctcccacctcagcctcctgagtacgtgggacacaggcgtttgctacaccccctgctagtttttggggttttttttttttggtagacacggggtctccctgtgttgtccaggctggtttttgactctcgggctcaagtgatcctcccgcctcagtctcccaaagtgctggggttacaagcatgagctactgtttccagccatgtgtttaattttaaaaattgaagaaaaaagacactatgaggaaatgacatgtaaaacacaaatcttttgaggcaaatgtgaagtggcacctattgctcagtattgcccaaaactgtgggacatgatcaacagagagaatggaaaacctagtcatgatagttaaatttgaaattaaccatcttctgaccctagttttttattgttgttgttgcttttaaatgtaaatataatctggatttccagttattactgatatcttcagcagtcacaactggtttcctatgccagtgttaatgaaatcttttcttggccagttcttttaaaaaaacgtaacaggccaggtgcagtagctcacatctgtaatcctagcactttgggaagctgaggtgggcagatcacctgaggttgggagttcgagaccagcctgaccaacatggagaatcgccgtctctactaaaaatacaaaattagccgggtgtggtggcgcatgtctgtaatcccagctactcgagaggctgaggcaggagaatcgcttgaacccgggaggcggaggttgcggtgagcctagatcacgccattgcactccagcctgaacaacaagagcgaaactccatctcaaaacaaaaccaaaaacaaacaaaaaaaacttttttgttaagttttgccacataaacaattttagagaaaatacctgacaatagttaatgattatttgttgtaggcaataatggtctaagcactttatatatattaacatttaatcctcacaactactctatgaattagctattcttattgtcctcattgtacagatgaagaaatagaggcacagagtggccaagtaacctcaagtcacacacacaagctcaacttttaagtatttaaatatacttcaaatatatttctaaaggagtctttaacagaaaaaagtactgactccatgtactttgctgctgcttttgtgatccctgttgaagtgacttcaagaagtgacaatgatgccaggcatttggttaagtatgatgtggtgagttaaccttaaaatagaaaatttggtcaataagcatttttattttggagccagagagctattttagggacctgctgcctggaaaggatatccttgggacagcagatcccttagttcctaatgaatagctgcatcaccaacacagcttctcctgaccatggtagggccatcagcagggtaactcagcccagcttattaacccttctgttttctttccagctagccacagtgcagcctggccagaatttccacatgttcacaaaggaagaacttgaagaggttatcaaggacatttaaggaatcctgatcctcagaacttctctgggacaatttcagttctaataatgtccttaaattttatttccagctcctgttccttggaaaatctccattgtatgtgcattttttaaatgatgtctgtacataaaggcagttctgaaataaagaaaattttaaaatatttgttaatagactgttctcttctaatagtcttttttttttttttttttttaagagatgaggtctcactatattgcccaggctggtttcaaactcctgggttcaagtgatcttcccgcctctgcctcctgaagtgctaggattataggcgagagccactgtgcccagccattgtaatacagtcttttgtttgaaatgcaaatgttagtgggccaaaaggacagtgttattaatatccctattctatgaagatgtctgttctaaaactgttttagtgatgctctataacagaatcaactatatccattaatcccatggtgttgataaatgaactagtccagctcttcccagtggttaatagatgttaacagcactgtaaatccatttcggccctataatttctggagcaaacgtgtatttttgctgcttttcttat

SEQ ID NO: 6517 - DNA, 1175 bp, Homo sapiens
gttagtgttgtggatgtccttggtcttctgaagattcaggtcctcctctccgggtagcttagaagtaaggaggttggtttgattcaatagtatggggacagaatggggacagcaagggcagaagtgtcctctccacgtaactcattatgcccctcctgggggagattgcatctccaggacaagcatctaaaggaggcccctgctgtgcagaggggtattgttcctgtctctttcattgtcctccctcctctcaaactctccagtgtggtgtgaactcagaagaaacggttactggggctgcatggagaatttcacctgcggtgattttgatccagggactgcatctcctctttcctcatcacagccagtgctgagaggctccttctacctgccgcagggtaggagggccaggcaaagttcaccagcttgctctaagagcaagcaggcaatgccgtaaagcctgagcctgcctgaggtgctgcctcctcccaggtggtgcgggggctggtgggcgggcgggcaggcgtgctgacagccggcagtttgcgtgggctgtgccatctgatgtctattcccagccctgggaggaagggggagtcatttatattctgcaggaggaaggggccccagctgtcgcctttctgaccagcaggcctggagggcaggggcacagagcagagaggagggcactggtggtctcctgcttagcctggtctgactgcagtgtagggaataggtcaccaggaggagcccttcatcctggcaggccggattgtggagggacttccctccccctcttttccatttctccctccatcaccacctgccctcacatcctggggcagcagctggacagccattagacctcagtgccagggcactcttcctccagctgggatctcagtggctcccagctgcatgggctcctgcttgtgtgttccctcctccgccatcctctgttccccgcacctcccttattctgctcatgtctggggtattcacttggctcctcagcaaggaagcaaacgccttggaggagaagcacatggttgcccttttgtccttgctccctggctagggaaagctgctagtggtcagcctgttttgcctttttttaaaaaaaaaaaaaaagccagggcagggtgcttagattttaaaaatttgcgtgtcatttg

SEQ ID NO: 6518 - DNA, 2821 bp, Homo sapiens
ctccataagtaaatggtaatggtctgacttagttgagttcaggcagctgttacaatttgaactgagagtactgggtgtccgttttaggttccaatacatatgaagaggcagctgcctatattcaatgccagtttgaagatctgaacagaagaaaagataccaaggagatctatactcacttcacctgtgccacagacacgaagaatgtgcagtttgtttttgatgctgttacagatgtcatcattaaaaacaacttaaaggaatgtggactttattgagaagcatggatgttagtgaaaggtaaagtttcatacaaggtagttatagtgctacagtgatgtctcttggtttttaaactttttctaattaagaatattcttctcttctagttactacagtgtggagtgttgagaccagacaccttttgctgtctcatggggcagctacaagcatgaacgggaccagggaatggcagcagcatgcagaatcttagcactctttagcacaatattttgtattagggaacttttaattgacatgagatgctaaagtcagacattggaattggaagaactataaagtgtgattcgatcgtcaagacatcacttggatttcttaatcttaaatgcttatggaagatgtgaagttgaggtgctgcattctagaacttcaatatgtagcttactctttttttccccccttcttaaaccaccagtggttcatttttaaggttttttcatcaagagaagaataactttactaaattttatttctttatttgcaaaagaatctttattaaaacaaacaatcttaactatgcacatgatgtgaccagatcatcttgaaaatattcctctttagtaggaactctttgtttttaactcttggtatggtcagaatataatacttccataattacttataattctttccggttactggggctataaatacaactttttaaatgaaatttatgttattatcctgctcaaagtaccattatggtttccatatggtaattacattggaaagttctgcaataagattctagttctctcttttctttaagcttatggttgaaggttaaccttgtttgtgcagattaccaaattactgctgatgtagtatgataaagtcagcttcttggatacagacacacccagggcagctgccaatcagaaatgcaaattgctaaattccaaacagaaccagtgactttgctgctacatatttactaaattgaccactttgattcttgcttgtttgtctcagttatagggagttttgtacatggtgcctcttgttttccatcttcatggccttttctgttgagaaacatctaaagtgtattaacagtgcatgcttttactttgtaaatgtggtgccaaatccctgtttgccatcgtttttactgtaccgatgttaactgtagtaatccttagccagtatgttcttttgctgaaactgttgcattttgggacttttttccactttgtcatgtgtacatttttaatctgttatagttggcggcagtattaaaatggtgagtaaagagcccaggtttgctcctgtttgtaactagtcttttctggaaatactgtcttctgtttccttttgcctttgcagaatgtgctttagcctttgtctgagaatgggtttaggtagaagggtttcctgaaagtctagtcttttggtgtaatagtattgttgaaccttaggttttatgttatatctgcatatgagtgatatgtgatcatgattcattttgcagatttacattttgcttgtgtggaaagttacgttcacttcaacctacagacccttttgtataatgtacagcaaatgtcattaaatattgaatgctctattgggggaagacaaatgaagagaatgcattttgagcatttcaaatcagtagtttgggcagtgccttttggggtccaatctttttggattggattctatttcatcttttgatgtgacttttcactagtttacaaaaaaaaggttggtggtcaacaaaaaaagcaagtcatagcagttcagtgcctttgttggtagtttttaactttttttgtgattctttttggaaaatcatagcttacagatggtataactgtattatataatggaattttctttaggtgtgggaaaacttgatctgaaagaaaattatcagcttcaattggcgattgattcagtgcccacaatgtaaacagggttggtagttgttactcattttgaatataccttttccttattgtattctgtaatataggatcctggaaatgagacctggtggaatattattttcaactgtagtctttctatactgtggactaatgaaatggtgttgttgataatctaaaataaccaataatccaaaaaagttcattttactttgaatttgtattttcatttgaatatctatctgatatgttaaatttttagcccttctgttaaagaaaaatagcaggtccccatttttctgcctctgtaccatttacatttgctctctgtttgttaacatgaagatcactcttatttcaccatcccaaataacttatctaaatgcacattccttgaggacacagggagacaatttaagtcagtagtttttaatatgacttaagtaaaaatcacttggacccatctaagggattgacttttggctggtgggctggcaatcgattttttttttttttttttttttttgagacggagtctcgctctgtcgcccaggctggagtgcagtggcgcgatctcggcttattgcaagctctgcctcccgggttcatgctattctcctgctgggactacc

SEQ ID NO: 6519 - DNA, 1199 bp, Homo sapiens
tcagctcctgcgatatgtgtgagctggcccgcaacagcgtgctcatgagcggcttctcgcacaaggtactacagcgcctgcctggaccttggcatggcatcactcctcccctcctctgcatttggggtcctgacctgtccctgggatggcttggggtggggcatgacccctcagcactggctgcagccctgcccattacccccgctccttgcaggtaaagagccactggctgggacccaactataccaaggaaggccctgaggggaatgacatccgccggaccaatgtgccagacatccgcgtgggctaccgctacgagaccctgtgccaggagctggcgctcatcacgcaggcagtccagagtgagatgctggagaccattccagaggaggcgggtatcaccatgagcccagggcctcaatgagcctggtccatgaagtgcccaccacatcgcagcacttttaccacgttttgtcctcagaccccgcccatgctgtgtggtctctgcatgtctccattcttctctgtctctgtcttgcatgtctcctaccatgtcactgtccctgggccacccagtgaaagcaaagcctgggaatctgctcattgttgtttgggctcaggtattgagcctgatggcccaggtattgagggcctcccctgctggtggccctgtcctgggatcctcagaagcctgactgtcctatgggcttctccagtgtccacaggggcttgggatggttgtggggggctggcccctctagcctttccggtccttcctgggcaaatctaagccttggccagggccgaagtttaggcccctgtcttgttcatgtagccgaggggcaggcgggggacctctacacctctgctgtgggcacggggctgctgagggtctgtggaactccagcagctctgcactgggtagagctgggcctagagctcagtcacaggcctgggcttcctggcctgagtgggtagacgcaggcggcagaggtgctggaccacatctccgccaagtcactgcccagcagccttctccgtcctgtccccagcccacgtgctccttgggtgtcagcttcctgtgcctctgtgggagagggcagctgccttgtgttatgtctggggccacagttgctgcaaagtcctggatctgccactcaaccccgggagtggtgttcccagtgtggctcccagagctt

SEQ ID NO: 6520 - DNA, 1205 bp, Homo sapiens
tgctcatatctggtccagagcctaccaggtgctcaggtgctcctggggctgacccagaggttgttgggaggtcagtggggacagatttagggacagtgtcacattccgctctgccatcccatcacctcagaaagactccagctacccagttggagtctaataaatgctgatgtatccagctgaagcctggacagtgacccagttccagctgtggggaagatgactgcttgcccgcggccagctggggccatgcacaaaactgggaggccgcatctgtgcagggagcttgtgtctgagggtgttgacagctgttttctgcctcaggagaaactgaaaccagaatacctgcaggcactccctgaaatgctgaagctctactcacagtttctggggaagcagccatggtttcttggggacaaggtaatgggggcgtgtgatggggacaccacagatttgtcatacttcctatattatggaggtttcagcccacatatccttggccttatccagatcacctttgtggatttcatcgcttatgatgtccttgagagaaaccaagtatttgagcccagctgcctggatgccttcccaaacctgaaggacttcatctcccgatttgaggtgatgcccccagcctcctttctctttatgtctcttattcctttccctcctttgtgatgctttcccagtcctggagctacacaaagaataactcacatttttggccatgtgcggtggctcacgcctgtaatctcagcgctttggaggctgagggaggcagatcacctgtggttaggagtttgatacctgcctgcccaacatggcaaaaccccatctttactaaaaaaaaatacaaaaattagctgggcgtggtggcgagcacctgtaatcccagctacttgggaggctgaggcaggagaatcacttgaacctgggaggtggaagttgcagtgagccaagatcgtgccactgcattccagcctgtatgacagagtgtgactccatctcaagaaaaaaaaaaaaaaaaaaaaaaggagccgggcatggtggctcacacttgtaatcccagcattttgggaggccgagttgggtggatcacctgaggtcgggagttcgagaccagcctgaccaacatggtgagacccctgtctctactaaaaatacaaaattagctgggcgtggtggcacatgcctataatcccagc

SEQ ID NO: 6521 - DNA, 1392 bp, Homo sapiens
tagaaagttccttctaatggggtgacagaagaaaacaatgaacattgactagtttccagggagatgagaagttcaagttgaaaggaaggagggagaggaataaaggccctctggctgcctctgagctgtctgttatgaaaatgcgcagatcccggtgcatgtcaatgacagcacttggaaaactttgaggagaagatgcaatttgagggtgccattacattccttggtcttgtacttgagtctgtatattctaggagcaggtaggtgatataaatcaactgacagaaatgacccatgacagaggccagaggccagaggagatgaaggagattctgaacacaaattttaccatctaggaattgaatttccaccgtgggatgcctggatcgtgtcctaagattggtgggaattgcctctgcttttgttgacatgacattggagtcgtgagaataactgctgatagtatgggaaagcacttggaggatgagtggtaccaaggacttaagaaaagaccagtgcgtgcaggaatgcaagagtcctggccccaaatccaaactctgccaggtgcagctcactggggagactcacaaactctgggtggtagcagatcatgaccagttgcatccagttgtccgtggtctggttctccaaaatgtccacaagaatcttcagaagaggagaagattcgtgtggacattttggagaaccaggttatagacgtctccagtcagctggccggagtctgctacagacctgactttggaagtccctccctggtctgggccaaaaggcagggaaatgggtgactgggagtggggtgtgggactcacaaaatctgggtcatagcacagtctgaccagctccatgtggttatccataacctggttctccaaaatgtccacacgaatcttctcctcttctgtctccccacctgccacccacaaaacacagactcaatctcagcatcacagcccagccaaggaggaggtcaccttccccccgcacattgcagccacccacactcacacaggttgtgcttgcgggcaatgtagcgcaggatggcattgctctgggtgatcttgtgagccccatcaatcaagtagggcagctggatagatgggaaaccggggaagctcagttgggccaccaggctccccagcatccccttcccatatgcaagggcagagaggagaccagggcctgctcatggcaggcctgagatagaaatactgtcacactaataaatgagctgggacacagaacatcatgcaagggctgtgtagacagccaagagtgagaggaattgggcagaagactcctgatcttaacacctctaaggtggggagaggagatgcagtcagagacacgtcgcactttcccccaaaaccgccc

SEQ ID NO: 6522 - DNA, 1099 bp, Homo sapiens
tctcttacctttccagggtcgtctactcaatttgagctgctccacagttcccacctttgttctgtccatcacagccacaacacaggtatgtggcaaaatgcctgcttacactgcactgcaatttgtggaactgggcgtagatcagttccagtgagggtgtactgtactatgttctcatcatcctattcttttttgatgtaataaattgtggaaacaggtattcttaagtatagaaaagagtcactaagtcagtattcgttgaattggctgttttagttgagaatataatgttccagcttagttttatttgatttgttctttcgttaggaactaaacaaaaacaacaaatcctcttaggatgtgtgctgccctttagtataggcaaagtcctaggtactgtgactgtggtagatcactgtagtacttacccaaatgctgtttaacctggttttatttttatgtgcctgtctaagaaatatttttgtgctttctggccttcttttcccaccttaggctttggcactgatagaactctataatgcacccgaggggcgatacaagcaggatgtgtacttgcttcctaagaaaatgggtgagtgaaaaacagtggaaatctatgcagacagctgcatagtttggtaaaatgactgccatgaaaggcattggatttagagtcagagttccaattcctgttcctgtgcttactggttgtttgacctcaggacaagttctaatctctatgatcctcagtttcttgattggtaaaatgaaaataatactacatacattgtagaattgtgtgagaatcacagctaatgagtaacagtgcttaacacaatggtttagggagatgttcttactctaagtagccttatgaagttcagtaaacttcccagtgcagctgagtacatacagccttggaacaaaatgagagaaacaaacacaggttttattgtccattttctgtgaggatatgcaaaccatccaatctcttgtaagcaacccatgctgtgttcatgtgacataatacatcatctctagtcctttgcctttctgcacggtgtacccatctcccatatctccttggctagcccaaatc

SEQ ID NO: 6523 - DNA, 2729 bp, Homo sapiens
gtcagggttgaaaaaacactgactcattcctgggaacaggcggtaacaccagaaatggcattgtcagagaccctgtggaagaataagggagactggtgccctggggaatgactgcagggatcccacccaggctggggaggggccctggagaaggtgctctgtttccgattgttttttggaattctcatatggaagacataagtgttaaccaatcactctctctctttacagatactaatggaccatactaccaaggaccagtccacctgaaccacacactctaaagaaatattttttaagataacttttattttcttcttactcctttcctcttgatttttttcctataatttcattcttgttttttcatctcattatccaagttctgcagaccacacaggaacttgcttcatggctctttagatgaaatagaagttcagggttcctcactctagtcactaaagaaggattttactctcccagcccagaaaggtgattctttctttaccatttctggggactttagtcttaattaggtaccttattaacaggaaatgctaaggtaccttctctgtggaacaatctgcaatgtctaaatcgccttaaaagagcccatttcttagctgctgaaatcagtgctctttcacttcttcagagaagcagggatggtacctacccggcaggtaggttagatgtgggtggtgcatgttaatttcccttagaagttccaagccctgtttcctgcgtaaaggtggtatgtccagttcagagatgtgtataatgagcatggcttgttaagatcaggaggcccacttggatttatagtatagcccttcctccactcccaccagacttgctcatttttcgagtttttaactagactacactctattgagtttaattttgtcctctaggatttatttctgttgtccaaaaaaaaaaaaaaagaaaagaaaaattaaggagaatttttggtgttaatgctgaggaattgcttgagtggttagttgttaccaatttctcttttgaacctttggagctaaggatgctgagtctagagaaatgctagtctcaagccctgttaagtccctctgtttctagcccgtagttcatagcatcagtgaactggagccacaacagcaaattctatcagctgtgtaccatacagcttgtgctgaaggcgaatttcttgagccattactcagtataaagcactgagttctatctttaggatttatctttaagagcaaatttctggtcagctgtgcttctgcaacctaaaatatttaaagggaggtaggtgtgggcaggaggaggaatgataaattgggccagggcaagaaaaatctagcttcatataatttgtctgggactatacaccctatataatgttagttttacagaagtaatatgacttttgattgctacataccacaaagagtttatgaactgagatcataaagggcaactgatgtgtgaagaaagtagtcagtacatcctggctcatgctctgaaagaatatccagagaggctctctcaaagatcagggagatgtattcccatgccatgcaccctgcttcccagcatttctgcatggtcaagtgagctttatgctcatgagctttaagtatataattatccaggattttaaatcctcaacttgttctagcttgtgatccctcaaagttgggtcatacgttagtgctagatactagaaattttcacttttccactgatcagagagacagacattaaaaacaaaaatagaagaaaggaaagctttcaccctgcagcttcttagcagggaacaattgtcttgccaaaacttttttcccttttctctcccattttcttttacccaatcccttcttactccttgccagtgtgaccatgctttcttctctgtagatgttaacagttaaggcctattttcctcgggcacttaaccaaccaatcagaacaccacatctgttaggggaggtaacctggccaacagtgtatccatcacgttagccctgctggagggaagggacccacattcacctgccctctgacctgccccttgatcccatatctattaccgtgtccataggaataataggtaagggctctgtctctgtcaagccatgtaacaaaggacactgttaaaaaaaaaaaaaagtctggcatcagagggagcatgtggagagcaacttgggaagaacaagttcattttgtattgaatgatttttaatgaatgcaatattaatccttgcagatgagcaataatcattaaaatcgattaaaatgataagaccttattggcagtccgtatgtgtcattctttgttaaacagcaaaacttcattagaacctgttttctagggtgtgacaagttataggtcagtagcatttaatagagatttgttgagggcctaatatatagaggctggatacaggattcttcaaagtaatacctgaagttttgtatgcctgctctgtgccaagcaccgggcctgggtactttcactcctaacttccttcaggaagcagacttgctgcttaagcctcagggttcctcatttgcatagtccttctaagacctaatttctgaagaatgcccccaaagttatgtaagcttcagcctcctcccacacctgtatccatttctgaagtggtctcagtgtcttttttttttttttttctctttatttttttgagacaaggtctcactgtcacccaggttggagt

SEQ ID NO: 6524 - DNA, 1196 bp, Homo sapiens
gtttgatcgctttggagtcatcacagaagtagatatcaagaggccttctcgcggccagactagtacttacggctttctcaaatttgagaacttagatatgtctcaccgggccaaattagcaatgtctggcaaaattataattcggaatcctatcaaaattggttatggtaaagctacacccaccacccgcctctgggtgggaggcctgggaccttgggttcctcttgctgccctggcacgagaatttgatcgatttggcaccatacgcaccatagactaccgaaaaggtgatagttgggcatatatccagtatgaaagcctggatgcagcgcatgctgcctggacccatatgcggggcttcccacttggtggcccagatcgacgccttagagtagactttgccgacaccgaacatcgttaccagcagcagtatctgcagcctctgcccttgactcattatgagctggtgacagatgcttttggacatcgggcaccagaccctttgaggggtgctcgggataggacaccacccttactatacagagatcgtgatagggacctttatcctgactctgattgggtgccacccccacccccagtccgagaacgcagcactcggactgcagctacttctgtgcctgcttacgagccactggatagcctagatcgcaggcgggatggttggtccttggaccgggacagaggtgatcgagatctgcccagcagcagagaccagcctaggaagcgaaggctgcctgaggagagtggaggacgtcatctggataggtctcctgagagtgaccgcccacgaaaacgtcactgcgctccttctcctgaccgcagtccagaattgagcagtagccgggatcgttacaacagcgacaatgatcgatcttcccgtcttctcttggaaaggccctctccaatcagagacagacgaggtagtttggagaagagccagggtgacaagcgagaccgtaaaaactctgcatcagctgaacgagataggaagcaccggacaactgctcccactgagggaaaaagccctctgaaaaaagaagaccgctctgatgggagtgcacctagcaccagcactgcttcctccaagctgaagtccccgtcccagaaacaggatggggggacagcccctgtggcatcagcctctcccaaactctgtttggcctggcagggcatgc

SEQ ID NO: 6525 - DNA, 2624 bp, Homo sapiens
aaatgtatgtattataaaaaactaattatgtttagttggtcattacctacagagtgccatagtccacatgaacctcatatttgtactgcccattcttttgtgcaggttcataatatccataaagtatctagttaaaccttaagaattcaaatgaaagcaaaagtctaaaaccggttctacttctcattagccaggatttaataatcccaacgttgaatgttctttgtaacaaccaatttttttctatctttcttctttaattattttaatgtagttgatttttctggaactcagttaaaatgaatggaaagaaaacttcaggatatcatttaatgactattaagtattattggtaaaaacgtgaagataagacttttagatcacagcttcaaattttatggaaaattaagcaagcaatacctagccaatagttctgcttaactttttggttaagtattttgttgggattcctataaataatttttcacacaaagttttaaatttctggtgtactttgactctcaactgagagtggatagagtttttcttttgaggattacatcttaaaatgtccatcgcctggctggttataagcatttgtcaccttttgaaggtaaaatatactctggcccttcttgactcagttacaggtcattttaggtccagtaataagagtcaggtgtttggttattgctttcagagtcagacattgtttaggtttatttaaaaactattagcaggttttcactgacaatgcttttttaaaaataaaaaatgtaaatccacttttttaaggcagattgttcattatgcatatacagcttgaactatagtttgggtccatataggaaccaatcaccaaaaactctggtaacagaattaggaaatcctcttgagaagagggccttaatgaccttttatgtgaaaaaaattttggagagaatttctggacatttttttttctgtctctctcacagggtttggttttcagataggagttaggtatgagaacaagaagagagaaaacttggcgctgaccctgttatagtggttatagtggtgtccctaaagggaggaaatgatttcaggtaaccacagtgaaatgttaagctgaatgaagagttttatatgtatggtttaaacagagttgaaaagtgagattcctgaagtgttctttggctgtttaacaattatttgtatgagtgttttattaaaataacggctgctgtctttggtaacatagatgagggtggatttttaaatggctttgtatcgacccctttctacaataatggagtagtctatgttgctccatataaattacagaatgaaaatagatggggcaaaagtttgactaaactttacctttttatagtttcactttttaagttatatttagaatatattgatagattataaattgattgtgaaacttttttctgaattttttcaacatgttttactcagttacatgagttaaaggatattttcagtcctgttatcttcaattgcagtctttaaaaaaacccaccctattgttctacttgttatatgtctattcatacagtaaattcatttcaaggtttatgccagtgggtattattggtgctttttgaagttgaggtgaaccatccaggaaggtcttgttaatgttatgttcatctataatggcataggggaaatatatatatttttaatattgtaaacatttgtactgaataacctttttttccccccctccgcaagcaaaactggttgaacagcggatgaagatatggaattcaaagctctaatggacctttttgaagagaagttgtggcttatgtggagtttacatgggcctctgatggaagaaagctaatctgtttagtatttgtgcattttactaaaatggcagcttaaagttgtgtatctgctattgtgatgccaatgccggtgttttaagtggaaaaaaaatgacctctttgatttgtgctgtgtacacaagatttctggaaaagtaaagaaaaaccctttttatggctcacacagcttaagagtagctgtctctcaaacgtgcgctcacagttgagctgcttttgttttattctaaataaattgtttcttttgaggaaaatgtttttctgcctggaagtgaattgacggcaaacctttgacccctttgtttgcagccgagggggtgcttgctgctgctcagatcttgtatgtcttgagcaagaagcagggagaccatcaatttcattttgactatcacggtgtgtcaattctgaaggatcactagtgttactgttgaccccctttgtttgcagtgaaggggatcatttgcttctcggttctcaacgtgatgaggaaatggtgctgtttgctggcacgcaagaagccggggcaggcaccctaagcctcaccacagtgcctgagtcgggggcttttgctggtttgaagagctggagttgctgaaatttaagttttgatttattttgttcacccatcacgtttggccttagtttcatttttaatttgaagaaaagtttgaaattgctttatcttgcacttaacatttgcaccaaattgccaaaagaaggagaaatgctccgtttgctttttaaatgttaatgatgatgtta

SEQ ID NO: 6526 - DNA, 1158 bp, Homo sapiens
aggggaggaggaaagactgtgatttgatgtcatctcaggccctccctccacccacagtcactcagaaggtagaattttttgccgcaggctcaaaagcaagcatgaagtaaactaagtggaaagtccttttggcgactatgctcagggcagggggatggggctccagagctctcatacacttgtcttcaaatttcctcagggaacttctcacaacatgcttattttacaggagaatataaaactcctggatgggtggtgagagaggcatttcctgggccacaaacagaaatcttcagtaagctcaacccattcgtgtggccttttgtatattgactaaagattctggttactaatttggggtttcagaccccattttaattgcatttttgagatctgattacctcaaccacctcctgcaaaagacgtatgctcgtagtaattttaatgagattttttttattatattttggaaatggttaaggctgagacccctagaaaattactgggataattcaactttctcttcccatttcctccctctaccctccacataaaacaaaacaaaacaaacaagtcaaatgggaaattgtctttcgtctcccacaccaatattccagattttaaaccagagtatattttagacgaaaggatgtgtttttagttttatctggaaaatctgcacatatttatgcatgttcctttttaagaagcaagaggcttctcagattcttaaaatcaaactctataatactttttgattaaagtgcttgcagaaggacagcttagtggtttgggagggtgccctgtaagtgtaagcatggaaggattatgcagttacatgatgctggtggcaaggatcaaataaacattcaacagaaggagaaaacccaaagagagaaggcaaataaatgcttttcagagagctgtttgtaattatgaatacactctagacaacttttttttttttgagacagagtctcactctgtcgcccaggctggagtgcagtggtgcaatttcggttcactgcaacctctgcctcccgtgttcaagtgattctcctgcctcagtctcccaagtacctggtactacaggcgcataccaccacgcccagctaattttttgtattttagtagaaacggggtttcaccgtgttgccc

SEQ ID NO: 6527 - DNA, 1205 bp, Homo sapiens
tgtgtgtttagtagagacagggtttcaccctgttagccaggctggtctcgaactcctgacctcaggtgatctgcccgccttggcctcccagagtgctgagattacaggcatgagccaccgtgcccgaccagaaagcatggtttttgaaggaccatattttattgtaaaaaaatgttttggttcagatagatgtgtgctgatgggagtaattcacatctatcagtgaccaccaccaagatatttataaaccttatcaaatacagtaggaagagcaaccagcacaattttggataaatgtatatgttgcagtgaacaaagaagatagtttaaaataaaagatgaccacagaataattagaaatggtactgtcacatatggagtgatttgctacgtccttcacttgaggatagttctagtagagtgagtgcagagctgatgacaagttgaaatgagatcaatctatttgtttaaaaatatacaaatattttgcatttaatttcatcggttaaaatgtctaaacattagagtaaacccatttccctatctacatccttactctgaagtccactaatcaaacctactcttccacagctgttctctggtccaccaagggctatgaggctcaccccttggatggtgctcagaaccacaaggaatactgaagaagccttgcctatgatttcaggtggcatcagacattgggctaattttcaaggtgtctctccttcccaacaggacagtcggagtctggttctttaataaatagctatatggatcttacttactggttcacaatcatattacagcagcaaaaacacccaagctctaactgctctgggcctccagccatgtttcctccagatagcatgttagaaaggacaggagattttaaaaatcagattggacttcagagggctccaaattttcttgccacatctagacctgaaagtaaagagctctgattattaagaggcagattctcgttgcatttggacagcgtgagtaatggtcacactgaacacattagaatcagttgtgaaattgattttgtttcaaaaaaggataagcaagctgtagtctcaattttgagttaattgaaatttctcaagaacttcatcagcagctcacatgatacagttttggaagagtaaacaaggtaagcagacaaccctgggaccccaaacacattttcttttttagttctc

SEQ ID NO: 6528 - DNA, 1988 bp, Homo sapiens
tgctacagggtaaaaggcagcacctggaagacctgaattgtacttccctccttgccgtgatttgctgcctgttactgcccctcatcactgtcttgttctatccagcatttcttcatctatgaaaatagaagactggattggatgactgatgacatccactgtggatagctacactgctatcctggcgatgaggccatacagttggtgaaatgtgtgtaacacacccaaaaaatgtgccccagatgtgttgggttctctttttttctccaggtctgcttttcttgtctctactctgccccgactttttttctttcttctaggtttagaagccaagcccacagagactttgtgagagatgcgacttggtccccgctcaatcactccctgcttaccacagtgggctgggaccatcaggtcgtccaccacgttgtgcccacagaacctctcccagcccctggacctgcaagtgttactgagtagattggatttaagacaaaaagcaagtcccccatgagtgtccacttctttgccctgccctctcagcttgtgagacaacacaggagccttctatagtatgttgatatgctagatctgtgccgttaataggcatcgtctctcagcctgagggaggctggattctgggttcctgtagtcacagggaggaaaagctttcttaaaaatggacatgtatgtgcgtgtgagtgtgtgtgtagatttatagtttttggtagtggcaggaataaaaaaaatccatcctacatcttccctaagcactgcctctctctcaccccccaaaacaagttgacgaaagggttttatgtagctgtctatgaggaattggccgtgtctgggtgggttatgggatgtgggcatccctgggttcttggaagcagctcttatgctactcatagagatgggattgactttatttttttatagtgcttaattcaccattatgagaaatgcttccagtcacaaaaatgcagcccagctcactctgaggaagaagcaggacttggtacggttttacacaactccttaccattaaactgaatcagaaatccattttctggctgaataaaaagtttggcttgcctgtgtaatgcccactcccttccccctggctccctagtgatgggacatatatgagagagaagtgtttttctatcatagacaccataggggaaagtttggggatgaaggagagcttaaaggtgtttcaattaagttagaaaactgacacaggctgttgagaattctttgccacttttcccaccccaaaacagcatggggcctgacatcttctgccctggtcccctttctcttgatgtggaaagtctgaatgcagtatttatagacttctaaggttttaaaatccagtatcaagaagaaaatcagaaatactggttggtgaaataaagagtttaggcattgttggcctgtcttttttgaagcatgtgtgttatgtgtagttagatatatttcacttatgtgagtcatcatggtgttggtcttgtagcccattatttttcctgtgcttccccagcttcccaaagtagctagttagaacttaaggtaaatatttattcttgggttggtggagtggatattgccagttaggagtcatggatcaattactgattatattgaaagtaaatataatcaattatgtacttttgagctttgcaggttcaatttaggtaaaaatcacattatgaaactgggaaagtctgaaggaatatgggcaaaatatttctcagtaaagcttccatgcttcacccttgacatgattacccttgagtaaaacatgggaatttgtagttgtgtgatcctctggcgttgatgtggagtaggaataaagtcttgcatcatttttataatgtgggaggaaatagaatgggtaggtacaatcacttaagttctgcctctcgaagataaaactttaattttgtggacacttagagaaagtaaggggtgggggagcttga

SEQ ID NO: 6529 - DNA, 1148 bp, Homo sapiens
agacaacttttggcggattctctatacttaaccagtcactgtgcaagacgttcaattattcaacatatttttaaagactctgcaagacatttattcaactagttcagcaaatacttactagtgtccaaatattggggaagtgttaacatcactggatagtgtgctgcttaaacagttgtggaaacttcatccttgtccccttgcagctcattttccatattctctcactaaaagcagataatgaattttacagactgttccatctttgtctttttctggaagctttctgcacctacttgtctgggctgtcattaggaaaacagtaacgcagaataaagtcaaagactcagaaattagctgaactctccaatgatgtggactttgcttttacaggaataactaacttactttgttaatttagtgacaatggctctttgaatcctagaagtgaattactgccttggtataatccaagctcatgttttccttaccctacccccaacaggtgctgttgaattgtgggaactagatgagaatgagacacttattgtcagcaagttctgcaagtatgagcatgatgacattgtgtctacagtcagtgtcttgagctctggcacacaagctgtcagtggtagcaaagacatctggtgggtccctgttctcattgctcctgtctctaagcctcctgtgggtgcctttcctatcctgttaacctcattaggtaacattttgggcttattctaagaatccagtgacttattttagcatgtctataaggtttccttagggattttgcagtccatcgtaagtagaccatagcagcagtccaagaggcaaagacttggggaatgttgattacaggaagttcttgtttgaacacgtttttatgttgatagtgtaggtcaagattaaatgtctgtttgcttttgcttcttagcatcaaggtttgggaccttgctcagcaggtggtactgagttcataccgaggtgagtattctttcatttttagccctggtgttagctgttgtgtttttggactttttgaactttgctttgatgttaggagcagcaattccatgttctgatagttttcttgtaaaacaatagtcaggctccggtatctactccttgtccttttctcaatttcc

SEQ ID NO: 6530 - DNA, 1099 bp, Homo sapiens
tgacataaacacaaagacaaatctacaatgtatgcaccattatttgtagtaccaaaaaatgaattatagaataccagtatagtggaatccagtgtaacttaaaattgaggtaggtttgtgtgtcataattaataaaagtgatgtgtatatgcctatattttgatgggtatacctatatttttattaaatatttctgggagggaatacaagaaatacaggaagttaatggcctatgggggaggctgaaggagacttatttcatacagcatcacttttaaatatgtttttgccatatgctgttataatttctaggtacatattacctattaaataaaagaatttcacgtaaaatacaaaagaagtgggcattctcactggcagaatcttcagagtagaagtattccttcaagtatacaaacaatatttatcatttcttaattttgccccagaataacattgctatggctttggaagttacttaccgggaacgactgtatagagtatataaggaagtaaagaatcgcctggactatcatatatctgtgcagaacatgatgcgtcgaaaggaacaagaacacatgataaattgggtggagaagcacgtggtgcaaagcatctccacacagcaggtacacaacatttttgtaggttctgatgttgtactggtatctcttaacaagtatctgctgatgttttgttaaggtaggaatagctggcaaggagtctttagcctagaagtagcagtgtaaccccggtttgtttttctggatagtgataagcaggaagatgctgcatacctgtcaggatggcttttctctttccttaaatttgggtaacattaactgatatatttaatttctctataaaatagactgggctgggcacggtggctcacacctgtaatcccaacactttggaagggcgaggcaggaggatcacttgaggccaggagttcaagaccaacctgggcaacatagcgagatcctgtctctacaaaaaatttaaaaagtagctgggtgcggtgacaaacgcctgtagttcagctactcaggaggctgaggtgacaggatctcttgagcccaggaagcataggctgtag

SEQ ID NO: 6531 - DNA, 1271 bp, Homo sapiens
tcattcttaacatttatatattactaatatttgttgaattggtctttttcaagcaactgttggttgtacaagccaacatcagtggcagatggttacaggaatatctggcctcaaattctatacaggtttcacccataaaggctgtgagccagggaattttaactaaccccctggatttgcttaaaataaattatatctcctctgtgttaattaattttacttctaaacctgtctagtagctgtatagtgttaagccagtaatcatcttgaggttctggtctggtaggaggtgtcttttagaataatggtgtttatactctatacttttctatgttttggaaaggtctaaccagatttctctttccttatcacaggaaaaggagacaattgccaagtgcattgcggacctaaagctgctggcaaagaaggctcaagcacagccagttatgtaaatgtatctatcccaattgagacagctagaaacagttgactgactaaatggaaactagtctatttgacaaagtctttctgtgttggtgtctactgaagttatagtttacccttcctaaaaatgaaaagtttgtttcatatagtgagagaacgaaatctctatcggccagtcagatgtttctcatccttcttgctctgcctttgagttgttccgtgatcacttctgaataagcagtttgcctttataaaaacttgctgcctgactaaagattaacaggttatagtttaaatttgtaattaattctaccatcttgcaataaagtgacaattgaatgaaacagggtttttcaagttgtataattctctgaaatactcagcttttgtcatatgggtaaaaattaaagatgtcattgaactactgtcttgtttatgagaccattcagtggtgaactgtttctggctgataggttatgagatatgtaaagctttctagtactcttaaaataactaaatggagtattatatatcaattcatatcattgactttattattttagtagtatgcctatagaaaatattatggactcagagtgtcataaaatcactcttaagaatccatgcagcaggccaggcacagtggctcacacctgtaatgcctgcactttggaaggccgagacaggcggatcacttgaggtcaggagtttgaaaccagccaggccaacacagtgaaaccctgtctctactaaaaatacaaaaggttagccgggcatggtggcaggcgcctgtaatcccagctactcaggaggctgaggcaggagaa

SEQ ID NO: 6532 - DNA, 1197 bp, Homo sapiens
gatggcttgatttggcataggtggggagctttgacatctacacaagggagtgggttgaatcacttgagttacttgaaagcaccttgctctgtttctgacatgtgatagggacaccgtaaatgttcattgaacctcagatcacttctaatctcgtgattctaaaattctcttattttagttggtcaatgaaaataactaatgtaaagcatttatattttaatattggaatacatttgaaattgtgaatgtaagtttactcgtttataatgtcccttttcaaattaattggttataacaattaattgattacatctaatcatttgtaagaagagttacggcctatttccaagaattttttgcttattctgatgtcatataattgctgcattacttaatgccagattcatatcttatgaaaaagattagcattaaacaaaaatatttaagctttagtatgttactgagacagatgaagtgtccattttttcttttattgtgtgcatgaagtatggggattacaagcagtagtttttatgtgctttttagtttttcatatacaaagataatgttaatattagctcatttacattttgaaacttttgtaatagtggtatagatttgcactgcataattcacattctctcagtctcctgcacacagttgtgagatgactggttaagagggcactttgtttcaaagttaaatgatccagatgagtattgaacctataagcttagctttgttcattatcatgaggttctgatcaacaaagcagttcaacagagaaccatgccatgctgtcatttctgcttgaaaataagccttttagaggtagaaggtacaaacatgcatatacacatgcaccaataaaaaaaggaaattgtgtatggttattaaggtagagttgaaacaggaaataacgtgcgtttataagtggtttaaaaataattcttttaataaaattttcagaaatacttgatatacgcatggaaaattaaatgttttatgaaataaactccaatcagtagacaagttaatggcttttttaaaagcactaatgacttatttacttaggctatataaatttaggttagataaatctgaaaaaaaaattctttataaatcactcaaattttcccagtgtttcttacctctaacctatttagtttacactggtagagtggttcaaagtgttaa

SEQ ID NO: 6533 - DNA, 1265 bp, Homo sapiens
ccagagcaaaggaaataagtcatacttggaaggctcttctgataatcagctgaaagactctgaatctacgcctgtggatgatcgtatttctttggaacaaccaccaaatggaagtgacacccccaatccagagaaatatcaagaatcacctggaatccagatgaagacaagacttaaagagggggctagccagagagctaagcagagccggagaaacctacccaggcggtcttccttcagattgcagactgaagcccaggaagatgattggtatgactgtcatagggaaatacgtctgagtttttctgatacctatcaggattatgaggagtactggagagcttactacagggcatggcaagaatattatgctgccgcttctcattcatattattggaatgctcagagacatccaagttggatggcagcttatcacatgaataccatttatctacaagaaatgatgcatagtaaccagtgattataggatatacctgagaccatcaggaactgtcaacaaatgatacctttggatatccatcctcctcgacttatagtacagtggtgtatagtggcatttctgataaacttgaaaagacttgagtctttccactgggacacatccatttttcagattgttttgatttaggccaggtatattatcttcatttttaagagtttctttaagaaacttcatcagattgttgaaagataatttttgggacatagagctgaaagtttcagggtgccattttctataagatcttcccaaaagaaacatttaaaaagatgacatataccaccacttacttaaaaacaataaaagcaatagatttgattagtaatattattgctgtggagttctttacaaagggcttaggctgcatttccttctatagaggtgcattcttgtagaaatttgtagcatggtagatcagaaaatcctcttaggttttaggcaggaaggaatatttaaacattgctttagattttcctaaaggtatttgatttgatctgttagcttccagtaaaaatatttgtttttagtaaaaacaaatttaaatatatttacatgtttgttgtttatcttttgaatgtcttttgaggctgtgaaagctgtccacatttttgctgtgtattaaatagctgtgggtcatcagttgctgtcttacttgtgttgctcagatagaggagcagctcttaatcttttttggttcttggatccttttatgaatcagctgatagctatagattgacttcaggaa

SEQ ID NO: 6534 - DNA, 1608 bp, Homo sapiens
cttgaacagaatgaaatcacatctccattcaaaaaatgtctcaagcatctactgttgtgtaaggaacttctgattctgattgctgttacttgaataggaaatggttactcattctgtataaaagttttgcaagagaatgaattttttattctgtaatcaaaaagcaataacttgaaattcactctgtaatattataggtcagtcagaattatacaagttttaccaaattgttacacttattctccaagctgccagaacctggtatctgtatctgtaaaaccaaattaacttttgcttaaatgggaagtatacatatatctgtatagatacattacccctttacatgtttaacatacacacacttaaacacataaatactagtgtgattatatctttggagtttgcaatatagcataaaggacaagtagaactgcacattaagattacctaccgaagcaactagatgtggctgggacacaatcaaaggaggaattttgtccacaggaaggtgaggaaattccaaatgaagcctagatcttcagtatcataaaaaggcagagctggccaggcacagtggctcatgcctgtaatcttatcactttgggaggctgagatgggaggatctcttgagaccaggtgttcaagaccagcctcatcaacatagtgagaccccatctctattaaaaaaataaataggcagagctaaactaaccccagtgtcacaaaactcaactggtcatataaatgagtgaaacaggcctctcacacaagcgatgtaaaacagctgggagcagtgggagctgtggcaaactaaagtgcccaagccgcatttaaaaagggcatctgttcagctccatctgcttgctgcggtgcaagaatgctaaaccaggattaccagttcttcacattttttgaaatccaaattttcatgagaaacattctcatttttaaatatcaagaagtgattttaaaatgtttaaatggtgctggttaaacaaacacgtctgcagctggatttagcttgcaagctgccaagttgcaacctctttcattctagaaacttctgtcattttcatcatagcaagtctatgcggacaaaagcctccaaactttccaactgtgtaggccagtacagctggcaaggttcatagaatataatggctatccccctctgccaaataagactatccacaacccagctcagacacagtggttatatgattttgtgtccatacaggagaggccttggtgtcttcacatacattctctgagccaacatctatccagcagccctgacctcctgctataatttaagtctatttccttttaatctaataagagttgatagtaaaaaggcaggtgatggaaatcagtgtataaatcacaatggagtatattggcaactccacagcttatagtttgataaaggcaaatacatgaaaaataaaaatgctactaatgccccaaggtgtctatcaaaatgatgtagggggtatcttaaactgtccaaggcaatcatgcattgaactttattcctatgcagagccaaaacgaatagtgttgataaaatagctaaactttctaaactggagaggaggctacagtgcc

SEQ ID NO: 6535 - DNA, 1149 bp, Homo sapiens
cttctaggttcaagcagttttcctgcctcagcctcccacatagctgggactacaggcacgtgccacaacgcccagctaacttttgtatttttagtagagatggggttttgccatgttggccaggctggtctcgaacttctgacctcaagtgatcaacccaccttggcctcccaaagtgctgggactacaggcgtgagccaccgcacccggccagtttccagcttataaacacaatgtgtagatgcctttatagacagacaaacagcaagggaactaaaggcttaaattacacttcttcaccacttcacagtgtttgctctatgcagtaggagcatcaccatcacccaggagctcatgaaaaatgcataacttcaggcaccattccagaccttctgaatcagaatctacattttaacaagatccccaggtgatcctatatatacatttaaagcttggagaaacttgctgtactctacccccaataagaggaatttagaacagctcgatagtgctgccttgtcaaggtggaaaagaggcagcattgcagagtcattatgaaatagattctggaggcaggctgctttgctttgaattctagccctgaaacaatgctgtacaacctcgggttagttacttaaccttttctacccttagttgtaaaatgagaataatactacctctcatgggttttggtgagcgttaaatgactttaaaatatgcaagtgttaggactatgtctacccacagtaaaaactaggtgagtgttagctgttgttgctacctttattgtcatcatcatcaccaaagtgcaatagtgggaaaccctacccccttcttgtttaaaggagatatgtcctaacagtcagctcaaaatgcatttttccatagaaactgtagtataaatggtgattgggtataatttttaaaacactattagtaggccaggtgcaatggctctcgtgcttgtaatcccagcactttgggaggccaaggcaggcggatcacttgagctcaggagttcatgaccagcccgggtaacatggtgaaaccccatctcttccaaatatacaaaaaaattagccaggcgtggtggtgtgcacctgtggtcccagctattcagggggctaaaatgggaggatcgcttgagcc

SEQ ID NO: 6536 - DNA, 2258 bp, Homo sapiens
gctgacctggctagagttgtcaagtgggccgcccccctctgcccctccctgcacatgttcttgcgtacctctcacatctgcttacacttcgcgctccctcttgtgcccaggtaatgcccactcatcctcaggactcagttcttatgctgcctcctgggaaggccttcatggacacctcctctgcccccagactgggctcagtgtccctctgtggcactgagcccctctgtggccgatgagctgccctccaagcaccacgctggaatgtatatgttcagtctgtgtgctcctcgaggcaagcgctgagtttctagcatctttgaacccctagcatccagcatagtgtctggcacataacaggcctccgtaagtgtttgttgaattgactgaactgaactccaggcactgagccttgaggttattgtccttctgaccagttttccctgtcttcaccttctctaggcacaaagccaggctatttgatctctggagaaggatcctttcccttcctgcttgggttccacctgcaccctatgacttcgggtggaaactgctgtctgatcagccaccttgcccacacacttggacatctgtactgtctctgatcccttctctcctcaccaacaggctggaccccacatccacccctctgaatcaaatcattccgcttccccttagcctcagctctttcttctgggttgtttgtattttcttttctgtcccaaacagtttcccccacaaaaagaactttatgtctttctctgtcttccctcagtccttccagtcagcagcctgtgattgggcttttcccctcagaaacgaacaatccagaacccactgtttaaaacaactgtattttgccttgggaagtcccattgccttccctgaaaacattaaacattcctccgatccccagcctgagtctctctgtctctgggccccatcctgctccacagcagggctggtgtgtccagcacagagtgaccctccgatgccctttcccacccgccgccctgcctccctcgagccctgccttccctcacttcccagtctcctctgcttctggcagctttgggacccccgcccctggcttctcctccatgctgtatggaatgaagattgcaaatctggcctacgtcaccaagactcgggtcaggttcttcagactcgaccgctgggccgacgtgcggttcccagaaaagaggagaatgaagctggggtcagatatcagcaaacaccacaagtcactgctagccaagatcttttatgacaggtgtgtgtgtgttgtatgttgtgtgtacggggaggtctgcagggtgtgagggaagggggctatctgtgtgaggaaagagtgggttacacaagtgggaataagtccccctccttcagggaatgggggaagggcagggaactggtctgctgggagggggtgagtttcctaagcacagctggcactttgcctgcctcccaagcctaaagctttccccagggtaactccccagtcagaccgctcccaccccaacccccccttgactccccttctccccagggctgagtatcttcatgggaaacatggtgtggatgtggaagtccaggggccccatgaagcccgagatgggcagctccttatccgcctggatttgaaccgcaaagaggtgctgaccctgaggcttcggaatggcggaacccagtctgttaccctcactcacctcttcccactctgccggacaccccagtttgctttctacaatgaagaccaggagttgccctgtccactgggccccggtgagtgagtttccaaaggaaagagctggtggacaggggcttgtcccaggcagtgcttatgctttgggaaacacactgtcactgtccatgggactcttgccttgggatggggcttcctgggggagtgtccgggataaggatatgggtgggagggtccctacccccattcactcatccattctcctccaggtgaatgctatgaactccatgtccattgtaagaccagctttgtgggctacttcccagccacagtgctctgggagctgctgggacctggggagtcgggttcagaaggagccggcacattctacattgcccgcttcttggctgccgtcgcccacagccccctggctgcacagctgaagcccatgactcccttcaagcggacccggatcaccggaaaccctgtggtgaccaatcggatagaggaaggagagagacctgaccggtaactcctccctccaactcagccc

SEQ ID NO: 6537 - DNA, 1241 bp, Homo sapiens
aaaaagaaagaaaaatagggaagatacagttttttcataaacctattgttattcaaattaaagagctgtatacttttagtgaatgagttcagccatctaaaatgcttagataagttttatgctgtcactaagagctcaataaatgttagttattgtgtcatcactgcttatattttttgatttaacacatggtctcatcaaataacgtgatagtcaaggagaatttggtttcgtactgtccttggtaaatttgaaacctgaaaatgggcccctaattatttagttttaaatgtcatgggtctgtggagtccctggactagatgctctctggaactatatttggttctgctttctgtggtttacagtgcctggcagcagatattatggaggagtgtcctgctatccagggagccagcggggtagcaggctattgtgtgtgggcccagagtgggtagagcggagcccctgtagggcagagggaatctgacccttggtcttgcttttcctcctccggcctcccaggtctcatcccaccatcctggacattcctaaccagctctattatgaaggggagctgcaggcctgtgctgatgtcgtggatcgagaacgcttctgccgctgggcgggcctacctcgacaggtgaggctgagcagggcaggccccacccctgtaccctgacttccctcccactgaaggtgcagcccctccctttgtcaccttggcctaggatctcttactctctggaagggtttgggaagggagggaatagagggagggtggtctggctgacggtttcccccgaccccatgtccagggctttcccatcatctttcacggcgtaatgggcaaagatgagcgtgaaggcaacagcccatccttcttcaaccctgaagaggctgccacagtgacttcctacctgaagctgctcctggccccctcctccaagaagggcaaagctcgcctgagccctcgaagtgtgggcgtcatctccccgtaccggaaacaggtcaggtcctcagttaccagcaagggtggggcccctcccccagatggtacctccttaatatccagaccactaggcagaggctccaggagcttaggcctctgctggctccgtatctcagaagagcaccaaggtcagctgccgcctccctttgttccccagctccctggcctcctgccaggctccctcttgcattaggttaatggcacgagagaaaggcacctgtcccctccttcc

SEQ ID NO: 6538 - DNA, 1096 bp, Homo sapiens
gtgttctttgcaatgctgttttctttccttagaacactttgcaggccccagccctcagcaggattcaaccttcatgtttcagcttccacagcctacctcccatcccctttccctgggccgtgtcgcagcactggttcactcactgatctacaattgcccagtgacctctctgtaccctccttggaaggcaagctccctggggtagggcacccctttgacacccctggctggtctcaggccctgcctctttccccactaggtgggttcagtagaagaattccaaggccaagaacgaagcgtcatcctcatctccaccgtgcgaagcagccagagctttgtgcagctggatctggactttaatctgggtttccttaagaaccccaaggtttgagggctggtcggggtggcaggaattcttccattctcggggctcttccctcccatgaccacaccacttcttccttccagaggttcaatgtagctgtgacccgggccaaggccctgctcatcatcgtggggaacccccttctcctgggccatgaccctgactggaaagtgtgagcattcccaccccattctccctcttagtggccacagcccctgcctagggcaggtggatcttttttaagcgcttgcttatcgctcagttaatcctcagatgtgtccattttcacagcatcactattgtatttataagttaaatgacatccagaggttgagcaagtacagctcagatgggacaggaccgtggcttagcctccagtctctgctggcactcctctgtaccccacagattcctggagttctgtaaagaaaacggagggtataccgggtgtcccttccctgccaaactggacctgcaacagggacagaatttactgcaaggtctgagcaagctcagcccctctacctcaggtatggctgggccagggtggggacagtgccagaggaggtggtaaggaagacacagtgtactttctctctttccagggccccacagccatgactacctcccccaggagcgggagggtgaagggggcctgtctctgcaagtggagccagagtggaggaatgagctctgaagacacagcaccca

SEQ ID NO: 6539 - DNA, 1381 bp, Homo sapiens
aacatgtcctctaataatgaggatttatatcctattccttccattatttatacctcttattatttatttatttatttatttatttatttatttatttatttatttattgtcttcacaggtcttgggcttgccttcaacttgaatccagctctgaccatgattggcaagtatttctacaagaggcgaccattggccaacggactggccatggcaggcagccctgtgttcctctgtactctggcccccctcaatcaggttttcttcggtatctttggatggagaggaagctttctaattcttgggggcttgctactaaactgctgtgttgctggagccctcatgcgaccaatcgggcccaagccaaccaaggcagggaaagataagtctaaagcatcccttgagaaagctggaaaatctggtgtgaaaaaagatctgcatgatgcaaatacagatcttattggaagacaccctaaacaagagaaacgatcagtcttccaaacaattaatcagttcctggacttaaccctattcacccacagaggctttttgctatacctctctggaaatgtgatcatgttttttggactctttgcacctttggtgtttcttagtagttatgggaagagtcagcattattctagtgagaagtctgccttccttctttccattctggcttttgttgacatggtagcccgaccatctatgggacttgtagccaacacaaagccaataagacctcgaattcagtatttctttgcggcttccgttgttgcaaatggagtgtgtcatatgctagcacctttatccactacctatgttggattctgtgtctatgcgggattctttggatttgccttcgggtggctcagctccgtattgtttgaaacattgatggaccttgttggaccccagaggttctccagcgctgtgggattggtgaccattgtggaatgctgtcctgtcctcctggggccaccacttttaggtatagtatatctccctactaatgtgggtctattacaaaacaagcatgtaagatgggaatgctgacagaaagcaaacattagtgagctatttgggtaagaataaatctttctcatttatgtacccttgatgctgggacaatgcttggcacagcataattgctcaaatatagaatctaattaaatggaaccatcaaggcaaaagggggatcaaatattgttacaaatgtcagtgttttttctttttttttgagatggagtcttgctctgttgcccaggctggagtgcagtggcaccatctcagctcactgcaacctccgcctcccaggttcaagcgattcccctgcctcagcctcccggtagctgggattacagatgcatgccaccatgcctggcca

SEQ ID NO: 6540 - DNA, 1171 bp, Homo sapiens
ggctctacagcgccggcccccagcgtcttcccgggtgccagcggcacccgcatccattcaaatgctgcccattccccgctcctcagtcgcttcccgctactccgcacgcgcatctcccccacccgtcagggtcaggcctctcggtgacttttcctttttctctggcagaaactgaggggtgagaccgatggttgtgtcccgaacgagggcagattgcctagagctcgtcagacagggacccaagggcgagtctggcagggcgtggtagctccgcgccgctcagcaggggcgcagcgcgcgggtcggactgggacgccggtcacgtggcggggagggggcgccggcgcgcgcgggcgagctagagggcgcgcgcggctgaaagcgtgtggaggcgcgggctgcagttcggatgtctgtgtggcggggagggggcggcggccgggagagacgactccgccccctgcgcgcatgctccggccccggcgggttataaggcagcctcgctggcccggccagacaaagtggtgagctgcgacgtgactggctagctgcgtgggtactggaacaagcaaacgaggcagcgagcgaaggacgggagccggaccctgggccccgtggaactccagcctgcgccaccacgtcacgcacacgctcggcgctgcgatccgcgcatataacggttagttgggtaacagccggcggcacgcggcgcggaccccacggtgccctcgctgccctggtggggtcggaggggacctccggggttgggagactttgtctccggcggagggaggcggcccagcagagggcatcgtggtcacaggcagccgcgtggcctcggactgcagtgctggtgaaggagaccttgaggcgctggggtcagcgcctctcttagccgagccgcgggccccgtgctaagatgccggtcccaggcctggccgaggagttgggtcgtggtgcccggtgacggtggggaagtcccttcccccctaagtcttcaataggctcctcgagagatgctttgatctggaaaagggataacatgaggctgctgcatgtggtacctccagactctcctggccgcttctgccccaagggaagggactcggggcagaagttatttatgattcgtgacattgtccgccccaaccttcttggcccgccgatcctt

SEQ ID NO: 6541 - DNA, 1286 bp, Homo sapiens
tctgcctcagcctcccaagtacctgggattacaggcatgcaccaccatgcccggctaattttatttgtatttttagtagagacggggtttctccatgttggtcaggctggcctcgaactcctgacctcaggtgatccacccgcctcggcctcctagagtgctgggattacaggcgtgagccaccgagcccggccggtccttattttatacaagtgattaagccaaaaattttcttgaatttctgataccaaagagctttaggtaaataacttcacactctaatgcaatgtaattctttctttgtgctttcagatttccttacacttcctgtccagttctctcttctaaatccaatattactcactagataatttcagccacttaaataaaaatatctatttttaagtcctggttcaagggttccaaactcacataatttctcaactttttgccagaaagttgagcatttattcatacttattttcaatcctaagtgttctcccatgggcagcagcacttcttgagctgtttagtactgccacacctttttatgtctttactatgtcagcctctgatcattttcactttgaacttcctaaagatcacaatttcctatcccttcaatctgcgatccctcttcttcctttcttactagattatggtgtagtttgtactagactgactcattaagaccttgtacgcttcctgagtctgcttattactggctttgtaatcaagggtgagtctttttacttctctaggctagattttctcatttatgaaatgaggacatttttctagatgctgtaaagccctttccagctgtaacattctatgaatctgtaattccctcgaggagctaaggaggattatgctactttaataaaaagctgctttggtgacatttgttcgagtagaacaagagtgatgctgctcattctgacttgagccagatgtatttcctttatagcaggagtaatggtctaagaaatactcattaggagaaaaaaattctgcttctaaacagtattagtaaacaaagaatcttgactcagttgaaaaaccacccattgctctctagagcagaatgtctgaatgctggttttatagcacactagaatatcagaatgagttgacaggtataccacaactaatttgtaactagtttgtgactcacctttctaatgtattcgaagttatccctataattatattactctcgctcaaattctgatagatttcctgaatggaataggtggaattagggctaggctgccagagactgt

SEQ ID NO: 6542 - DNA, 1158 bp, Homo sapiens
tatatatgaaatggaaaggcaacatagcatagtagttaagagtgaggactctggagcctgactacctgggttcaatccccatctttgctgtttgctttctgtgtagccttggaaaatactcttcctttgagcaacacagcacttcaaaatgtgttttatatacagcatctagttgtttttgtggtggaaacccttttgaaatatctaaattatcatgctgctagaaaggtaaatccttttaacacagtattcttcacttgccgagggatctagggcttcagtttttcacttggctaatgtgcatctggatgggcattgtaggaaactatttatttgtgtacttttttaaatgatggatttttatagaaacaatttgtatagtttttagaattaattttaaagaagagctctaatgttttacatcttaaaacctcttcttttcagttatagcaattgtcttatatttgatgatgcctattgtgaacataagtgaagtacttggacccttgtgccttatgctactcatgggaactgtccactgtcaaattgtgtctactcagataacaagaccatcaggaaacaatggaaatcgaagaagaaggtaagatgagaaattacactgtagttgtatattttctgggagagttattgtagagatttataaaacctttgattaatttaaaatctccctcttttgtgtttttcattattttttggcttagaaaatgaatgcattactttgcacttttctccttgatgctgagaaaaccttgttacaaacttttagttccagtttgggatttttgtcattcagtacagttgtttaaaaggaaaatttctatactatattattctttataaaatttatcatatattggcttcaaagaaaacattctctttgaaattcagtcttaatcaaaatttggtgaaaattcactgtaaacaaggatcttggtacatttggttagcgctaccaaaattttaccttttttcaaagatgtgtaataagaattgatttctaagtggtctaaactttttttttttctttttgagacagagtttcgctcttgttgcccaggctggagtgcaatggcgcaatctcggctcactgcaaccgatacctcctgagttcaagcgattctcctgcctcagcctctc

SEQ ID NO: 6543 - DNA, 2163 bp, Homo sapiens
tgataaactattcttgtcacttggcatcaacctcttcatgataaatatctactactgagacacttcaattcacagttttaactggtgaatacctgggtttatttactattactctgtgttgctattttctaagaaagaatacagcactagacttcatcctagagtttcaggtaggctaatgcttagtgcctgagtatttaaattttcttttcaaacaggcacagttcacattgctagtatggtcctaactttctgttattttagaatgttaacatgattcacattatactttctcttagttaataatacagtaggccttttgtttattaatggaagagtactccccacacctaagaccagattcttatatctccctggttacagtgcaatttggagattttttttttttcctggatggtaagatttgaaatatttacattaacataggcaaaaaaaaaaaaaaatacaagatgctgctttattatgtctgtcaccatgaaaacttagctgcatcttttgaaatatcaaatatgaattttctctaaaatattctgaaataggttaaatcttatataaatattactttgtgcaatattgttgtgtagttaaatgcatattagcaaagtatagaggtcactgtgtaaaccgatagaaaagtaaccatcagcaaatactgcagtgattagttagaatctgtattattccttatatatatgtatatgtatgtattctctgttacaaaggatgaagacaaatagggatacatttcaatgtaaaccatttatgaattggaagtgatgttggctttagttatctttgtaaataaggtaattagaatggtatgaaaggtaatgtgattattgcaggggtgtttttaaatcttgggtataaattctagggtaaattccagtttatccagactagtttttaacgggacctgcctttgagggtgttttttgttattttgttggggaggggtttaatcacaaagtgtgtgggtttgggttatttcttgtttttatttttctgtccagaagagctttaccaggctgtgcaaagtaaaattcttctcaggcaacatttgcttttaaaaataatcatgaagagaaggctgttaaagcaaaaattttttttttttaattttttcttgtcttccaagatccgatttccccatctcccacttgccatccagcagatgccatctgtcatccaagctggtcattgctaataaacaaggagactgtctcctgacagccagcactgtgtattatcactcaggaaccagcggatctgcaaagacctacaatcaaaagcaaatccccattttccttttataaaacattctaccctcacctccaatataaacacattaaaagagtacaataaaaatgtttaaaatcatgtactaataaattcattgtatgttagaattgcaatagaatgaagagaaacatttagctagtaacgtgatctgaaaactgaatgtcctatgtgagtattagattttaatagcatgctttaaagactgatgagtataaaagcagaagttttgcgttttttactgctttcaaagctgtatcctagtttagtgatacaaatgattgcaatttttctaaatcattaaattatttggtttggtggagtgaggcatggagcaatctggcgtcttctgatttgttaaagtagtgatggcagtgaagttgtaactgaaatttaagctgatcttcctttttggtatattatccgttgtgccagctcttgagattacttgcacaatgtggctataagttttaatattttgtggagcagagggatggtttttaaatgtgcttatggaaaggacccaataaatgaatattcctaacttagtaaagtagaataatttcatggtattcattaaaaagcataaaagtcttcctcttgccccagaagtaattctctataccaagatatgctaggagtaggatgatgattcaaagtggtaacccaaattcataaagcaataataataaaaacctatatagtatgttctctcctccaaagttttaactctaaaaattggttcctaggtttaattgtacctttaatttgcttattcagtacttagaatttgtttaactggtacttttattattttttagtgaaagacttttgaaaagtgcc

SEQ ID NO: 6544 - DNA, 1125 bp, Homo sapiens
ctgggttcatgggaatcttatgcctcagcctcctgagtagctgggattacaggcgcccaccaccacacccagctaattttgtatttttagtagagatggggtttcaccatgttggccagactggtctcaaactcctgacctcaggtgatgtgcctcccacaagtgctgggattacaggcatgagccactgtgcctggcctaacaatggtttttacaatttaaaatagttggaacgaccttgtagcgcatggaaatcatacgaaatttaaactgtgtccagaaataaagctttattggaatatagctctgttcattcatatatattgtctatggtagtttttgcactacagtagcagaatacagtaattgagacagagaccataagacctgcaaagcctgctgttcggctctttagagaagtttgccacccttgagttcacttaagagacatgttccttcctgcacagcagttcaacagtatttaatctgaattcatgtggagactaattacaaattattacaatctcagacatttggagttgttcataaacagttgaaacaaaaatttaatctgtaaatgctagggtaaacttgttcatctttaaaacagaaagaagtgattttcagagagatgaagtgaaatgcttaaaattttttagttggtgatagagctgaatacagaactcaatttttttccctcatggcccagttgacctctctttctgctatgcacactggggttgattatttaacagagatatttaaatgctgtttttatttcttatagggaataagcttgagtgtaactaaactggaggttacctatgtgttttgaaatcttaatttttttctctccctcttattgctcataaaaacataggacaggccgggcgcggtggctcatgcctgtattcccagaccaaggtgggcaaatcacgaggtcgggagtttgacaccagcctagtcaacatggtgaaaccctgtctctacgaaaaatacaaaaaattagctgggctacttgggaggctgaggcaggagaatcacttgaacctggaaggcggaggttgcactgagctgagattgcgccacttgcattccagcctggtcgacagagtcagactccgt

SEQ ID NO: 6545 - DNA, 1198 bp, Homo sapiens
cttctgcagtgcgaagaaactgaaaatagagccctctggctgggatgtttcaggacagagtagcaacgacaaatattatacccacagcaaaaccctcccagccacacaagggcaagccaactcctctcaccaggtagcaaatttcaacatccctgcttacgaccagggcctcctcctcccagctcctgcagtggagcatattgttgtaacagccgctgatagctcgggcagtgctgctacatcaaccttccaaagcagccagaccctgactcacagaagcaacgtttctttgcttgagccatatcaaaaatgtggattgaaacgaaaaagtgaggaagttgacagcaacggtagtgtgcagatcatagaagaacatccccctctcatgctgcaaaacaggactgtggtgggtgctgctgccacaaccaccactgtgaccacaaagagtagcagttccagcggagaaggggattaccagctggtccagcatgagatcctttgctctatgaccaatagctatgaagtcttggagttcctaggccgggggacatttggacaggtggctaagtgctggaagaggagcaccaaggaaattgtggctattaaaatcttgaagaaccacccctcctatgccagacaaggacagattgaagtgagcatcctttcccgcctaagcagtgaaaatgctgatgagtataattttgtccgttcatacgagtgctttcagcataagaatcacacctgccttgtttttgaaatgttggagcagaacttatatgattttctaaagcaaaacaaatttagcccactgccactcaagtacatcagaccaatcttgcagcaggtggccacagccttgatgaagctcaagagtcttggtctgatccacgctgaccttaagcctgaaaacatcatgctggttgatccagttcgccagccctaccgagtgaaggtcattgactttggttctgctagtcacgtttccaaagctgtgtgctcaacctacttacagtcacgttactacaggcaagtggcaaatgctgaaaatcgtatcttaggctagagttctgtccttatatttaacatataccccgtaggctacatatagcaatgaatttgtttatagattctgagatagaaataggatatgttttagctcattctatgtgtgtggcattcctatatatgacatttattt

SEQ ID NO: 6546 - DNA, 1225 bp, Homo sapiens
agatgtatgtggagcatgagagtagtgcctgatacataagtacccagaagtttactgctgctaatattactattattattaccatctttatcatcattgttatcatgggagaaccagagacagatcatctaagaaacattgcttaaaagggtggttgaagctcggcatggtggctcatgcctgcaatcctagcactttgggaggccaaagcaggaagatcacttgagcccaggaatttgagaccagcctgcgaaacatagtgacatctcatcactacaaaagataaaaacagttgggcatggtggtacacacctgtagtcccagctactcgggaggctaagatgggaggatagcttgagcccaggaggttgaggtcgcagcgagctgtgatcactccactgcactccagcctgggtgacagaacaagacgctgtcacacacacaaaaaagaacaattcaattttcatgtatttttcttttcctcagctctggactgaagccaaggtctaatgtcatcagttatgtcactgtcaatgattctccagactctgactcttctttgagcagcccttattccactgataccctgagtgctctccgaggcaatagtggatccgttttggaggggcctggcagagttgtggcagatggcactggcacccgcactatcattgtgcctccactgaaaactcagcttggtgactgcactgtagcaacccaggcctcaggtcagtgttatcttcacagcttgagttgaattctcctttgatgtgtgaatgcttaaatattttgccataatccacttatatcagtggtagagaccagtggtgtagacattcttaaagagaccttaattcagaaatcagttccctgcacaatgtgaaattatttttggccatcactttatcttcctgtgtttattttgcttggattaatatacaaatgagattgtagtctcagaaacacattcagtgctgatgggagaaagcagacaagacgtgtgatattgcaagaagaattagcaggcaattaggtttgccacagatgatttgaatttggcaattgagatgtagacaggacttgataatattgaaaatgactgcaaaagtgttttggaaaacagttatattctttagatttttttctcacccagtgtcatagcagtgatgcttttgatggttttattaccaacccaattacttccatcatctttgccctgttagat

SEQ ID NO: 6547 - DNA, 1075 bp, Homo sapiens
cgacttctgctgctgcactgggctcaaccagctccattgctcatcttttctccccacagggttcctcaaggcatgctgcagcctataccactcaccctagcactttggtgcaccaggtccctgtcagtgttgggcccagcctcctcacttctgccagcgtggcccctgctcagtaccaacaccagtttgccacccaatcctacattgggtcttcccgaggctcaacaatttacactggatacccgctgagtcctaccaagatcagccagtattcctacttatagttggtgagcatgagggaggaggaatcatggctaccttctcctggccctgcgttcttaatattgggctatggagagatcctcctttaccctcttgaaatttcttagccagcaacttgttctgcaggggcccactgaagcagaaggtttttctctgggggaacctgtctcagtgttgactgcattgttgtagtcttcccaaagtttgccctatttttaaattcattatttttgtgacagtaattttggtacttggaagagttcagatgcccatcttctgcagttaccaaggaagagagattgttctgaagttaccctctgaaaaatattttgtctctctgacttgatttctataaatgcttttaaaaacaagtgaagcccctctttatttcattttgtgttattgtgattgctggtcaggaaaaatgctgatagaaggagttgaaatctgatgacaaaaaaagaaaaattactttttgtttgtttataaactcagacttgcctattttattttaaaagcggcttacacaatctcccttttgtttattggacatttaaacttacagagtttcagttttgttttaatgtcatattatacttaatgggcaattgttatttttgcaaaactggttacgtattactctgtgttactattgagattctctcaattgctcctgtgtttgttataaagtagtgtttaaaaggcagctcaccatttgctggtaacttaatgtgagagaatccatatctgcgtgaaaacaccaagtattctttttaaatgaagcaccatgaat

SEQ ID NO: 6548 - DNA, 2674 bp, Homo sapiens
caaaatctctgtctattatgagatactggcattgatgagctttgcctaaagattagtatgaattttcagtaatacacctctgttttgctcatctctcccttctgttttatgtgatttgtttggggagaaagctaaaaaaacctgaaaccagataagaacatttcttgtgtatagcttttatacttcaaagtagcttcctttgtatgccagcagcaaattgaatgctctcttattaagacttatataataagtgcatgtaggaattgcaaaaaatattttaaaaatttattactgaatttaaaaatattttagaagttttgtaatggtggtgttttaatattttacataattaaatatgtacatattgattagaaaaatataacaagcaatttttcctgctaacccaaaatgttatttgtaatcaaatgtgtagtgattacacttgaattgtgtacttagtgtgtatgtgatcctccagtgttatcccggagatggattgatgtctccattgtatttaaaccaaaatgaactgatacttgttggaatgtatgtgaactaattgcaattatattagagcatattactgtagtgctgaatgagcaggggcattgcctgcaaggagaggagacccttggaattgttttgcacaggtgtgtctggtgaggagtttttcagtgtgtgtctcttccttccctttcttcctccttcccttattgtagtgccttatatgataatgtagtggttaatagagtttacagtgagcttgccttaggatggaccagcaagcccccgtggaccctaagttgttcaccgggatttatcagaacaggattagtagctgtattgtgtaatgcattgttctcagtttccctgccaacattgaaaaataaaaacagcagcttttctcctttaccaccacctctacccctttccattttggattctcggctgagttctcacagaagcattttccccatgtggctctctcactgtgcgttgctaccttgcttctgtgagaattcaggaagcaggtgagaggagtcaagccaatattaaatatgcattcttttaaagtatgtgcaatcacttttagaatgaatttttttttccttttcccatgtggcagtccttcctgcacatagttgacattcctagtaaaatatttgcttgttgaaaaaaacatgttaacagatgtgtttataccaaagagcctgttgtattgcttaccatgtccccatactatgaggagaagttttgtggtgccgctggtgacaaggaactcacagaaaggtttcttagctggtgaagaatatagagaaggaaccaaagcctgttgagtcattgaggcttttgaggtttcttttttaacagcttgtatagtcttggggcccttcaagctgtgaaattgtccttgtactctcagctcctgcatggatctgggtcaagtagaaggtactggggatggggacattcctgcccataaaggatttggggaaagaagattaatcctaaaatacaggtgtgttccatctgaattgaaaatgatatatttgagatataattttaggactggttctgtgtagatagagatggtgtcaaggaggtgcaggatggagatgggagatttcatggagcctggtcagccagctctgtaccaggttgaacaccgaggagctgtcaaagtatttggagtttcttcattgtaaggagtaagggcttccaagatggggcaggtagtccgtacagcctaccaggaacatgttgtgttttctttattttttaaaatcattatattgagttgtgttttcagcactatattggtcaagatagccaagcagtttgtataatttctgtcactagtgtcatacagttttctggtcaacatgtgtgatctttgtgtctcctttttgccaagcacattctgattttcttgttggaacacaggtctagtttctaaaggacaaattttttgttccttgtcttttttctgtaagggacaagatttgttgtttttgtaagaaatgagatgcaggaaagaaaaccaaatcccattcctgcaccccagtccaataagcagataccacttaagataggagtctaaactccacagaaaaggataataccaagagcttgtattgttaccttagtcacttgcctagcagtgtgtggctttaaaaactagagatttttcagtcttagtctgcaaactggcatttccgattttccagcataaaaatccacctgtgtctgctgaatgtgtatgtatgtgctcactgtggctttagattctgtccctggggttagccctgttggccctgacaggaagggaggaagcctggtgaatttagtgagcagctggcctgggtcacagtgacctgacctcaaaccagcttaaggctttaagtcctctctcagaacttggcatttccaacttcttcctttccgggtgagagaagaagcggagaagggttcagtgtagccactctgggctcatagggacacttggtcactccagagtttttaatagctcccaggaggtgatattattttcagtgctcagctgaaataccaaccccaggaataagaactccatttcaaacagttctggccattctgagcctgcttttgtgattgctcatccattgtcctccactagaggggctaagcttgactg

SEQ ID NO: 6549 - DNA, 2417 bp, Homo sapiens
caggcagggaaagcagttgcattgtactttgaagataaactcacagagatctactcagacaggaccttcgcacctttgccagagtttgagcaggaagaggatgatggtgaggtaactgaggactctgatgaagactttatacagccccgcagaaaacgcctaaagtcagatgagagaccagtacatataaagtaaaatgacatggatttaaatcaattgtttaaaaaaaaaaaaacgaaaaaaaaaaaaaaaacacaaaaaacccagaaaacttttaagtgttgctggaatatcctgcctacagtgggcacctccttgaagaagctgatagcttttacacagtattagattgaaataatggacagaaacacattcttgtcaagaaagggggagagaagtctgtttgcaagtttcaaagcaaaaagcaaaagtgaaatgatttgaggatttctgttctaatggagatgattctctgattgttagaaatggcaaatattgatgattgtgtgctattgattggtgcaggatacttggtatacgagtaaatacttgagactcgtgtcacttgataaattttctttttggactaggtcgcacagttattaaaacaacttttaaccctcccccttcacacacatacatatcaggttgttttctagttaaaaacccaagtagctcagattctactttaatgtcagtgcagatttgcattgaatcatgccattatgttttttctcatttttatgctgttgggtcttagtttttaaattgatataaagaactcagcaatggttttattttctactcatacttagggtttaggaaacactaccactagttatcatttaatcaacttcaatggtctactgaaacaaaaatggtaacttttcattagtggattatttagagttatagtagttgtttccagaaaacacttcctcacaattgtacttcccaatcaaatcatgtgatcatacagttattcccatgaaaggcagaatgtttgtttcaaaattaatctagttttctgtacatttaaatttgagaaggtgacaactggctcttttccagtcttccttcatgtcagttttctgatagaccactattggcaaacagtatctgtcaactaccaaatgtgtaaaattttctgtatttcactttgtcttatttgtaaatagtgaactaaaacttttggcagatcagcaacatttgctgagcctgttttttaagctaatgtgtattcttactaatgttcctatcaagaatggatttgtaatatatgctgtctatttctaatgttcacattcatattttgaggttctatcttattttaatagagaacagacttctcaaaaaatcttcagaagcagcttattattgaaatatcgaaatattgaaataaacccggtggggttagattactcatctgtccaccaagtgggacatttgcatggactgggggcttaaaggacttagaagagacctgtaagtaaatcctgaaaatgagccaatccccacttgaatggttactggagtaaacccacctttaccaccccaattacagcacccgaggccgataaaccaacttggctctggttcatttttcttttcttcatttgtgatgctcagattcaaaatgtgtgttctacactgttacaggcttctcttttgtttgattaaagattttagtcctacttttgtatggacacattagaatattcagagaccaaaatagaagaatttgctgttagatatttttcagaagtcagcagatttgtggcaaatcatttatttgcctttttaaaaattcatttaagcagttcagagagtagactactcagaaaattatttcacgtaattgtctaagaggtcaatattttttaatgcatattgaatcaaataaagtgctctaaagaaattattatacaaattcctttgggttgtttttcttttcttaacaaggggtgggggtaaacaggaatatgattcaggctttctggttgtgtatttaaagagtattgattttattattactattgatttactttattcctggcttccttttcacttttctttcaatttttaaaaaataatttaagccgttgaaaatataccaaactgttgaaacattttactcaaattttaaattcctaaaaatgttttttaataagagggagaaaattatttaaaaatacttatgcctatgccaatttccctcttttttcacaaaatccatgatttcagtttgtaagtagacatatatctaagggcacatttttggaaagtgaggaatagcagcagtataacttcattttgtcaggcctttgagttctaatattttgtattgctcttcaaatggatccttttaaaaaaattgtagataatgagtcataaatagattctgccaactgagggga

SEQ ID NO: 6550 - DNA, 1145 bp, Homo sapiens
ttgcagccttcctacaatatagtagaatgataggtgagcagaagaatattatagaatgcttctaaaatgctatgcaaaagattctgggtgtgaaaaggggtgtgccataattagctctctcaaggaaaagtataaccctatgctcacttcccaatcaatagcttaacagtttaattaatttacttattatttgagtgagacattatcagaggagcagaccccttaaaatcatatgttagcgtgcctgaataattttggggttattgtcatttctttatggcactattgtgatctataaaataaatttgttacgtcagtatatctatatgcatattcacataactgttaaatacacatatggcatacaataaagattaaatgattcttcaagaatttgtcatcgttttgttttagttgagcagtcctgagagtagcttgacaccacctctctcaaccaacctgcatctagaaagtgaattggatgcattggcaagcctggaaaaccatgtgaaaattgaacctgcagatatgaatgaaagctgcaaacagtcagggctcagcagccttgttaatggaaagtccccaattcgaagcctcatgcacaggtcggcaaggattggaggagatggcaacaataaagatgatgacccaaatgaagactggtgtgctgtctgccaaaacggaggagatctcttgtgctgcgaaaaatgtccaaaggtctttcatctaacttgtcatgttccaacactacttagctttccaaggtaccagtgaaataattgatttttggtgttgattttcataagctaaaaataaataacagaagaatgttcagggcagatggccttctaaccagtgcacagtatttctataaaacagggagcctgttattcttttggtattagcttccagagaaactaacaataaaatatctaagatctaagtagtacattaatgttaaagagtagatttcatctcctggcctttagtttatattcagtataaggaaaatagataaaactctaaattaatagggggctaaggttacaaaacctgcagtctggttctaattctgtagtaagcttgagcaattcactaattatcagggatcagtttttgcatctacaagtggtaggttttggttt

SEQ ID NO: 6551 - DNA, 1141 bp, Homo sapiens
cataactgctttgagtgcttacacctacttataaaacatctaaagctattcttaaaaatggattgaaaatgttttatgccctttactgtatacaaagggaaaccatattaagagtaattttgaagggagtgtatcagaacccatgtttgaagtggctaagttataaatgaaaataaatgcttctatgtttaactattatcctttcaaaagataattattgcttgtgacattgtccttttgcacattgttcttggaaaacgtcaaggttaaacagaaccaatgtgccacatttgacactatccagaagtcactggtgtttgtgcatcacattcatgtcatagttacttaagtagattgccatccagcttaataaactgtcctttatgagcataatttaaaattactaaatattagtttcattatttgtctatgtacataacttgtttggaccaaattggtcaggtctgctgaaacatgagttgtacattttgacaaagttttcattttaattactcggttaagtgcccagttggatgaatttctgtaacagttgatgattcagagacctaggataagttgataacctaatgatgcatttctcttattcaggataaaagaagtaaatgagactaacaaacgagtagaacaggaaattaaagtggccattttcacccttatcaatgaaattaataagaaaggaaaatctctcttacaacagctagaggtatggttcaaagccaaaataaaacaaaaactgcttctcttgctctttagctgtttttaatgtttattgaaaactattttagatggattggggggtatggaaataaaggaaaacgtaaaataaggtttttaaaatttacttttggaagagaccttttctagttagttactttgcggcccaatttaataacactgactttagctgtataccttaggaaatagtgatgtcctcttagaaatcaaataattgttactaagactgggtatggtgactcacacctgtaatcccaacactttgggagcccaaggcagacagatcgcttgagccccgggatccagcccagcccaggcaacatggcgaaacctgcctctacaaaaaatacaaaaattagccagggtggtggcatgcaccagtagt

SEQ ID NO: 6552 - DNA, 1194 bp, Homo sapiens
gcttccctggctgggaatattgcatgtgtattatcacacattgttactgtgagaagaatagctccactgggagaggacaactagatgctctgcatttaaaactctcctggggcacagcagctgcacatcctggggctcctgacctctttgcgtttgcagtgtagcccaaatcggtcagcactggaggacctcagcagccatgttgaagccccatagtgaagccgggactgccttcattcagacccagcagctacatgcagccacggctgacacattcctggagcacatgtgccacctggacattcacacaccacccatcccagcctggaacactggcatcatctgtaccattagcccagcttcccaatcggtggagatgttgaaggagatgattaagtctggaacgaatgtggcttgtctgaacttctctcatggaactcatgagtaccacgtggagaccatcaagaacatgtgcacagccacggaaagctttgctgctgaccccatcctctaccggcctgttgctttggctctggatactaaaggacctgagatccgaactgggctcatcaagggcagcagcaccatggaggtggggctgaagatgggagccactctcaaaatcatgctggataacacctacatgaaaaagtgtgacgagaacatcctgtggctggactacaagaacatctgcaaggtgatggaagtgggcagcaagatctacgtggatgatgggcttatttctctccaggtaaagcagaaaggtgctgacttcctggtgacggaggtggaaactggtggttcctcgggcagcaagaagggtgtgaaccttcctggggctgctgtggacttgcctgctgtgtcagaggacatccaggacctgaattttggggtcgagcaggatgtcgatatggtgtttgcgtcgttcatccgcaaggcatctgatgtccatgaagttagggaggccctgggagagaagggaaagaacatcaagacaatcaacacaatcgagaatcatgtgggggttcagaggtttgatgaaatcctagaggccagtgatgggatcatggtggctcgtggtaatccaggcattgagattcctgcagagaaggtcttccttgctcagaggatgatgattgggcgttgcagctgagctgggaagcctatctgtgacagtgatgtggccagtgcagt

SEQ ID NO: 6553 - DNA, 1158 bp, Homo sapiens
aaaagaatacagagagattccatgtaccctttacctacttttccacaattgtgccttgatttttttttaatggaaagttgaaagtgaaggttaggccaggcatggtagctcatgcctgtaatcccagcacattaggagaccgaggtgggtggatcacctggggtcaggagtttgagaccagcctggccaacgtggtgaaaccccatctctactaaaaatacaaaaaagtagccagctgtggtggcgtgtgcctgtaatccagctactcgggaggctgagtcaggagaatcccttgaacccgggaggcggaggttgcagtgagctgaggttgcgccattgttctccagcctgggcaacaagagcgagactccgtctcaaaaaaaaaaaaaaagtgaaggttagtgttatagctctgggtgaacatgtgtatacatttaaaataaaatcttctaagagaagttttacattgagtaatttttttcttttcttcccccccattctagttgggtatccctggtcagtaagaattatgagattgaacggactattgttcagctagaaaatgaaatctatcaaattaagcagcaacatggagaggcaaacaaagaaaacatccggcaagacttctgaaaagacaatttagcaggtagaagaaaagttgggctttcacaaaaggcatctgaacttttaatgaactttgaaggacaacagcatcttcccaaaaccattgatgtttaagtgtttagaaatcatagaaggtgtaggctgctgtggtaattctatttgtatatctcaacagaattaaaatgtctagcttggtggtatttttatagccataaaagaaaatctttaggctttcaaaataaggatgactttagaataatattgtgtcatagaattaattttcagccatgtggaccatattttgtatccaaggatccttatttaaagctttcaacatgtacaggaagttggaaatttttggtttatgactttgtctaataaagagatagttctaaacacattcttgatcaccaaacaacttcagaaagacagtgactgtacagttatcattatcatcatcatcgtcatcatcataggtaacagttatatcaagcttaatatgtgctgaacattgttctgaacactttaggtaga

SEQ ID NO: 6554 - DNA, 1180 bp, Homo sapiens
ggcatgggagccacctttattttttagtgtccaccatgtgccatgcactgtggtatatgtatgcatatcatctcaaccaatccttaaatcaaccttatgagatagatatttgcatctccattttactaataaactgaggctgggtgctatggctcacgtctgtaatcccagcactatgggagtccaaggcgagtggatcatttgaggtcaggagttcgagaccagcctggcaacatggtgaaactctgtctctactaaaaatacacacaaaaaattagctgggtgtggtggcaggtgcctgtaatcctggctgctcgggaggctgagccatgagaatcgcttgagcccaggaggcagaggttgcagtgagccgagatcgcgccactgcattccagccagggtgacagagcgagactccatctcaaaaaaaagaaaaaaggaaaagaaaaaagaaaaaaacaaattcaaagaagttaaatacgttgcccaaagttgtacaacacagaactgaagccaagacttttatggacacagaaaaagttggttagtcctacagatggaaatttcatctcagtaggattatatagctatttcttttattaataaaaattttctattaagtgtaccagagccacttttcagctctgaggataaggaactttataggtgcctagatgagactctttttattcccctagaaatgttgaaatttttgctctaattaaattagactcaaaatatgaacattccttgaacatataccacttagtcatccagacctttaatatctaaagtagtagtagtagtgattggaaagagaaagttttcagtgatggtgcagtgttttttttgtgtgtgtatgtgtgtgtgtgtgtgttttgtttcggttttttttttttttttttgagatggagtttcgctctttttgcccaggctggagtgcaatggtgtgatctcggctcactgcaacctccgcctcccggcttcaagcaattctcctgcctcagcctcctgagtagctggaattataggcacccgccaccacacctggctaattttgtacttttagtggagacgggggtttcaccatgttggccaggctggtctcgaactcctgacctcaggtgatccacccaccttggcctcccaaagtgctgggattacaggcatgagtcactgc

SEQ ID NO: 6555 - DNA, 1815 bp, Homo sapiens
atggggccaaaattcagacttgagtatgttctttgaataccttaagaagttacaattagccgggcatggtggcccgtgcctgtagtcccagctacttgagaggctgaggcaggagaatcacttcaacccaggaggtggaggttacagtgagcagagatcgtgccactgcactccagcctgggtgacaagagagacttgtctccaaaaaaaaagttacacctaggtgtgaattttggcacaaaggagtgacaaacttatagttaaaagctgaataacttcagtgtggtataaaacgtggtttttaggctatgtttgtgattgctgaaaagaattctagtttacctcaaaatccttctctttccccaaattaagtgcctggccagctgtcataaattacatattccttttggtttttttaaaggttacatgttcaagagtgaaaataagatgttctgtctgaaggctaccatgccggatctgtaaatgaacctgttaaatgctgtatttgctccaacggcttactatagaatgttacttaatacaatatcatacttattacaatttttactataggagtgtaataggtaaaattaatctctattttagtgggcccatgtttagtctttcaccatcctttaaactgctgtgaatttttttgtcatgacttgaaagcaaggatagagaaacactttagagatatgtggggtttttttaccattccagagcttgtgagcataatcatatttgctttatatttatagtcatgaactcctaagttggcagctacaaccaagaaccaaaaaatggtgcgttctgcttcttgtaattcatctctgctaataaattataagaagcaaggaaaattagggaaaatattttatttggatggtttctataaacaagggactataattcttgtacattatttttcatctttgctgtttctttgagcagtctaatgtgccacacaattatctaaggtatttgttttctataagaattgttttaaaagtattcttgttaccagagtagttgtattatatttcaaaacgtaagatgatttttaaaagcctgagtactgacctaagatggaattgtatgaactctgctctggagggaggggaggatgtccgtggaagttgtaagacttttatttttttgtgccatcaaatataggtaaaaataattgtgcaattctgctgtttaaacaggaactattggcctccttggccctaaatggaagggccgatattttaagttgattattttattgtaaattaatccaacctagttctttttaatttggttgaatgttttttcttgttaaatgatgtttaaaaaataaaaactggaagttcttggcttagtcataattcttatattcactgaagtgcctttatagaatgctaatattaatttcaaacttttggatgtgacatttggaagtgttggaatatctgagttcctcatttcatcataacatcaaatatatcaaagcctgctttaaagtattaccttggggatgattcatagctatttgtcagatttgcatacattaagatgccattggagctcttttgtctcgtttttgcattactgcacaatctagccatcttggtataggtggaggagcattgatgctaggggctggagaacttgaggcccgatataattttactacgccggcccagtttcttcaattgcaaaatagaagagttgaattaggatatatcagatttcccaaccttaaggagactttaaaaagaataatatcaaacctaggcattttcaactaacactggaatactaattttg

SEQ ID NO: 6556 - DNA, 1360 bp, Homo sapiens
gaaattctgcacttttcattatatactctaccttcattaattacttctggcaagatgttctgccttagcactcagttgcattcttttcctttttcttcctgttcattatgctttaattctgaggaccatatgagggtagaatatattatcttttaaaaattacaaaaatttgtataggcaaaccatttcttaaagttgatggccaaattttaaaatgttatttttcatatcatttataatcttgtcacaatccacttaaagaagtttggttatatttcagtgaaaattttcttccagagtaggttttttttcgtgggttggggggtaactttactacaattagtaagtatggtgcagaatttcatgcaaatgaggagtgccagcagtgtgataatttaaacatatttaaacaaaaacaaaaaaaatgaatgcacaaacttgctgctgcttagatcactgcagcttctaggacccggtttcttttactgatttaaaaacaaaacaaaaaaaaataaaaaagttgtgcctgaaatgaatcttgtttttttttataagtagccgcctggttactgtgtcctgtaaaatacagacacttgacccttggtgtagcttctgttcaactttatatcacgggaatggatgggtctgatttcttggccctcttcttgaattggccatatacagggtccctggccagtggactgaaggctttgtctaagatgacaagggtcagctcaggggatgtgggggagggcggttttatcttcccccttgtcgtttgaggttttgatctctgggtaaagaggccgtttatctttgtaaacacgaaacatttttgctttctccagttttctgttaatggcgaaagaatggaagcgaataaagttttactgatttttgagacactagcacctagcgctttcattattgaaacgtcccgtgtgggaggggcgggtctgggtgcggcctgccgcatgactcgtggttcggaggcccacgtggccggggcggggactcaggcgcctggggcgccgactgattacgtagcgggcggggccggaagtgccgctccttggtgggggctgttcatggcggttccggggtctccaacatttttcccggctgtggtcctaaatctgtccaaagcagaggcagtggagcttgaggtaagtttatctcatgcatagtgttcggctttgggctgtggaatgttcaggcgtttcactgatgccagaaatggagcagaatctatcagctggagacaaaggccttgggcgggggtccttccatttggtgcctacgtggggagatctttggagacagaagggagaatgggaaggagttgcggcctggaggcttc

SEQ ID NO: 6557 - DNA, 1360 bp, Homo sapiens; identical to SEQ ID NO: 6556

SEQ ID NO: 6558 - DNA, 2977 bp, Homo sapiens
gtcaaatttatctaaattgtttttgcctgtgcccgcctagttgtttactggctcattgagtatgggacaaaagtatttttggttggctcatattgtgaacttgggaagaagatagtcctgtgaatattggcaacccatagtgcttaaaatttaggcaatgggattgtaaatgacagtattttttgttttaatttataaatgcagtttaaaattgttcatcagctaataaagtactgatgggagctgtgacattctcatttggttccatggtagtatttaacatttaggatttcatttaagctttaaggtgaaacttctgagtactgaaaatgtaaatatattttaagtaacataacacatttttagcagttatataaacttcctagggtcatcagcagaggactgttgtgaaatactagcttttagactttgtacctgttttacaggcgatatgaaaggtgaggtctatccatttggcatcgttgggatggccaacaaaggggattgcctgcagaaaggggagagcgtcaagttccaattgtgtgtcctgggccaaaatgcacaaactatggcttacaacatcacacccctgcgcagggccacagtggaatgtgtgaaagatcaggtaagtgccagcatctctgtatctgaatttgatccttctatgagttggtaaccaaaaccttcaaatattttcagccaaggggaaatcatcaacattcattcgtttttttatttctacttcaccttttttcagtcatttgaggtagcttaataaaaacagaaaactacacaaaaagtgactatattagcaatgagaaagtaagattggtattagtaactaatattatgcaatggggaaaataagttaggggtgagatttccagaatagaaggactatatggttttgtacacttttgcttagagcttcttttgcatatcacacaaacacagaaaccacgttcaaaagtacttaaaaaataagcttagggcaaacaaacttagtcttactcctgagatctcagggaaatctgagtcctcagaatgtttttcatcagtacagagaataataacattttgtatggctgctactataacccagcttaattctagaggggatccaaacaatatatatgttgaagtaacagcttcctgatgagtttgcttaattcaaaaagcttagttcataatatacgaaggaacaaggcaagttttatttgtttggttcaagtttgtgatatagtgaatggcactttcagagatacatttcttccctgacaggttttgccacaggcagctggactggagtatcaacattaataccatgttttatacatccttttagataggggcaggcattgtgcttcattcagagtgaggtgtggcatgccctctcttttttacctacttttttttttcagtttggcttcattaactatgaagtaggagatagcaagaagctctttttccatgtgaaagaagttcaggatggcattgagctacaggcaggagatgaggtggagttctcagtgattcttaatcagcgcactggcaagtgcagcgcctgtaatgtttggcgagtctggtgagttttgttgttgtggtttgattagtaactaccctggagtgtctcaactttatagtctctgttttgtcacatcacttttctgtgccttgtcttctgccacttattatttcttgatacttcctacttctagttgaatacaaaaagattgtttagtacatgttttttaaaatttttgccaaattcttcttcttccattaagtcatttctaggttatatgctacttaaaattctaatagtttagccatgctgattcataatgccgctttgcttccccagagacagtctcacagtctgattcggttacccaggcgctatcacgactcactgcagactcaaccccctgggcctaagcaattctcccacgtcagcttccccagtagctgggactacaagcatgcgccaccacatgcagccaattttattttttgtagagacatggtcccactgttttgcccaggctgatctcgaacttctgggctcaagtgttcctcctgccctgtcctctcaaagcgctgggattacaggtgttagctaccacatctgctaccttgtttttttatgcatctgtggaactggtcactcttgattgcattcaagtctagggtctgcaaatgattccttccattcctattaagttgggaccttgagttggggataataatacataaacaaacttgtctgtcctgtctttctagctaggtatatgaggcaagagtcccatcataaaaagtgagtcatttgggcagttaggtggaaaacacactcctttgcaagtgcttgctgtctgcccaccaagtgtggtttcttctcatcttttgacttaattacagtgagggccccaaggctgttgcagctcctcgacctgatcggttggtcaatcgcttgaagaatatcactctggatgatgccagtgctcctcgcctaatggttcttcgtcagccaaggggaccagataactcaatggtatgagggcatacaaggcttgggggaggccaactgatagaccaacataaaatatgtggtcctatttaaacaataggtcaggaaacttaatgaagcagggagacttccatattgcttataactagttaggactttctacacattggttcagccccctaacctaatggttgcttacagtaagaagcacatttcttttcttgatgctttgaagacagtttaggtaatgaatgggtcaggagtgcttactgtggattttctcctctaggaaagaattagtactgcataagatgattaaaaataatgcttttgtagtttcatttcggaatagtgaatgtactatgattgttgtgcgctcaaatcattaactgcagggttttttttttctcccccccacaggggtttggtgcagaaagaaagatccgtcaa

SEQ ID NO: 6559 - DNA, 6171 bp, Homo sapiens
tagtgcatatttgccaggaagtagcaattggagagtcttagaaaattgctcaggttaagttactttgttgaaagcaatgagtttgtacttaagtgagaacagttcaaatgtggatacagtatttgtgtcacatcagagaaaattcctgatgaatttaacttgatggtggttgtaaagttgaatgttgccttcttgacaagtttcacagccagtgaaaatattatttgggtttcagggtgtgattgctgccatgagagatggttttggtttcatcaagtgtgtggatcgtgatgttcgtatgttcttccacttcagtgaaattctggatgggaaccagctccatattgcagatgaagtagagtttactgtggttcctgtgagttgtttctgagaaaagttgggaggtgtttcttgatgctttctttttcaattgaaagttaattttgttttatcatttttaggatatgctctctgctcaaagaaatcatgctattaggattaaaaaacttcccaagggcacggtttcatttcattcccattcagatcaccgttttctgggcacggtagaaaaagaagccactttttccaatcctaaaaccactagcccaaataaaggcaaagagaaggtaggttttgcataatccaaatgatttttgtagctgtttatttctcttctgctttaacagcacatagtaatagagtacatataatcagcggaagtttgtctctttcagaatttctgtcatattaacagtgaactaaacaaagtaaggtttcttaaccttgggattattgacattttgggatgaatgattctttactgtgggggatgggatgtttagcagcatttctggcctctacccactggaagttagtattctgaccccttttccctgcctcccattgtgacagccaaaaatgtgtccagacattgccaaatgtcccctgggaggcaaactcattccaagtagagaactagttatataaaatgatagtactgtcttccaggcaatttaaaactttcaaagttgggtgtatcctcagttcacacatttaaatttcatttattgaaaaatccactaaataggaaatagaaagatgtctgagatgaattctcctttcaagttaataacaaattgagagttttatagaaacaagtaattcatatagaatataaaatattgctattgaaggtcagcgatagtgctctggtgaaaattaactggtagggtatgtgatggttttactaacagatggagacaggaaagagcattcttcacagagtaaaagtatagatgagaaaaattcagggtttctttaggaagcaatgagtaactagtccgacaggaatttttttttttttttttttggttttgtgtgtgggtttttgttggtgagggaggttaggagaaataaggatgaaaaatcaggatccagctagactgggagggtgttgattgctgctctaaagaatttagaccttattgtcaggtgcggtggctcacacctgtaaacccagcactttgggaggctgaggcgggcggatcacgaggtcaggagattgagaccatcctggctaacatggtgaaaccccatctctactaaaaatacaaaaaaattagccgggcatagtagtgggcacctgtaatcccagctactcgggaggctgaggcaggagaatggcgtgaacccaggaggcagagcttttagtgagctgagatggcgccattgcactccatcctgggcgactgagtgagactccgtctccaaaaaaaaaatttagaccttgttctgtacttcaaggaaaagatttcttttggataatgacatcaggtatgtgctttgggagagtaatggcagcaatatgaagcctagatgggatggagaaagacaaaagatgaaaaggattactatgaaattacttggatagttaaggtagtccttgaactaggcacacagatagtgactatagacaagtgaaggtacatgagagatactggaaagtcatgttataatttaataattgctattagccagaaagagcaaggctagtatcttgcttatcacttactgtagcttgggaaattatttcacctctgagcttcagtttttaaatttcaaaaatgattgtgtaatagtttaaaaagccctcgaagtacctagctcataataggaatttcgcatgtgacagatgatactgttaacaaaaataaaaatacacttcagttgggcttatttttaataacttttaattcttggaatgctctgcttcccaaatgtgtctggcaaaactggcttgatgaagagagcctttgtgtgagactttccctgccattttttgtttttttttctttcttagtccaacagtaccctagtaaatcctctgtcatcatgcttcttacagtatataacatttacctgttaatgaatctgtctctgctgcactggactccctcagggcagggattctcctatctctatttaatatatttgatgtatagtatattgtcagctgttgatgttgaagttggtgagttaagagcaaaaggtgaacagtaagcttttgagtttggttgtggaaaagttgatgacattggagtcagacctgagttcactgacattgttcttaaccaaactcaaatcctctggattattttgcgctgggttttgtaaccttggtaaggtttacttaattcctcagatttccccaatttgtaaaatgagggaaaagagaaactatggagatgattttgtacaagattaatttgataatacataatacctggtaatgttgtaagtgttcaataaattattatatagcagttatggaaggaatgtgattggtagaagaggaaaatgaattggttttgaatatatcgtagtttgtaatgaggactggagtttaggaaggaagtcagggctagagtagggacatgggcattatcttcatagaaatgttgaaaccataaaatcagtataatttatgtagttgctgtacactgtcattacttaacggtgtgattcaatacgacacacctgaactttcttagacttttatttttttagtcaagtgcagtagtgagaaggggggaaagaggagaacaaggaagttcgatctgtaactgactgaacaatcgagataacccactaccttcagaccagcccttagattttttaagagttaatcattcttacacgtacgatgactgaaatgttgtttctccttgaagtctggtattaaaaaaaattgttgaaatactagtatgtcataatttttaatcatctactttatgtcaagtacttgaactgtgctagatcatacaccaaattatcctgcattgttaagtatattgattgacattatatattaaatactgtgcaaggtgctgtgtgctactaaaagaggatacttcagcagcttctttaggaaatactaaagcttcttgcccttatagaatttccacttccttggaagtaacatgcccagtttaatttctgattggctatgaggagcgcaggtgtattaaacattttcagtaagcttttttctcctcaatagcaaaaattagattcttaagattgaaagaccaattaaaaattacagcagactgagctaggcttaaggcaagactaccttttattcatatgaataatcttttagaaaatgctggaataagacatttttacagctgtaccaatcctttggcacaagaatatgtaagaactatagttgtttttattggtttttgttcttgagattgttttcattctgtttttgactgtatctctttaggaggctgaggatggcattattgcttatgatgactgtggggtgaaactgactattgcttttcaagccaaggatgtggaaggatctacttctcctcaaataggagataaggcaagataattctgctcattcgagagagggttaagagttgtcatcttaatcataaatcctgcaggatgggttcttcaaattttatcaagttttgctgaaatatattttgtgtttaagagaaatacatgaatatcttgtatttgaaagcagcttattaaaagtgtctgtcaagctctttgttaatcaaagccttgttaatctagctgtttaaacgttagataaaacatgcttaataaaatcgttattggtaagaaagttaaaacagttactactgaaacattatcaaagtaaaagcacaccaaagattttacgttgttgttcattttttctcatacttaatatgtttggtttttggatagccctctagagaaattcagaatctataaggaatacagactgaaagataaaagtttgatcctttgtgaaaagtgggatgagacataaatgttttggtgaaaatcaatttcattgaagtaataacaaaggatatttggaatgaaaagcatgcgctgggggagttataggtcttgttttctgagttaaggagattggtgtggaagtgatatggtgttaatgagcatccttaattttcacaggttgaatttagtattagtgacaaacagaggcctggacagcaggttgcaacttgtgtgcgacttttaggtcgtaattctaactccaagaggctcttgggttatgtggcaactctgaaggataattttggatttattgaaacagccaatcatgataaggaaatctttttccattacaggtaaggcgtgactttcaggaactttacagctaacttaccatccattctttggtgttggaataaaaaacatttagtattgattgattatacttgttgaggttcagatttcatattggtagaattatggcaagatataaactgaagttaatcactgatcttactatatacagagcctgtggccaaaagaaatagaaaggcctgtgccaccttattttttgtgttggtaccatagagttggccatttggtgtataatgtagtgtaagagtaaggggtctgactgggtgtggtggctcatgcctataatcccagcactttgggggctgaggcaggtggatcccttgagcccaggagttcgaggccagcctgagcaacacggtgaaactccatctccacaaaaattaccaaaattagcctgacatggtggtgcatacctgtagtctcaccaactcaggaggctgatgtgggaggaccacttgatcctgggaggcagaggttgcagtaagctgagatcgcaccactgtactccagcctagccaacagagtgagactctgtctcaaaaaaaaaaatagaaagtaagggttcttagaaccagacagttcagtttttgaatccaggccctgccactttatacctgtgtaatttttaccaaataacttcttggtatcttagtttcattatcctgaagttagggataatgttacctcttcatggggcattcttgaggattaaatgagtcaatacatagaaattacttaaaatggtgtctaatgtaaataagcatgccatgccatgactgttactgtaaaataaagactgcctgttactgttgatgtttatggtaatgtttagttaaatgtcatttcctttctccttagtgagttctctggtgatgttgatagcctggaactgggggacatggtcgagtatagcttgtccaaaggcaaaggcaacaaagtcagtgcagaaaaagtgaacaaaacacactcaggtaataaattgtgacttcttattcagcctgtgcttttaagtgggagataaaggatggagtagtagagggagatgaggcctaattattctacatcagtcattctcatgtgcgattccatagaacagcagcatcacctggttgcttgttagaaatatacgttctctgaccctatcccatacccactgaaactctgtgagtgggcattcttttttaataaatcctttaggtgattctggtatacactgaagtttgagaaggattggcctagatattttaggaaatttgctttatattttcaattcattgtcttcttttgaaaaataaacccaggatagccagctgtggtagtggatgcctgtagtcacagttacttgggaggctgaggtgggagggccgcttgtgctggtaggttgagactgcagtgagccatgatgatcctaccactgcactccaacctgggtgacagagcaagactgtctgaaaaaaacaaaaataaccccaagatatg

SEQ ID NO: 6560 - DNA, 6466 bp, Homo sapiens
aatagctaacaagatgcatgctataggaacattgttttggttaatcctcatggcagtcctgttaggaattattctccttttacataagagaaaactgaggtacagaggagtttaaaaaaaaaactcgccaaaggttatgattgttaagtcatctcatttgtagtatgtgtaaatgccataaaaactaagattaagacatggctatcttagcataagatggtggttctgaaacatttgtgtgtatcagaattagtggaaggcttgttaaaacacagattgctatacttgatccccagagtttgtctttggctaggactagagttaggcccagtatttcttttaagctcccaggtgatgttaatgctgctggtccagggaccacactttgaaaaccactggtctaaggcaattcaaatgctatgttaagtatagcttggaagcaatatatcgtttcgcaaaaatcagttcaacaaacataacacattatttatttttagatgatgttgaatttgaagtatcatcggaccgacggactgggaaacccattgctgttaaactggtgaagataaaacaagaaatcctccctgaagaacgaatgaatggacaagttagtgactttgatgctttgtgtttttttagggccctgcatttgcatatctttcacattagaaaaggaagattctccccatctcctcagtttgcacgaaagagagctatagtatataaagattactattttaaaattaatcaaaagcactggcatttcttgacctgaaataaaaatatggtcaagactcaattgggtttttacatataaccctgagtcaatgcttacagtcaatttacatactgtaagtttgaaacttggcagcatgacatcctcttgtggatcatattaaaatgcatccctgtatatagtatagaggatattaaaattcagtttatattgcacagtgctgctcctgaaatgattagcaatggaaatttttttttttttgactggtaggttgtgtgcgctgttcctcacaacttagagagtaaatctccagctgccccgggtcagagtccaacagggagtgtatgctacgaacgtaatggggtaaacttgtgtatttttcttaaacctttgcctgatccaccatgtgatctataagcgtactttaaaattcaaaatagaaaacgtaagctgcaattgttaaaatcagttttaaatttggtttctaagaggcttcaaatgcagcataatcaaaaaatttaaaaagaaaaattccataggacttccaagtgtcttagtttgcccaagtatgaccttagttagaacattaaggtaaaatgttccttttaatcacttttttgggggttgtgggggggatctttttctggtttcttttaagcactaacaccagctttttttgtttggaatgccttatataaaattgtttttttgaaatgtaactatagtctctgggcaaatgcttccacgtgtgtaagctttttgaagttggattgctgctcagctgtggactcgcagaagtcatcagcaccatggaggggaagtgtgtgtttatatgaataaagtgacttgtcataaagcatttaattttaagaaatttggcttaaaatgccagtataagaggtttttaagtaagtaaatcacagtatacagtgaatatgcatcctgccaaaatagtaataatgatttattaattcacaggaagtgttttatctgacttacacccctgaagatgtcgaagggaacgttcagctggaaactggagataaaataaactttgtaattgataacaataaacagtaagttctttttttttaaattttctcacctaagcggtttttttttcccccctccattaagaaatttgaatagagttaaaaacctaacttgtaagtctggatagttttcatgaactttcaattcatcaactaatgctttgaggtctatgaatattgtattacagccatgatgcagggtctcagaggaagatgataattaaaacattgttaggcattttaaggacttgttctagagatcagtgaaggtttttcaaaaaatagtgctttgaggtaagttttgagggaggggtatagtcactatagagaggtgagaaaaaagcattatgattagaagtatcatgacatgttgggggaaaatggccaaaagtttggtcgaactgaccagaaggtaaagtttgagcattcttctatgtaggaatctgcgttgtttaaaacaaggaagtgtgattggtttagatctttggaggtggtggaagtggtagacttttgaaaggtggggatgctgttgaccagaggcagtgatgtgagagttaacgtgaaagatgaccgcctgatatggatagactaagaggatggggtggaggagtcaagtcatattgagaagatagaatcatcaatcttaattgatttgataaaggtggggttggaattaaagggagtcccaaatactgtttttctggcctggcctactgggcagatgatggtaccataaactgggctaaggagacataaggagaatgttcaaggtgggaaaagaatcatacttatcttggcaatttttgagtgtgagatgtttgtgatatatctgggtagagatatcaaatctacagttgcgtgtataggtctgagacttagacctattaagtctaaggtctatttcctgcctataggggaagtatatagagctgtagaattcatcagcatacacagttaaggaaaatgtagttaagaaagcccagggagaatattatttttatcttggcataggagagatgagagatgcaagaggagaaggaaattaaaatagaaagttggagaaagtgctagtaatgtaccttccagtagcatgtggagggaaaagtcctaagagcatgtctgggattatctgccttgaaccttatctctttcttggcaagccttgaaggaatcagattgtgttgtaggtgtggttattattagttacagtctgaaggcctcaatttatatagttgttaatctcagaacagccttacctggtaagtttcttcatctgtaaaatgacgtataagttctcacaaagttacttgtcgatgttcatactgcttttaaatagcaggcatttaaattcccatctgactctaaagcgttttcactgcagtaagttacaaaaacaggtagaatttttctggtgtctttgttagtctgtaacatttttttaaataaaaagcacattttgggttatttgtctgtgaaaaattaagggaagtaattgcttggtgtataggtcttttcttaaaacatttagactaacagtaccattatgtcttatacagtctatgttatcttaaaaacaaaattgaatttacatcgctgctacacaaatatgaaggcataaaagcaacatgtggtgtctctaacttgtttccattctccaatggaggtggatatcattacttttaaaagcatagcaagttctcttaaagtcacttcatttactcaacttttatggctgtttactcagaaataattaatgagatagctactaaatttagcactcactgaaaatagagaccatctcctatttatctctgtatcaccagtaccttactttgccgcagattatacctacacaaatgtttgtttaatgaataacctttataagactttagtattccccacctttggtagcattcgctttgtggctttatttcagttattttgttgaaatagaaaaacagagtagaacatcacgcacccatgtgtaagtttgtaaaaaagcaaatcttccaacaacagtcccagagaaagatgacctatatatatatttgccaaacgtagaaggctaaggagttaaagtcctttgcatataaagccatatgaaaataatcaaatgtcataaaccctgtatttattcttagtgatgatagaattcttaaagccccaggaaactagtttctttagactcatatctaagcaggccaatacatttttaatccctgtttcattcctcctccctgcaattattttttttctagtactggtgctgtaagtgctcgcaacattatgctgttgaaaaagaaacaagcccgctgtcagggagtagtttgtgccatgaaggtaagtgttaaatttgagaaacttgagttttctttggccacttgaaatgttgtacttcaaactccagcctttgtttttttttttcttttttatcttacccttttaaaatatttcactgttaacctcaaaagtagtctcttaaaattccttggttgctaatacattatcttctttaaaattggctgtttaattgataatattaggttgtaccaaattatattattgtgactacagtataattttacaaaaattactggttttaagttgtaatcataaatttgtacagagtggtaataatgttcttggttttttattttgcttcaggaggcatttggctttattgaaagaggtgatgttgtaaaagagatattctttcactatagtgaatttaagggtgacttagaaaccttacagcctggcgatgatgtggaattcacaatcaaggacagaaatgtaagacagtcagttaacttgatctttggccttttaagatcagagttggtttatgtttttaagaaacacttaaaattatgtgattcttccttcctctgtccccccaccacctccaaccccttctgatttagggtaaagaagttgcaacagatgtcagactattgcctcaaggaacagtcatttttgaagatatcagcattgaacattttgaaggaactgtaaccaaagttatcccaaaagtacccagtaaaaaccaggtaaataatctttttcaggagagtcctatttcgcctcagtagtaatagaataatatggtgtggtatactgagattttatcttattcagttaatataatgtggtagtggaacaactaaggacctcttgttacgtatatttaaactaaaagagaaaccagatttatatattcataaatatggtgtttttttttttttttttctttttttgtgacagagtctcgctctgtcgccaggctggagtgcagtggcgcgatctcggctcactgcaacctccgcctcccgggtttaagcgattctcctgcctcagcctcccaagtagctgggactacaagggcatgccaccacacccagctaatttttgtattcttagtaaagacggggtttcaccctgttggcaaggatggtctcgatctcttgaccttgcgatctgtccaccttggcctcccaaagtgctgggattacaagtatgagccacctcgcccagccaaatatgtatttttttttactgggtgatgaaaaaaggccaaagaagaaaatgctaattaaattggaaagcacctgattggattagactgcagttcaggtgtacatttgttccctcctctgcccctgccctacccctccagtttgtggggaaggtgaggacacaagtggtgtcattcctggaaaaattccttaaataaaatcttttggtaccagagtgctgggtcttaattgcattgttgtaattttatggttgactcgtgtgaccatagaccatgaagctttcacattggacttatgttgtcaacaccttttttcgcttcagggaactaagttaaaaataacatgggtttactatgtgttcttcttgtttgacttagaactaggaaggatgagaaatctccagctaaaatcgtttttccttctcatcagaatgacccattgccaggacgcatcaaagttgactttgtgatccctaaagaacttccctttggagacaaagatacgaaatccaaggtgaccctgctggaaggtgaccatgttaggtttaatatttcaacagaccgacgtgacaaattagagcgagcaaccaatatagaagttctgtcaaatacatttcagttcactaatgaagcccgagaaatggtaagtgttggatattactggatatgtatctaatatgcgaaagccaatgttatattcaagtttatactactaaattaaaatttttcttaagttaaatgaccctaatgggcatttaccttgttaaggtgattaagaatcatacacatttgagtcagtctgggttatctctggcagttatcttggaaatatatgtgaaaaaattttttgaatggaaatctggacaggattactaagatatttttagagtcagtgattctcaggcccttaatatgaagagtaagaaaattcaagttcatcattgtagaaagtagattttcccaaactatttcctaagacatttaattagtggtttctgtttttaggaaacacaattcttcctccagtgtggtccagggaagccaaaagattgaacacccatgatctagacactagatcacacataaaatacactaacagcaatgatagctgatgagcttttttaaaaaaaaaatcataggcac

SEQ ID NO: 6561 - DNA, 1126 bp, Homo sapiens
aacttgaaatatgccttccaaatgcatgacttactaaacagtattaaggtattggctgaagtttcaaaatagcgttaccaaatctcttaagagtctttggtagtttgtggtcgctgtctcttaatattaattacctttgttctgaaattgttgttttagtaattttcacttcatgtaaaggcagcatttgctaatgtagttgctataccttaatattaaaccccagaaattctatttttgtctgataagtggaaattctaccataatttggggcaattccccaatataataagttgtttcctctgaaatgttttattagctaaattaatgctgcagtaataaagtctataatcttcccttcattttacttttttttgcgtttttatatggaagatttagtgacttattaaccagacttaatatgctatggagataatgtacagatatgtatatattctttttctttttaaaacagatgagctttgatccaaaccttctccacaacaatggacataatgggtaccctaatggtacttcagcagcactgcgtgaaactggggttattgaaaaactgttaacctcttacggatttattcagtgttcagaacgtcaagctagacttttcttccactgttcacagtataatggcaacctgcaagacttaaaagtaggaggtaatctgtcagttctcctttgtaaaaatgtaatcacaaaatttgtcttgcatatcaatttgttcatgagtgtttttcaaaaagttttatgtaaattaaaacattttggacttttagttgtactgtttagtgaagaatatctgtataaaccagcagaatccttgaaagattatatttgcatatatttacaataaatgcttggaagatttcattgtttttccccataatgatgactgtttacccgtaagattttaagccagtacgaatattgaacttttgtaatgttacttatgattattctgtcaggtactattttgggtagtacctgaaaaaagtaatccttagagtgtcacctcttagaagctgggcgcggtggcttacgcctgtaatcccagcactttgggaggccgaggcgggcagatcacgaggtcaggagatagagaccatcctgg

SEQ ID NO: 6562 - DNA, 1087 bp, Homo sapiens
aatttgacaaaaaaaacacttccaagtgtgagcattttttatttcatttcccaagagtaagtaagtaactattagcccagccatctgcctcgaagtataccttaagtgaccccataaatccattcaagaggcaggtactctataccatttggcagccacggccaaacctaccatggccagatttcagtgaaaatgatgaagtaatcaaatcaaggtataatatggtgtccctttatgtgctttatgttcctttagagctgtttataaagttctttatatctcaagtgttaggataaatcgacatactaacttttccccctgcaaaattaaaagcctgaggtacaagtctaagaagcttttagtgctctacataatataaattctggctggtgttaatgctatgaagataatatgtagttagaaaattgagtcggggaggaatgctcttcattttaagtggattttaaagtttctccttgagtggatgaagaacttgcctggtttgcaaaaatcttagttcaaaattatattttctaacaaaaactgcattttgagaagataagctaattttactcagtagtaagtcaaatgaggaagtgcagagggtttttttacatatatatagcaaccttgtcaagtggtcctcacaagagtcataaatactttgtaattagcacagtatattcagcagtgtataactctacaaatagtaccttatattagtgtagtattatatcaatatcttatgtataattcttatattaataccttatgcataattggattcaaacattgaaggtctattttagtgttcttcaaaatgtgcttccctgacctactgaaatagaaacttggtgatgaagttcaagaatttgtattctaatcatctcaaacaattcctaaagacactgattttaaaatatctagtctaggccccattgtgtaatagttagcactctaaaagatgaaaaagaaaatagtctatgtgccaaccacttcattagtacttatgaatttaaaaatgaaaaagtctggtacaggagacaagtatatatataaaattataatgcagtgtgataaatccatt

SEQ ID NO: 6563 - DNA, 1245 bp, Homo sapiens
ggacttcgtaagcctttataacccagcgtgaattggaaagaagatgcaggaggtttatctctatagatgagctctcacaagattagtctaatacctgggttgcgcattgcagggcaaacagctccaggccctcagagctgctcaaggcttttcaacccaggggatgataatcaatgttatgtcaatgaatcagccaaacagacagaaagatcacattatgttttctctgtttgaaaaggtaaatacctcatacattttgaaaatttcaatgaaaatcgtttgagttaagaagttctaatatttaaagagttaagctttcattttctggaagcctttgtgaatagggctgggtagatgcagcgggccctgcatgttcactgccctttgtagcttttacaaatgacctgtgtcatgtcatcctcactgtcttctccccaccaggatgacaactggggagagaccaccacggccatcacaggcacctcggagcacagcatatcccaagaggacattgccaggatcagcaaggacatggaggacagcgtggggctggattgcaaacgctacctgggcctcaccgtcgcctcttttcttggacttctagttttcctcacccctattgccttcatccttttacctccgatcctgtggagggatgagctggagccttgtggcacaatttgtgaggggctctttatctccatggcattcaaactcctcattctgctcatagggacctgggcactttttttccgcaagcggagagctgacatgccacgggtgtttgtgtttcgtgcccttttgttggtcctcatctttctctttgtggtttcctattggcttttttacggggtccgcattttggactctcgggaccggaattaccagggcattgtgcaatatgcagtctcccttgtggatgccctcctcttcatccattacctggccatcgtcctgctggagctcaggcagctgcagcccatgttcacgctgcaggtggtccgctccaccgatggcgagtcccgcttctacagcctgggacacctgaggtaagaggcaacatccaggaggcagaaaggatggctgatgtcttgctgggagacagctgctctgtagcacgtgaggggtggtgacagatgccaagagctaggaccagagtctgactcttttctggtttggggaggagatgcgagggtggggagggtgtccatgttcattgagtttctggacttctagatggtgcgg

SEQ ID NO: 6564 - DNA, 1127 bp, Homo sapiens
ttgtcagtgatgaggctgtgactaatggattacgggatggaattgtgttcgtccttaagtgcttggacttcagcctcgtagtcaatgtgaagaaaattccattcatcatactctctgaagagttcatagaccccaaatctcacaaatttgtccttcgcttacagtctgagacatccgtttaaaagttctatatttgtggctttattaaaaaaaaaagaaaaatatatagagagatatatatctatgccagaggggtgtcttttttaaaaattcttcttcattgctgactgaaactggcagatgattgaccagtatcctttgaccatctgcactttatttggaaggaagcaggggctgtccaccctgaaaaagagtgactgatgacatctgacttttgtcgatgggacttctcaagaagccattccttggagcttctgttacagctgtaaaccaaagtggagctggtgcttcttgggagcctcgccttacaactaattcctgcctttcgtccagtaccaagtcccccgttgcttctggtcagcccacttgtagacttccaggggacacatctttattctgtttcaggaaaccagtcacgacacgtccacatatgtatttgtgtatgttaatgtccagtatcacatcacccatgaaagtcgtgggcagttcaggagatacctgccttcatctttgttctttgttgccttaggttcttcagagaaagatcacaacaaaaaatgtacactgtcgtttacagctattaagtgatttgattttgtttttttcccaaagagaaaacctacctgccctgtttctgatcccacccctctgctggcttgaagcaggtaaccctttcccagccctgcagctgcccacctggcctccatgccatcctgcccccacctggctggcagccctggctctccatgtgtgccctccggctctgtgtgaagcctcaagtcagtcccagcattgtttccatagggaagtgtggggtgcccagcaggtaaagcacagggagagagggcagtgggaatgccacctttaggctgcagcaggagccccacactgcccagttttcctccccactgttctacaccaaccaggggagactaacactgtgactc

SEQ ID NO: 6565 - DNA, 1164 bp, Homo sapiens
tgtgtttctgtttataaaaaacacataccatggaaccatggtgcttttgttcttagtttttgccgttagatcccttcaaactggaagttccttacaatatctttctcaggaaatattttgggaaatggggtaagagatggcaagtgtgagacgggctgtgtcagaggttgctacgtcatggatacagtgcagttccaagtgccataagtgtatgtacatatagttaataatgacactgttcatcaccattctaaaatactgttcttccaaccctatcttcaatgaccagtccagaaggggttaagctggattcatttgctctggcatgtgcattcccagcagggtgaagaaaggtttaaattaaagaatttattttctctctcccccttcctctttctcccagtctttgcataggagaatgttagacattcagaaattactgtttctgttttaaattgagtattgatttttttatattgactttgtattgagttctttttgaaagaataacaaaataaaatgcaggatctttgtaaagcctttgcactttcaacctctttatagcttgagttacttttgcagtgggaacaatgtaaatgacatttaaaagatttaaggtttcagaaagctgcatcccacaattgaacacaatgcatttttatttcaattcttggaactggtaggctattctttttaaaagggggtaaacttcgccctaaggctggtagaatgtatgttcacattatagtagacaggatttcatttgccttatatgtttatagattttttataattttcatcctacgttattaaaattagagcattgagtgttaaagaacttaatgaggagtctatatctgagattgctctcttccctggtgatgttttaactggtagataatttgttcttaaatatgtacttttgaagataggacagtttttatagtccatgaactgaatgttaaaaagttctgtatgcattctcagagaggattttaaagctatatagttcatccatcctttgcattatcaaaatgttaagtcaaatctgtaatactttggctaaaattcataaagtaagccctagagaaaatacttgaccaccaaatttttgcccaactatcatcacctcccttcccccgcctctgttcttgccttttgaca

SEQ ID NO: 6566 - DNA, 1246 bp, Homo sapiens
cacccgagcgccagccccctccagcatccctgagtcccagaggagatcgccgaagcgctggaaaagccgttccgcccacgacttctggtgccgggtcggcggcgactgggggagcccagttccgagaccgtaccgcacccactgcggacctcctgggccctacatagtaggcgggtcatgcagggcagcgggaggaggggcgtgggagggccaaggccgccgagtccccgctgttcagccagcaggagcgccccgcagccctcccgggacacggtggacacgcttgtcccagacctgggcgccctcctgccgggagccaggactggccgcagcaggcgctgtccgggcccgtgggcggggtttcgggagggggcggagccaggcccacggccggtgtcaggttgctccggtaacggtgacgtttcgcggcgtgggcggggccagcacgcaggttgcatattttaggaagtgaggaggaggcgcgggctggagctgcggcggggtctggggcgcagagcagcggcgggaggaggcggacacgtggcaacagcggtagcagcccgggcggcggcagcaacagcggcggcggcatcggcccgagccgccggccgccctcccaccctcccgccccgcggcagccctagctccctccacttggctcccctggtcccgctcgctcggccgggagctgctctgtgcttttctctctgattctccagcgacaggacccggcgccgggcactgagcaccgccaccatggggaagggggtgagtgtccggcgcgcccggggagggggctcggggagccctcgaggggaagaggaggaagtcgggagggcgaccgcggccagcgggaggcggcggaggaggaagcggcgccgcgtggagtgggctggcagagccgcgcggcttaaaagacgacgcagtttggaaatggagggagcgcagtaacggggggcgggggaagggagcgccgaggggctggagcgcggcattgcttaggggggtgggcggaccctgggcgggggctgcgcgccccggaggccgagcgggccgggggctccgagaggcggtgcttgggaagcctcggggccgggaggagggggcttgcagcagcgggggcggccccgggactgagccggcatccctgagcctggctcccctccctgcgaccgccgtcacctccttctccttccttttccctccgccctccgtgccctgaggaaaggcgcgctcctccccttcc

SEQ ID NO: 6567 - DNA, 1179 bp, Homo sapiens
tcaaagaactgctatatattaaaagagatcatagcagctgtacagatctcatctagtcgtagaggttaatgttgaacatatactttttaaaagctgttagagggtaggaaaagttattcagtcactctggcataaccagagataacagaaggaacttaggttgataccatgagtctttgcttttctctgtattatatcaaacattgggaaattcagcctctccaggcgatggaagcttccatagacttaacctgtctagaatcgacctggtcatcagagaaggcagataaggttttactagatccctgagagctgctgggtttctctgaagtgttatggcaaatagtaatgggccacggtcactcagctttagccattctccagtgaagagctgtcaatgataactgtgtggttgcaaagccacaaagcgatggtgaaaattgtaccaacttatgcactgaagaaaacatctgcactttgtttaataagcttaatgatagtaatgaataatgctattttttctgtcatttttttatactacactgtttaactattttctttgtttctgttttcccttaggatgatcataaacttagccttgatgaacttcatcgtaaatatggaacagacttgagccgggtatgttctagtttgaaagctgttgtacaaaatcctagttttccgtattatattttcccctgtattacatacaggtctaacctcaggggctctagtaagaaaatgacagacaccatctgcgtatctaccatgtgacatgcacagaatttgggcatttatatgctaccgtttcttttccctgaaactttttgaaagtagatgttattttcttttccctattttatagcagttgagagccagtaagtgggaacaccaggacttgcagttggcttcaaagccatgcttatgccttgaccttttgatgataaattttccctttatttttctacatttgttaaatagagttgaatctttcacctagttgaatcttcaacaattcccatttttgcacttttcccagctagcccattgcagtgtgttatggttatactatcatttgtttagttattctatcatttagttggaaattgttttgtacaaaaattaaagaaaccttttcataaaataggcgttatgtatccttgttatgtagaggatttt

SEQ ID NO: 6568 - DNA, 1359 bp, Homo sapiens
tgggtgtggtgctatcagccgttgtaatcataactggttgcttctcctactatcaagaagctaaaagttcaaagatcatggaatccttcaaaaacatggtccctcaggtaccagacgctttgtccttccccagtggatgacttgacagccccaagcatgtcagcctgtgaattagtgtgaagttaaggttttccaagtattacatgactcatcagagagatggatgtcttctaccccacccaaaaccaacctattttccttctatccaaaaagtggtagcctttcttttgaatgtaaactctgaatacaggcacaccatgtaacagcaatatctcttaaactggcgagcaagcttttgtaacttgtgtaaataaaaaagtgaataatatctttgttttgtattcaggtaattaggattatgactatttttattttcttgttttggacactaccttctctttgttggtatactaacggtgtaaattgtttcttttccaaagcaagcccttgtgattcgaaatggtgagaaaatgagcataaatgcggaggaagttgtggttggggatctggtggaagtaaaaggaggagaccgaattcctgctgacctcagaatcatatctgcaaatggctgcaaggtagctcttttattttaacaaacctcatagctagctctgctgttcgggcagcttgatttgaggggtacagtagcccatgataaggctggtgtattcacatgacatttttcttcttttcctcacatataggtggataactcctcgctcactggtgaatcagaaccccagactaggtctccagatttcacaaatgaaaaccccctggagacgaggaacattgccttcttttcaaccaattgtgttgaaggtaggccatttttgggcactttgagcatggcgtggtatttctcttgggcattaacaaaatcaaaaccataggcacaatctcttgttttattggctccatttctgagaacttgtgtcaagcacagagcagaggtgttttcctagctggcaggaaaccttgtggcagtttcccttccctccacctccaccctgcctcttctgtcaacaacaccagtctggcatgggtgttggagctgctgtcctgctactggagagaagtccctttgccaaacagcatgtacagccaaagagctggcccttaaaaagtgcttttatcaactctttttgtttttttagtcatcctatgtaattgtgtaaaatccgtggcttccttcaggttagatacaattaggtacagttctccctccccttctttttaaggcaccgcacgtggtattgttgtctacactggggatcgcactgtgatgggaagaattgc

SEQ ID NO: 6569 - DNA, 1174 bp, Homo sapiens
atggtcaccctgactcagatcagcttgcacgaatgttacactcttccgctatcctattctaaggtattgccaacttatgttttattctggatgtttgatatagttcttcttgagagccacatcacgtggtgaattttgacagtgagaaaacctcagcatttgtttatacgtaagataaccccaaagcatacattttgcttttaaattatcacgtggtcctgaacagtgcagtggagaaaggagaagaacttgggatcaagtagggggatagaatatggtagaatcctgttattatttttcttaatagattgcttttctggaaggaaggggaagcctcatgtatgggttccccttattatttcttcaaacttcagaagaaggttggagagatttaattttagacaaatttcttccacattaggatatagcaagaatctgtatagaattccagcctggttgagtgaagtaataatcttcctaatattttttaggtctgtctgacacttactgccaaacgcatggcaaggaaaaactgcttagtgaagaacttagaagctgtggagaccttggggtccacgtccaccatctgctctgataaaactggaactctgactcagaaccggatgacagtggcccacatgtggtttgacaatcaaatccatgaagctgatacgacagagaatcagagtggtaaggccagggttaccacacacctcagccacctgctgacttcgcttggttttttttcttttaagaaattgcatgaaatttcttttttttttttaagctcatggcagctttttctttcttttttgttttttttttttttatcatttagtgaagagtcaagggtatgggatattgattttttgcatgtcagtagaaactttaaattgccctacaaacgtgactgaagaatgcctaaaatgtgattggtttcattaattgggaaatgagatgtatcactgcagatttctatgggactttaataggagaactgagaacacagcctttgaagttaatgcattgttgttctgttgtgttttcttgcctccatcaggtgtctcttttgacaagacttcagctacctggcttgctctgtccagaattgcaggtctttgtaacagggcagtgtttcaggctaaccaggaaaacctacctattcttaaggtat

SEQ ID NO: 6570 - DNA, 1173 bp, Homo sapiens
gctcagtaatatgtttcagttaaatgaacaagagagcagaggtatggccttgatgtttccagagaaggcagctgaggcagataattccatgatttgccaaatccaaataacttaatgtcatcatcagtgggcaagtctagaaccctaatatcctggtgctcaaaattagtgttatcaattcagtcttctccacattaaacaatttccaattcctttgaggcctggtgtgatggattctgtctttcaaatgctttttttctttcagtgactctatcgttcataaatgttaaataaaaccctcactctgttataaaaatatagactttaaaaattttccaaagtaaacactccagagaaaggtaggcgggctgaataggctgctgttgtccttcttactgcccagcgtcactgaaattttcaaaggctcctgtcctcctcgcaggtttctgccacctctttctgccagatgaacagtttcctgaagggttccagtttgacactgacgatgtgaatttccctatcgataatctgtgctttgttgggctcatctccatgattgaccctccacgggcggccgttcctgatgccgtgggcaaatgtcgaagtgctggaattaaggtagtgcccaggcgcctccttggcttcatctcttagtgccttgggacaccctactcagtgaatgttgccttttgaggtccagatggccagctgttctatctcacctggagtattaatttctcatctccaaagctttacttccacccagaaaagaccagatagtattaaaatatgatggtgtaaacacacgaggaattaaaaattttttggaaagcaattgtgtaaaaaagaaatgtaagcaaagtaaaaacagcaaaagacttgaagttttaaaatacttgcattattctaagttaatgtaccttatgcaatgaatggcatatcttctgtgttttcagttaactgtttgttaatgagtgtttggtgtcctctgtgtatctgtctttttttaagtagctgaatattactcaagtgcactaatatcctgttgctgggtatttggtttctgttttttactctcaggattttattttatttattttttgagacagagtcttgctctattgcccaggctggaatgtcatagcacgatctcggctcactgcaacctccgcc

SEQ ID NO: 6571 - DNA, 1106 bp, Homo sapiens
tattctaagtataatcactgcatcaaaaaataacaattttgaattcttgtcacatgttgcttttcctccaagttgtgccaatttgagaatgctagccagtagcatgtggtgtcttcacagtcccaccagcatcagatttttatcctttttttttttttttttttttgctggttttagtaattttcaagtatttttatgtaactctgtagaaggaaaaatagacattgtgtatgctagtgattgtataccaagataaaacctgagtattgcctttgtgtttcctttctgtggatatatatgtttatatttttggctaatcgatgtttattagttttatatttgcattcctttccttttgatagtctaagccgaatcatccttagtatttactcttgcctactggatataagactttaaggtcatttacttggcagttgcattcaacacattgtcttgtttattacaggtcatcatggtcacaggagaccatccaatcacagctaaagctattgccaaaggtgtgggcatcatctcagaaggcaatgagaccgtggaagacattgctgcccgcctcaacatcccagtcagccaggtgaaccccaggtaaggcaggaagctcaaatcacagtctgctgtgaacaagcaaatagtgatggtttaaaatcttcagcgtggttctataatggtttgcatctaggcttgctctgagtaggaaatgtacctgcactgccagaaagcaaccttgtcattcctaagaagggttttaagtaagagcaagtcataataattagcacttagatggtatttactgttctaagagcttgatatggtgacctattatttgcagagcagggaaggtaaggattcaagaggcttttgaagtacctcagaactggtgaaatcatgcagtaaattcagcagtctagcttctgatttcatgctgttaaccactgagctctactgcctagcacctagcatcttgacactttccaggtccacactaacaaaataaaataaggaagggacaattacttaggccattcaggcaaacacaggagacatttggcaatgaagtaaaacagataatagcaaattggttttgtttt

SEQ ID NO: 6572 - DNA, 1147 bp, Homo sapiens
ctcatcatcaggcgacgccctggcggtaattatgggcattctgactttggttggaggaggagtgggaggggctatagttctattggttttttgtttccctcaaggtgtctaggctccctcagtggtcagtctgattagctaaggtgactggaccagcaaactgaccatagtcacatcttcagaatgtagatctcagttacagtttgaggactggtcatgttttagactttaaaatacaaaccaagtatgatttagtgaaaacttgtcagaatctaaaccatctttccaggtaacttggtattcctaaaaacatgtaaataagtacagttgaggtcccatgtttggattttaacacacccgacccccatcatcctccggttggttttcatccctgtttccctctgtaatgctggagcgaggaagactcactgtagtgtgtcttgtctgtctctttgccacccacaggctgggtggagaaggaaacctactattagccccccgtcctgcacgccgtggagcatcaggccacacactctgcatccgacacccaccccctctttgtgtacttcagtcttggagtttggaactctaccctggtaggaaagcaccgcagcatgtggggaagcaagacgtcctggaatgaagcatgtagctctatggggggaggggggagggctgcctgaaaaccatccatctgtggaaatgacagcggggaaggtttttatgtgcctttttgtttttgtaaaaaaggaacacccggaaagactgaaagaatacattttatatctggatttttacaaataaagatggctattataatggaatttgtctgtgccctcgtcgcttctttggtacagatgtctatgtgatctggagctgtggttttcaacatgagtccctgaccagcagtttatcagcatcacctggttgcttgctaggaaggcgggcccagacccactgagtcagaaatgcatcagcaatgtggcttaataagccctcaggtgattttgatttacattcaagtttggaaaccactggctaagaggaagcattctgcccgtgctcttttagttggagtaggtgagtttacctgacccattttttctggctgctgcctggggtgatagggctgtaactccacctgctg

SEQ ID NO: 6573 - DNA, 1068 bp, Homo sapiens
catttctatggaaatgcgatgtcagatggatggtaatggtgccctccagtggctgtgagacctcattgcgcattgtctactggagctttagtcttctgagacggaggaaaactgctgaatactctggattcatctatgtctacaatgttgcatttatgaaaaactacactgtgctaggcgcattctaggacatgaatatgaccacaccctctttcaccgggtgtttctgtagcaagttttcatattcttttcaaacaatggtttctctgcgttaattattgaggaaaaaaaaagatggggtaagaaaactacccatgcatgatgtagagagctgttgatttgtttctgtttttttaaaggaaaactatttgtaagatgttgcactaaaacattttatatacacttcagagacctgtagtaaattatgttgaaaatacggctgtttacatttactgcagtcttctatccttctttccccttactaaccagcccccttcctctgtggaactgtgctgtgggagcctacagttctgcccttggcattggcctgctaggctcaaggtctgtgaattgcagtctttattattacaccccataaccttcaaatgataaaaacacctcttcctcaagacacttcactgccatctgctgcaacatatagtaaatagacacctccaccccgatgatcaaggctatgctacctctagagctgtgcaacacacaacacacctagcccctgaaagccaggttcagaatgtagatcttataacctgtagcgtttttgttggggggtggggtgggggtagaagccggatgagaaggagagcaggaacacaggatggccttctctagggcctctgcggcaagtccacaccatccttttccaactatgaagtgctgccctggccatgaaatgcagcggggatttcccagaatggtgataaaagcaggagttgtgcattctagttaagtgagactgcacagcgcactggtctctgtttcctcttccagtgttgggaggggtttacatctgcaaattgagaagaatgttagaatgattaaaaccat

SEQ ID NO: 6574 - DNA, 1116 bp, Homo sapiens
ttggacagttgacagcacccaaactctggggtgcatgtgtgtggaaagttgtcagacttgaaaagtgttccaagttcccagtcagtcacagagacagactgcctctcggtggcagtcttggttggttagctatttgcgcgcaaatgttgtgatcctgccattatagatttcttgtttctgtttttagtaatgtagtgagtagctccaggtgccacatctactcacagatttatctagtattctcagatagatgttacagggcttcttattctttgtaatgtactctttttaaatccctttagtttaccctttttggattccttaatgtggacgaatttctcttacgtacaactgacagcaaaaggaagggcgaactttctagtgacaaggaatctcttccaagactttgtttttgcacatttgaaaatgccacccatggatcaaaatatacccaaacgttttttactttcttaacaagacttaagaattgtgtgtagtgtgggcaaaatttgtatgttgtcttttccctcagctggagttattggaaccactttgtagtcaagacgaaagcactgaattttgcttcaaagaactgtgtatgtacaagagaaatcctgcataaccccattaggagtagatggtgcccggcctatctgtcagggaggcaaaaaaggcttcatcccatccttgccaaaaaataagaaaactgtcttggagaatgggtcagaagccccaaacggcacacactttccaaattaaagtgggcaggggctgcttttagcagctgctgacctgcagatttgtcaaagccagtgactagagaaggaagggagaaaggctggctgttggcttgctctgagctgcaaggatggtctctaactgattaactgtgagcaggtgggcctgtgtcttcaggtgctttgccaaactcttaaaagaaagtgtccagtgaacttggaagtgggcccctgagctgagcacagggccaaagcagccatggcagacacctgacggagggcacggggctggctgacactaagtttggtgggacagtgaggggtgggaggggggtttccagggcctggtgttggagagtgcagagaaatatctacctcc

SEQ ID NO: 6575 - DNA, 3099 bp, Homo sapiens
cccaaagcggcctccctcgcagcactgactggcttcccctttgatctctccctcccagtgctgaacgccttcaagtatcccttgctgatcggcgtcggtctgtccacggtcatcgggctcctgtcctgtctcatcgggtactgcagctcccactggtgttgtaagaaggaggttcaggagacacggcgcgagcgccgcaggctcatgtcgatggagatggactaggctggcccgggaggggagtgacagagggacgttctaggagcaattggggcaagaagaggacagtgatattttaaaacaaagtgtgttacactaaaaaccagtcctctctaatctcaggtgggacttggcgctctctcttttctgcatgtcaagttctgagcgcggacatgtttaccagcacacggctcttcttcccacggcactttctgatgtaacaatcgagtgtgtgttttcccaactgcagctttttaatggttaaccttcatctaattttttttctcccactggtttatagatcctctgacttgtgtgtgtttatagcttttgtttcgcggggttgtggtgaggaaggggtgatggcatgcggagttctttatcttcagtgagaatgtgcctgcccgcctgagagccagcttccgcgttggaggcacgtgttcagagagctgctgagcgccaccctctacccggctgacagacaacacagacctgtgccgaaggctaatttgtggcttttacgaccctaccccaccccctgttttcaggggtttagactacatttgaaatccaaacttggagtatataacttcttattgagcccaactgctttttttttttttttttttgcttctctgccccttttccatttcttttgtatttgttttctgtgagagcactgaaatggcagccctggaatctacaatttggctctccactgagcaccttatcttgccaccttagccttaagaatgaatatgaagaaaaatacacagccacctctgtccagggcagtaagaagggctgcaaggaaggggaggatggggacaaggaaaggatcagatacctgctccagtagttgtgaggccactgtgtctcaggggactccaggaggagcagaagagggatcccacgaagttattcttacgcagctggggccaggagggtcagagtggtgccaggtgcaagttaggctaaagaagccaccactattcctctctcttgcccattgtggggggcaaaggcattggtcaccaagagtcttgcagggggacccacagatatgccatgtccttcacacgtgcttgggctccttaacctgaaggcaaattgctacttgcaagactgactgacttcaaggaatcagaaattacctagaagcaccatgttttttctatgaccttttcagtccttcaggtcattttaaggtccactgcagggggttagtgagaaagggtatactttgtggtatgttttgctttcctaatagggacatgaaggaaacccagcaatttgctgttatgtgaatggcctgtagagcagagtcaagagcggtgtgctttgcccgactgctcccatcaggaataggagagtagacagagatcttccacatcccaggcttctgctgctgctttaaaagctctgtccttggagcctcccgctccctgaagtgtctcgccccctgcacagcactggcctttcggaagcatcccagtagggttttctgaggctcgctggtgactcatgccctaattgcaatcctctgcttttatcttgactttgaaggatctaacactgctctctcttccaaaggggaaaaaaagattcatttgttttgagcaataaactaatacaaaatgatggccattcatgtgcagctctttgtcaccatgggccggatgagttgtgctcctcctggctcaccatttccccctgctcccccacagccggttctgcacttatcaccgagtcgcccctggaagcagattcccattgagttttccccaccaaggggaccatgcacatggtagaaacattagattctgcattgacagtagcctttccttggcccgggcctgtggtgggaagacgggcaacaagtataccccaccagggcctgagtgactagaggaagaggacgaggccttgttggcactagatttgggtattttctgcatgtcataacatatcctaactgctatttcagaagaggcagcttgtaggtgattgtacaagtgagaattaaagagagaacagatatttaaacaggtgctgtattagtaacagccagtgccctttcagcccttgcatctattaaaaggagattcaggattttattggcacaggcccttcttagtaggaagaaagggtgcttagctttggacctgaccgggtgtgtgtaaaaccatggactgagtcacagcagacactcgatggtggtaaatgtgatgggtgcttacacactgtaccttttcctttcatactgatgctgcagttcagggctggagttgttaaggcattgacctccacccacctgccccatgtccactgggctgcccaagctgcatgtcacctgagggctggcaggaaggggcgagaaatcccagggcattgtaccaaggacctagttccttctagggatataaatttccaggaatgtgtatttttaatgtggtgagatgcactcttttgttgtaccaaatagggctccccaccccacccctgcgacaagtgctcttctagaacaggttcctaccagcagcactggtgtgaatgaaagagagacccagccgcgtctcacacaggtggaattgcacttcttaacaaaaaggaactttataaaagtttgggattttttttcctaatcataaaaatagccccagaaagagcctaagctatgttcagatagaagcctcgaaattcctgtaaattgtttactttatgatgtttacatacacgtttcactttgaaaaaaaatgcaaatcgactttttaacaactgttgagatgtttcatgggacagtagaactctgactcaccaactgggctaaattttaatttaaaaatgtatttatttgagtgtctttccccccctcaccct

SEQ ID NO: 6576 - DNA, 1164 bp, Homo sapiens
cgaagtgggagaccttcctccctgtttgcagacgtccgtgggagacccttattttttccaccgctaaggttaagagattctggaatagaagcgtcgaaggagatcaagtgaaccttctacaactcctcggatgtcgccagtctccctttcggggcggaagactacgtttgagcatctcactgaggtgcaggaatggaagaacccaccttgcagcttttctgcagtgtggcttgcctgatctacccctaggaatgaagaggaggcttgtaataatccgatgaagtacagatgttgaagaggatatcgcaggacctaaacttgtgatcgtttgggggaggtcacacacgtttctgagtgggaatggatgggcgtgaatgacgtgccctcttaaaaagcacaacagtcctttaagaggagcaaaattgagttttcccattttggccaagattttgaagacagttcaatgtattctacatttgacataagatgagaactttctaaagtattctctccaagagcgtaaacgatgactaccccagccctgctgcccctctctggacgtaggataccacctctgaacctggggccgccttccttcccacatcacagggctaccttgagactttctgagaagtttattcttctccttattcttagtgccttcatcactctgtgttttggggcattctttttccttccagactcttcaaaacacaaacgctttgatttgggtttagaagatgtgttaattccacatgtagatgccggtaaaggggctaaaaaccccggagtcttcctgatccatggacccgatgaacatagacacaggtttgtttatttcagaagttctggtactaacatttggcagagcaaggtacggtgattggatcgaatctgtcttttttttttcttgcagtaaaatgtaatttttcgagtcataaatattgtattgttacttcaagactggctgaataaaaccatagactggagggactctacctccagtctatggtagagtccatagactggtaggactggagtcctacctaagtcgttcttctcttcggttttatataagaaaaacatttgcgttcagagttgtgtctaatgtggacatctgggaagggaggtatgaaaacttaacctaaagaaatggtgacataa

SEQ ID NO: 6577 - DNA, 1201 bp, Homo sapiens
aaggaaacttcttaccctgataagggcatatatgaaaaacctacagctaacatcatattgaaaaactgaatgtgttgctcttaagattaggaacaagacaaaggtgtctgctctcttcaccacacctggccggatttttttttaaactgttttatttcagtaggtctagttgttcatcttactggatttcttatacactattctgaaacctcttgtctttgtgtttagatcatttgggtgtctgaggtttatttctttgatgtttttcatcaaagctgctcaaaatacgttattggttttctgtgccattaaaagtgagctcacttcatgttcttgttgaattctaactgaagctcatttctcccctttttattttcagatatttgtatctgctgttctccggtgatgaccttttacctttagaccactgggtgtttaatacagaggctcaccctctgcctgtgttacatttagccaacaccacactttcaggtaatcctgctgttcgatgaaagcagttccagaaggaccattctcacctgtgttttgtttacatggaccactacagaaattagtttgaaggggcggcttttgaaaacctggacctctatgtcaacatgacagggtgaaactattccccctaagactgttcaacttgtagatacatcaactttgaaattattccattttatacctgaccaaaacatgttctgatatgtgtaggacagagacctggatgtgctttgatcgttaatgaggtggtcacatgagaaatgatacctgttactactgtattgtttttagagtcctgaagtctggaggctagacttcctgaaagcaagtcaagaatatagagcaccttgcaggagttcaagatggcctttggaaccaattatgtatttgtttcctcctacagtggagcagcattcaaatcaaatatttacatattgcttatcactttttctccattttaataatggaatgaactaaaataaacaagaacaaaagaatagtataattatatcagtaacaagaagactcaaaaaagaaacaggagtacctatccctatctgaattttcaagttccccattggatgaccagactggcaaccatttcaaatcccagtctatttcattgaaatttcttggttaagtttaattttctctgggggcatgatctcacaaagaatactcaagtctt

SEQ ID NO: 6578 - DNA, 2610 bp, Homo sapiens
agaattccaaagaatcagaatagtttcaaaataattttcagtgataaaagagtgttgtaattaatcatattacactaaaattgggatacatctaaggaactttatcttactatcagtaggttttgcattgatatttctttttaaataaactactagttctttatattttgacaaaaagaacttaaattttatcaggaactgtaagataaatatctagtgcttataaattttctgtccttaaatttatgtgacagtgcaagatacttttgctcttttcatttaatataggcatcttccattgacattaataaaacttagaaacagtataattagtataacatttactctgaatttgaagatttcctgaaacaaagtttgtacaagaagcccaccttggaattctgaaggcttattttcttgtttgataagcttttcttttaaacttaggttttaagttggggaaagacttaattaactaatatagtattttctaaggttgatcatcttataccacgaatcgttaattttgacagttctactgatccgtaaatgataaccactgcaaattttttcagtataaaatttttcactgcaaaaaaatttcagtagaaaataaggatgcagggccagttacaatagtccttaagagagttaaattatagcacatgttttgacattgtaatatcttttactacttgaacatttaaatttctaaatgagaaaggtatatatattactgtaactgtagaagggaaaagggaaagtatttggttctaaaaaatgttagccttcctcgtaaaagtagcacaagcccacttatgaatcactgagaaaaagtgaaaaacttgagttggcaaagatgcagagcagcagtgcagatggcaatgaactctctgaattctcttttaccttatttagaagaatgcagagtaaagggaccttcttggttctgcaggaacttctcaagggatgaggagacagaacccctacttccaagtgctctatttgtattacccagatgactgaagcttaagagaaggcagggaagtatacaagcagagccagttctggtacaaacaaagaatttgacagggacaatggaagggtcttcttcaccactccttaccttctatgtgatggaaagactagagcttataaaagtacttccatttttttattctcctgaataccaaaggcaattaaagtcagctacaaatgacttgccagtgtcatgttttatttttgttatagatttttaaattatttccttcaagatcaattcttatcccatataatgcttagcttccaagaatattctttactttcttctgtcttttacagctctttgcattttgtagaccttaatactcaggttaaatattcattgcatttataagatcttctgcaaaaagcccagaaatggtccttttcaggtgcctcttcaaagagctgacaccttaccttgtgcctttggcacaaatgtgcagaatagatacatcagttggtgcataatcgaaaaaaataggaattttgaacactgttcttccttctacatttatttctcttcattttagaatcacactttttatgttaaaccagattattattattattattattcaaccagtattaagttgttaaaaccaagggaatggggccctaaccaaaaagaagtctcaactcagaaaaataagtccccagtcaggtggttcttactttcttgtgggttgcacattttgtatctctctaacatcagcgtattcctgactttaagcaggtgtttatatgtaaaataaaacctgggtatcgaagggaaatgcattctttttatggagtattgaccctgatcctctatgatgtcatatagagcaactcagggctatacttgctagattttaaccaagcagtttgaaatattaatcatcatcctctcatcttctccactctccattgccaaagtctttgtcaaaactccaaatttgttgataaaagattgtgtttgccattctcatttataatgcagtttctccttaagcctggagttttttgaatgagtgcatgagtaaatgagagaatgtgtgaacgaacatttatgaagtatctaacatgtgccaagcattgtgcctggcactttcaatcattagaatgttttatgtgattccacagcattttctgtatgagagtagctcacaacattttaaatgtttccaatatgaatcgtgttacaaaattcttaattttatatttcatataaattaaagaggaaaaagaaaaggtttataatatattttaaaacaatgtgttactgtataatacaactataattgtagttaataactaaaacctcttgaaaatgtcaaagaaatacttgatttctgatgcaactttgactaaaatatttactttagaaataaaaacgttcttattttgctatatcactttaattgcataattaaaaagcagtgttttatagaaatgctggttattttatattcaaaaagattttgtcacataattcatgggtaaaacttgcagttgtaaattgtgtctgctctggtatgggccctattaatagtcccatgctgttaaatataaagaaaaatatactaa

SEQ ID NO: 6579 - DNA, 1487 bp, Homo sapiens
ataaaataatgaggcaaattcctagtgtgatttagaaatagtatagtatgctgtgctttgtctttagcaatacccaccaccgataaatccatatttgagatagtttttgttagaattagtaggaatagaaaaaacaaacaagaaaagttcttaatgagggaaagataagtaacaacacctgaagctttggttaccctaactctcatacgctgctataatgaattgaagtgggagaaaattttttaatatttcttgtattgcactccaggatgttatcggcttcaatatggctggtcttgattatctcaagagggaatgcgaggcaaaaagtgaagttatgttttttgctgatgctactagccacttggaagagaagaagaggaagaggaaaaagagggagaagttgattctaacgttgacttagaactgaaatgtggtatctttttttttttcaactttttcctttaaaggactcctaaactaagcacagaagagttggcgtcatcttaaaaataccaaataacagaagatcgcattgcagatgatatcaggatgtggtttccagctttgcctgagggaattccaacatgagattatgggctggctccatttcttggacttaaaatgcattattagtttaaaaatctttctgtgctctcaaagcttgagccttgcagctcaagcttgttgttccctttatattctagcagggaataaataattgttttaattaggtatttgtttcattggagttgaaattaacatttcaaaagtttttcgtatttttttatggcagatgatttgtcatttatttatattaggttttactgcctattgagacaaccaggtgcataattgattgccctttggccataaaaatgcagtgtcatggatcttagagctaaaaaggactgtaaaaattacccagaacagcgtcctcagacttaaccttctgcaagttatgtctgtatataagaagattctaattgctaactgtttatacttttctgaataaaatagttgtttctaattaaaaagtagccaagctaagatgcctggctgggcttctgaggaattaatacactcgtgtgtgtgtgtgtgtgtgtgtgtgtgtgtgtgtgtgtatgtgtatgtgtatgtacacatacatatatatagttgacacttgaaaaatgcaggtggtaggggcactgacccacccctacgccccgcacagtcaaaaatctgcatataacttttgattccccaaagtcttaagtactagtagcctgttattgactgggagcctgactgatgtattatatatattgtatactgtattcttaaagtaagctagagaaaagaaaatgttacttagaaaatcataaggaagagaaaatatatttactgtgtttatcaatactataagtgtatgtcatctgtttataaaatgaattgtctgtctggattggcaggcaaccacagccgcagacctcaatctgtggtac

SEQ ID NO: 6580 - DNA, 1547 bp, Homo sapiens
cactatggaaagaatctcagaggagaaaaacagataacttgtgataacttccagggaccgaagtctatgcattggtgagggtggacttgtttgcaacctgttgttattttttttaagtgacccaactgttcaagtccaaacttggcccataattattaagagaatcttatccggttaatcagtattaatcaggattcttcagagaaacaaaaccaataggatatatatctatatattagagaatttattatggggattagctcacccaattatgaaggctgagaagttccatgataggctatgtgcaagctggacccaagagagatgatggtgtgatacagtccaagtccttaggctggagaaccaggggaaccaatgatgtaactgtcagtccaaggctgaaggcttgagaacctgggggccactgtaagtcccagagtctaaaggcctgagaaccaggagctgtgatgtcctagggcaggagaggtgaagttccagctcaagaagacagcaaatttgcccttcctctgtctttttcttctagtcagtccctcaactgattggatgtcagcccacatcgatgagggcgtatctcctttattgagtctactgattcaaaggccaatctcttccagaaacaccctcacacacgcgctcagagtaatgctttaccagctatctggatatcccttaactcagtcaagttgacacataaaattatccatcacggccgggcacggtggctcacgcctgtaatcccagcactttgggagaccgaggcgggcggatcacgaggtcaggagatggagaccatcctggctaacatggtgaaaaccccgtctctacttaaaatacaaaaaaaaaaaattagctgagtgtggtggggggcgcctgtagtcccagctactagggaggctgaggcagaagaatggtgtgaacccaggaggtggagcttgcagtgagccgagatcaaaccactacaccccagcctgggcaacagagcgagactccgtctcaaaaaaaaaaaaaaaaaatccatcacacccagtgatctcaggaagttgataaaagagccaacaagtatggaatctagatctattttcacatcccttccacttattgtttataggcccttcacaatctttctaatggagatgacacattggagagaaacctaatttttttttttctgtatgttttgtgggaagttgaaatggtgaaaaatatttcaggtggtaataataatggtcctgtaactggtgctctgaaaccctgcttcaaaccgactttgacagctggtcactcaacacagtgggggtgtcttgccctttgtaggtgacccataaacatttatcaaaagtatgtgtcaaaaaatgggctagagatttctaataaagtgtgaatttttttttgcaaaagccctactgatgtacaccatcaagatgcttatcataataacactattgagttctcattgtgtatcaggcaccatactgaatggcttataacagtgtttttccaagtgtggtccccagaccggcaacatg

SEQ ID NO: 6581 - DNA, 1187 bp, Homo sapiens
gtgccatattttcttaatccagtctatcattgttggacattttctttttgatagtcgaattcccttcaacgtctagcacagtgccttgcacatttacccactcaaaaaaaatttcgtaaggaattaataaatgaatccttaggaggaaaagtgaaaatgaagtttttctctcaggatgaggtgtatttctccgttcatttcagatatgcatcagctagtcagcgtaaattgtgctttttatatgctcaccaggtgtaggtaagagctttggctgagatggagaaattcatcgcgggaggataataaagcgggcagggatttggcaacctcagagccgcgaggaggaggcggagtcgcggagagtttgagtatttccgtccaatcaaaaggagactgtaagaggaggaggaggaggagatgactggggagcgggagctggagaatactgcccagttactctagcgcgccaggccgaaccgcagcttcttggcttaggtacttctactcacagcggccgattccgaggccaactccagcaatggcttttgcaaatctgcggaaagtgctcatcagtgacagcctggacccttgctgccggaagatcttgcaagatggagggctgcaggtggtggaaaagcagaaccttagcaaagaggagctgatagcggagctgcaggtaaggcgagagagagaaaattgaggtctctagggcaacctccatggaaaaaggctggctgcgcccaggccagcgcgcccccctcgcatgcaccccgtatcaattagttccggggcctcctgagattggggggtagagaagaacgggggcgggaggaggcagaaagagggaagaacaaacggcggcgagatgcaaacttttcttttagtttgcaaccgcgtctttcacgttggcatgcctccgctagcattgcaaagtgcgggctgctccaactggtcctgcaggctgctcgcggatgccagcgcgggatgccagcgcggcgccccagcgccttagcgcgcaattgttctggcagcctcgcgccgcctctcccccaacccccaaccgcctccgcgcggggcgatcgggagaggggccccaaagtggcttctttgcggggaacccagggactggcgattcttcccaaccaagttctgggccgccccgccgattctagcctgccttggcggtg

SEQ ID NO: 6582 - DNA, 1206 bp, Homo sapiens
ggcagcatcccagaggtggggacctgatgctgaaggggaggaagggaggctcctgtcaccctttatgacatgttctgcctgacctgcactcttctgttttacccccatctctcctcctccgcttctcccttggcatcccacagctctaaagtctttctggaaattgacaaccgccagtgtgttcaagactcagaccactgcttcaagaacacggatgcagcagcagctctcctggcctctcacgccatacaggggaccctgtcataccctcttgtgtctgtcgtcagtgagtggcactggtgtaaaggggaaaggtggcgggggaagagtgtcaattgggggaacaattttcattatgtagccctctattttttcaggactgttgaggtcaaagttgccctctaaatgaatctaatgctgacattgagaggttaatgttttattcagcactttccctgtctctgtggactttcaggtgaatccctgactccagaacgcactcagctcctctatctccttgctgttgctgttgtcatcattctgtttattattctgctgggggtaatcatggcaaaacgaaagcgtaagcatggctctctctggctgcctgaaggtttcactcttcgccgagatgcaagcaatcacaagcgtcgtgagccagtgggacaggatgctgtggggctgaagtaagaggcattgccaataagccactattcacagtataagtagggatgactagaaaagcatatcttgttgaatcatgattttaaattctaagctctgggcatttactcacattgaccatgattctaaatgccttgtgagtgactgaaaccacagtcagagcgtgggtgcatctattctgtgtatattatcacaatgccgcccagcttctgtgttgaggtgcccttttgttgtaagctcacgatcaatgggaagggaaaggatgaatgccaagggaatgtcaccaaaaatactgcccatcttctctgggccaagaccctgcaaaattgtaatatagccacgggagtgtgtcatggtggaaagtgttgaaaaccactgtattagtttatgactgccattcttattttttctttttataatcatattagaaatctctcagtgcaagtctcagaagctaacctaattggtactggaacaagtgaacactgggtcgatgatgaagggccccagccaaagaaagta

SEQ ID NO: 6583 - DNA, 2145 bp, Homo sapiens
tgggtcatgaggatgataaatcagacgtcttgggcattagattgaagcatctcaaaacacctttttatccccttctatataggcacctgtgtctgctaaaaaagaaaagaaagtttcctgcatgttcattcctgatgggcgggtgtctgtctctgctcgaattgacagaaaaggattctgtgaaggtaaaatcctagtgcttatggcagttaaaacaggaactgggtttaggggcaagggcatgggactggggtagaggaagtgtcattaactatactgagtatcagtaagttttcatctttctcattgctaggtgatgagatttccatccatgctgactttgagaatacatgttcccgaattgtggtccccaaagctgccattgtggcccgccacacttaccttgccaatggccagaccaaggtgctgactcagaagttgtcatcagtcagaggcaatcatattatctcagggacatgcgcatcatggcgtggcaagagccttcgggttcagaagatcaggccttctatcctgggctgcaacatccttcgagttgaatattccttactggtgggtagatgcagggtggcttcagcagagaaattgttcatctgttaccacagctgtcttgtttctccagacctctggtgtaataaactgccatcttcctttctagatctatgttagcgttcctggatccaagaaggtcatccttgacctgcccctggtaattggcagcagatcaggtctaagcagcagaacatccagcatggccagccgaaccagctctgagatgagttgggtagatctgaacatccctgataccccagaaggtgagccagacctaatgtcttttctttgtttctggtctacctgggtttgtaaaattgtgatggtccagcatttcttgggcaggattcttatgtggccatattttcttttctagctcctccctgctatatggatgtcattcctgaagatcaccgattggagagcccaaccactcctctgctagatgacatggatggctctcaagacagccctatctttatgtatgcccctgagttcaagttcatgccaccaccgacttatactgaggtgaggattgtcatctttactgttaaatttgtcctaagctttctataagaagttgacttagacggattgctaaactggtttgttctttttgttcttacctgaactgaaatagtctgtttctttctttaggtggatccctgcatcctcaacaacaatgtgcagtgagcatgtggaagaaaagaagcagctttacctacttgtttctttttgtctctcttcctggacactcactttttcagagactcaacagtctctgcaatggagtgtgggtccaccttagcctctgacttcctaatgtaggaggtggtcagcaggcaatctcctgggccttaaaggatgcggactcatcctcagccagcgcccatgttgtgatacaggggtgtttgttggatgggtttaaaaataactagaaaaactcaggcccatccattttctcagatctccttgaaaattgaggccttttcgatagtttcgggtcaggtaaaaatggcctcctggcgtaagcttttcaaggttttttggaggctttttgtaaattgtgataggaactttggaccttgaacttatgtatcatgtggagaagagccaatttaacaaactaggaagatgaaaagggaaattgtggccaaaactttgggaaaaggaggttcttaaaatcagtgtttcccctttgtgcacttgtagaaaaaaaagaaaaaccttctagagctgatttgatggacaatggagagagctttccctgtgattataaaaaaggaagctagctgctctacggtcatctttgcttaagagtatactttaacctggcttttaaagcagtagtaactgccccaccaaaggtcttaaaagccatttttggagcctattgcactgtgttctcctactgcaaatattttcatatgggaggatggttttctcttcatgtaagtccttggaattgattctaaggtgatgttcttagcactttaattcctgtcaaattttttgttctccccttctgccatcttaaatgtaagctgaaactggtctactgtgtctctagggtta

SEQ ID NO: 6584 - DNA, 1193 bp, Homo sapiens
cactgatggggcccctccctctcttatgatctctggggatgtaaatctgctttcccgtgagggcagtggggtgtaggtatcttattatctcctcagccccactggtagttcctgagattcctacttaggcctccttcctagatcccctgttacttttctgccctggcctactcacccctacccccgtgtgcacttagagcaccatgcctgctctaaccggacattccacacatttcagacgcccacaaagccaagaacctaacaagttggaggagctctctcaaggcagggaaaggggaagggtgtagggaagtaggggaaagagggagaggctctcctgcttctcaagagaataccttcggatccacaggggttgattgctctcatacggcatttctgagatgagtgactgggaggtggggaagtcaggattgagatcttaaactatgcccttgattcttcctagcactatggcccctctgtcatcacctcactagatgaacaggatgcccttggccacttcttccagtaccgagggaccccttctcactttctgggcccactggcccccacgctggggagctcccactgcagcgccactccggcgccccctcctggccgtgtcagcagcattgtggcccctgggggggccttgagggaggggcatggaggacccctgccctcaggtccctctttgactggctgtcggtcagacatcatttccctggactgagttccctggattatggaaacttcgctgtcccccaacactgagcaagtatgctgtggagtcccaaccccagctactctgatccctctgggggctctggccaagggccagacagaccttcacagatgcctacttttggcctcatctctgcctgacaaggccagcacccaaagggttaatatttaacctctttttaaggacactggggtctgtttctggaaatgttctttagatggtggcacattcctttgggtatgttaacctaggcagtgggaggcaaatgggatggtatgtgagctaggagaagggctgaaccctcagccttgactatgtctagagcctcttggggaaggggcacctctcttgaaccccaaatgctctctcttcttattacccaaacccatggctctatttcttcttcacatccattgtctcttcatgtctattccattcccttcggcca

SEQ ID NO: 6585 - DNA, 1183 bp, Homo sapiens
ttagttgccctccctttcttccccagctcaggatgctgacagtcaaatggaaaaaacagggaagcccagctctccatttgactgattatgacataaaccacaaagactgggccgggcacacctgtattctcagcactttgggaaaccaaggcgggatgatcacttgagcccaggaattcaagaccagcctggaaaatatagtgagaccatgtctccaccacccccaaaagattaaaaaattagcggagcatggtggtgcatgcctgtagttccggctacttgggggactgaggtgggaggattgcttgagccggaggtggaagttgcagtgagctgatatcacgccaccgcactccatcctaggtaacagagcaagacccagtctcaaaataaataaataaaataaacacaggtactgaatgactaggaaacaggaaagtgtaagtaaaaaggagggctaagtaactccaggtagaatgagtgtgtgctttgccagttctaaaacagtataatttctgctatttttctttctattggacaaataggaaattcccaaaacaccagaccatgccccatccaggaccttctatttatatactgtgaacatcctgtcagctgcccgaatgttgttgcacaggtgctacaaggtaactcaatctggaccttctccccatttcctccatacggtcaagtacccctcatgtgcccacttcgccctgagctgctgaaatagaactatgtgcattccttgtctgtcttctctttcctcagagcatagccaacttgatagaaaggaggcaatttgaaaccaaagagaataagtaagtaacattttcagttgagttatttacatctttcaagatcaagggcctcaggggaaatttcctctagaaataggaatcaatagacgctgggcctggcagggtggctcatgcctgtaatcccagcacttcgggaggctgaggcgggtggatcacttgaggtcaggagtttgagaccaacctggccaacatggtgaaaccctgtcttcactaaaaatacaaaaattagctgggcatggtggcgggcacctatagtcccagctactcgggaggctaaggcaggagaatcacttaaacccagtgagtggaggttgcagtgaaccaagatcacgccactgcactccagcctgggcgacaaagtg

SEQ ID NO: 6586 - DNA, 2175 bp, Homo sapiens
cctgaatcagggctgtggtaatcatcttaccatagctgtaaattgtatcaaaacaaaaaattagtagatggatttaggaatatgtaagaaactcaacacataatataaatgcaatgaatgtttttcttctttaaatttaaagttagtatctacagatggaattgtatctacaaccaaatgcctcttatccctgaattcagagtgataattttataagtgtgaaacttaattatgtagggctccccccgtctgaatagaattaattccttaaagtctagttagggtcctgctgtctgtcatgttgccttgtaacggatgtttccacctccttctccaacctctaccccaccattagtgtattttactataaaaacagtggaaccacagccctaaagtcctgctgatataaagtccttttgtcttaattgtatttaaaaaaaaaaaaaaactactcttgatcacattagctatgaggcgaggtcaaattcaggtatctaagactaatgattttgttttgtcttgatccccagagagcaaatcaaagaaaaattacagcaagaagagaaaagtggtttatcattgtgtgctttggttttcttattttaattttttttgttttttttttttgagatggagtctcgctctgtcgcctaggctggagtgcagtggcacgatcttggctcattgcaaactctgcctcctgagttcaagcgattctcctacctcagcctccagagtagctgggaccacaggcatttgttaccatgcccagctaattttttgtatatttagtagagatggggtttcaccgtgttagccaggatggtctcaatctcctgaccttgtgctccgcctgcctcagcctcccaaagtgctgggattacaggcgtgagccactgcgcctggcctcttattttaatttttaaagactacttcagttgatgcagtttcccaagaaacctacataacatatattgggagccttatgttgataggaatctgattcccattcctttttgggaatgagttgggcagcatacaggcacagaaagacagatgtttgagacctttgcttctgagattttaaaaaatgattaccgctgggcgcggtggctcacgcctgtaatcccagcactttgggaggccgaggcaggcggatcacaaggtcaagagatcaagaccagcctggccaacaaggtaaaaccttgtctctactaaaaatataaaattagctgggcctggtggtgcatgcctgtaatcccagctactcatgaggctgaggtgggagaatcgcttgaacccaggaggtggaggttgcggtgagccggatcataccaatgcactccagtctgggcaacaagagcgaaactccatctcaaaaaaaaaaaaaaaatccccaactcactgctttttttgtttgtttctgtcgcctaggctggagtgcagtggcacgatctcagctcaccacagcctcgacctcccaggctcaagtgatcctcccacctcagcctaccaagtggctgggactacaggcgtgtgccaccatgcctgggtaatttttgtatttttgtagagatagggttttgccgtgttgcccaggctggtctcaaactcctgggctcaagtgatctgcctgcctcaacctctcaaagtgctcaactcattgtttactgtcttttttcctagtaatcttaaaataatttgcctcacagaaatagagacagtaagtgtctgcagccagttcactgtttttggtaattcattggtcttcaggagttaagattttacattgtcacattttaatttttaagcctatttttcatctctgaaactttccttttctccttggttctggctatacttggactcaaactgatcagtgtgatcatgtccaaaacagcttggcctggaagaggtaggccttattttttcagcctagtagtgtcccatgcacatgctctttgtagcattcaagtgtttaacattggataaattaagaaggtcaagaatgttgttgaaacttcaaggtctcaaaaggaaatgatggggacatagaacaactgttggtgtaccaaaaaaaggtacagaggggcaccatttgtattgtcacacaacaatgatcagaatgatcagtttagaatgatcagaacaaaaacaccactctttaatgggtct

SEQ ID NO: 6587 - DNA, 1228 bp, Homo sapiens
cagtaaacagttctgaaggcaggagtggaacccgggagtattttcatgtctttcatccttgaaagatttttatgtgcctgcattttttttttaattaaaaaatgccttttcattggtcttaagagaccgcattggagaatttcaggcttttgataaatgcttcttcaaagagattttcttctctagtctagccttccacattcttagattaatatggccaaccctgtacacatcactacactaaacactgctctagataaactgctcaagttcatttaactcatttgatgcacctaaaggggttcctcattttaaagatttgttaggccaagaagcaagagagtattcctagtattcccaaccatgaaaagtatcattctttgcaccaaatgttaacaaaatcattttgttctcctgcctcttctttttaaaggtgtttgatgattaagtggggtcactgaattccatttgtggactgaaaagtattcaatccacttttggggttcagagataaaacattttttcccaagtagctggggctcttccattttgcagataagtcaaataatcaacactaaaggaggctaaactgttgatgaatgagagactccctgactgctcagatgaccctagccacactgaaagggcacctacaggtcagtttagctacctcctgtctttcccatgcaaagctgataacacagttgtctttggacttgtagacctcttggattccaggtgtgatggagtaaagtgtgggattgttgttttgctgggatgcaaataactaaatgctttggtggttaattgctaagagtaaatactactttagccatccaaggccaccttctgcagcaaaaggcttttgtggagaaccttttatgttcccaaccactttttgaatggtgtgccatttaaaaatccaggccagatcctattataaccaactctcaggatttacagccttcagttgtactagaattttgtttttatccaatactcattaaataagtgggccacttaggaagattcaaaatcttggttattacatgaagtttgttatatttcttgtcaacagtattgaaatgtaatatgtatgtgttcatgtatgaaaatttttactccacacaggtgtttcagtagagtggggcaggaaaagagatctcttcgatttctttcaggcctgaggcttttgtgaaatgcgtcagccccctgtgacagtaggttt

SEQ ID NO: 6588 - DNA, 1175 bp, Homo sapiens
tctgagttccgcagtatacctggtccagtggacacttgcagaatgccgttggcacatgccactggccattgaggggtccccagatgcataaacagcctgatcctgtagctccccttccccacacggatgcatggaggcaggtggcgaactctaaagcctcactgaaaggcagattgctggactgttagaaggggctcactcacctgcctccaagcgcttgtcttctgtttacataagaattacatctcagcaaagttgaaactatcacacaggatagatgctcagggttgcttgagaatagtcaaaactgagtattaacttcataagtgccaaagacttcaactgcatatatttaaaaaatccagaggagtatgttatggtgagttattttgtaaaatgataattgtccctgttaatttaaatttttccctttgggatttgcttaaagtagggctgtgcctgtatatggaaagggacaaaattggcctttggttttgggcttaattttttattccccaaagactacttgaaaagggttaagatttctgtttttcttcctctctgtaaaggctacagctatgagcgtgtggatggttctgtgagaggagaagagagacacttggccattaagaactttggacagcagcccattttcgtttttctcctgagtactagggcaggtaggctgcaaaggcattgatggaaacagacaaatgagggataatagagtactattacatcccaacggttagtacacttttttccttaattctctgaaaggtgaggttactattgaatgtaaaacaaggtactggacatcaagcatggtgctgttttctatccagcctgtccaaactgtcatctcagcaaagaagtaaggctgaaacctggggttattggaaagtaattctaatctgctttgaccattgacctgggaatgtcctgaaagatttatgtgattttgtggaatgtttcatttacattcagtggaagtagctcttcttcccaaccgtgaatttgggaaataaggtaacagtttgtctactagttgtccttcctctataagtatttctggaatagtgctgaaaagcttaacaaaaatctagttgttaaaaaatgtgattatgttgaaaataccaactttttagaattatttatgacatcatccatatatg

SEQ ID NO: 6589 - DNA, 1233 bp, Homo sapiens
ggccggaggggcgaggcccgcaggcgaggggggcgggtacaagccacttcttgggagccgcggtacgcgcagccttgtgggagttgtagtttccgcagctctgagtctccaggcgaggtgtcaccacaggactcgttttcccgtgctcctgtgcgcgggtccacttgggacgggtccctgagtaggtgaggaggtgggtaggagcttgcttatagaaaagtggaatcgagtagtccttgctggtggagccgctgccgccagggaactcagggccggctcctgttccttcaagagtgctggaggccaaacttgaaatacaagtttaatgttcctcgtcgggcaaaagataaggatccgatctcccccggcccggtgtgcagcaggagcgaccaaccccgacccgggttaaaactcccagggactcttcgctgctgccacctcttgttctctcccccgttcccactcggggtctccctcagggccgggaggcacagcggtccctgcttgctgaagggctggatgtacgcatccgcaggttcccgcggacttgggggcgcccgctgagccccggcgcccgcagaagacttgtgtttgcctcctgcagcctcaacccggagggcagcgagggcctaccaccatgatcactggtgtgttcagcatgcgcttgtggaccccagtgggcgtcctgacctcgctggcgtactgcctgcaccagcggcgggtggccctggccgagctgcaggaggccgatggccagtgtccggtcgaccgcagcctgctgaagttgaaaatggtgcaggtcgtgtttcgacacggggctcggagtcctctcaagccgctcccgctggaggagcaggtgagaggtcggcccgggctggggctggtggggcgaggaccgtgtgccaggccaggagtctcgccctgacacacatcttcagagctttactcgcgcggagcggggctcgggttgggtccagaagaagggaaaacagcagtagccagtgactccccaggctcttgagcaaaggacctgctggggttaggacagccccggaacttccagttttgccctgatggcgcagccatcagtaagcgctgcttaagacgcatgggagtcgcctggggatcctgctacgttgcagattctgattcagcaggtgtggagtagtgccccaggtcagcatttctattaagggtctaggtgaacttgaatacaagggtgcagtgcacttc

SEQ ID NO: 6590 - DNA, 1078 bp, Homo sapiens
aaacaatattgtctttaaccgtcaccacttacatgctcactatgagccagccactattcaaagcactttaatatagttaatcttagttaacatgatcctgataacaatcctacaaattattcctgttttatgggtgggaaaactgaggaacagaacaaataaatccatttccccacagctgacaaatgacagaaccagaattcatatctagatcatccgattcaggctcttttgggggttcccattacaatactgataaactttttacttcttgatttattagctctagacagttgctgtcagctgcatgctatgaaagtaagaaatttgttgttcttatactgcctcctgtcctctacaataacttgatttgttagttatctttacattgtcattttctagttttaaaaaaaatctgtggcaaacatagacattaaatatactcatagggactgtacccatactctagtaaattagatcatgaaaagaaataggcccccactcacccgttcttttgccatgtgcgagtcatgctttgactccaccactattccttctttagaatctggaggggtgtcaagtggatcagccagggaggaaacaatagggattttcttagcttggaaataatcataggccttctttccacagactagaagtgtgacattcttcccactgctctggattctatccaccaccttctcatagggttcatctagcacattcaccccattcacttcaatgatgacatcctcatcctctagcccagccaagtcagcaggaccgcccttctgtacctgtgaacagaagttctgagttatcaatttcaaacagagaaggggacatcagactagctctccttaagaggatagatgaggagctcaagaatttatttttaatcatgttattatttctccttgaggtatagaagttgagaaaggtgttctaatgcttttatatttatgaaggctataacttccatattcacatgattagtggtattataaatagtggttcagcgtcatatgtcttctgggatgaagggggataaataggtcccccttcttcactcccaact

SEQ ID NO: 6591 - DNA, 1371 bp, Homo sapiens
aaaaacgaggcaagagagttaacttgtctagctggcgttaagatttcttccgtatgcaagtctaatggaaagtgaaaaccaagaaaaaaccccaagccgtagaaactatcgcttcacctagcttaaaactggttagtgtgaaatggaccattctgataggataacaagacttttgttacagtgaccattaaggaagcaagactagaatctattatttacatagactccaccccctctgacgacaccgttgtaagttaaccaatgaaagcgcagcactttgcgagtcttcatttgcatacgggctctataagtagcgcataaccagcccgttttgcggtagttcggattacttctttaagtctcttttctcttttttcgcgcaaaaatgccggatccagcgaaatccgctcctgctcccaagaagggctccaaaaaggctgttacgaaagtgcagaagaaggacggcaagaagcgcaagcgcagccgcaaggagagctactccgtttacgtgtacaaggtgctgaagcaggtccaccccgacaccggcatctcgtccaaggccatgggcatcatgaactccttcgtcaacgacatcttcgagcgcatcgcgggagaggcgtcccgcctggcgcactacaacaagcgctccaccatcacatcccgcgagatccagacggccgtgcgcctgctgctgcccggcgagctggccaagcacgccgtgtccgagggcaccaaggcggtcaccaagtacaccagctcgaagtaagagtgtgcaagggacgcaatagatcaaccacctaaccccaaaggctcttttcagagccacttcagtaatcgagaaagcagctgtaaacacttgtcagagcgtttgatagcttttggtcaggtagggagtgttaccatggtcacggatgcattcgggtttaggactaaggagtttcctgtagtcctgtaatgagttggccctcagtcatccccgtccagtcttactgagttgcttgttatctgtgctacgagattcgaaaggtttgactcgttctgggatatttgggagggatggagggaaggaggcggggggtggttctacaccccttcggcctttaacctgtatctttaaagtcgttttcctttttgtttctgaaagtaatgaacgagatgagatttcccatacagatgagaaaccctcggtccgacctcttactatttcttagtgttttaatctgttttccttaccatatacctacaggcgtctgtcacaaactttgtctaatatagccatgtgctttcgtcccttagcctttttgcaagtcctgacttagccatcctcccctaacttccattccagtgacttcaaacagggagatatattgc

SEQ ID NO: 6592 - DNA, 1176 bp, Homo sapiens
atggtagaagagctacagtaacaggtaacctgaaacaggctgatagctcatagaagggcatgcttgaattcggggaaaaaaaaaatctctgttaaaatgggatgcaaaacactttatacattgcttttacaaaagttagactaatttaaaggaaagtcttcaaaaacaatccgtgatcgataaaattacagaaaaaaatcaggaaagggggaaataataagggaagaaagattagcagaacaatcttccgccccagtaaagaggattgaattttaaccaatgagatcacaagtttgaaaatttccttttcaggcccaatcaagaggagactatgtctataaatatgactgcctagaccctctcctatcaatgagacagcatggcccgtactaagcagactgcccgcaagtcgaccggcggcaaggccccgaggaagcagctggctaccaaagcggcccgcaagagcgcgccggccacgggcggggtgaagaagccgcaccgctaccggcccggcaccgtggctctgcgggagatccggcgctaccagaagtctacggagctgctgatccgcaagctgcccttccagcggctggtacgcgagatcgcgcaggactttaagacggacctgcgcttccagagctcggccgtgatggcgctgcaggaggccagcgaggcctacctggtggggctgttcgaagacacgaacctgtgcgccatccatgccaagcgcgtgaccatcatgcccaaggacatccagttggcccgccgcatccgcggggagcgggcctaaggcatatttttaagtggtcgatctaaaggctcttttcagagccactgccgttttcatcaagagcagctgtaccggctctccatctgatgtgcgtctgccttgcgcagcggtcaggggccaggggcactcgtggtgggtgacgttacagaacccaaagcccagccgtgagttggccggcagtagagaaagccgcagaggcatggtccttgtggttccggccgagcgttttcacgctggtttaaggctagaggtccggctcccaattctgtgggtaaagttttgcatgggggcaagagactatggggagtttctagatgtggaagatcctgagtgtaagggtggggcgagtcccttaaaaattataaacccgtttcctggtttattta

SEQ ID NO: 6593 - DNA, 1200 bp, Homo sapiens
ttgcggctgcgcttgcgcttcttgccgtctttcttctgggctttggtgacggctttcttggagcccttcttgggagccggcgcgaactttgcaggctcaggcatggccagacccaagaccgacaccgacccccgagaacgcaagcagagcggtaggctcggggtctaccggaaacgactgtgtacttacagaggctgtgcgcatgacgctgcgttatggttcgcgagttttccgcggcgcgcaatgcgagggagacgagattatgtaaatgagtggattctggctgagctatcctattggctatcgggacaaaatttgcttgagccaatcaaagtgctccgtggacaatcgccgttctgtctataaaaaggtgaagcagcggcgttttcggcgactttcccgatcgccaggcaggagtttctctcggtgactactatcgctgtcatgtctggtcgtggcaagcaaggaggcaaggcccgcgccaaggccaagtcgcgctcgtcccgcgctggccttcagttcccggtagggcgagtgcatcgcttgctgcgcaaaggcaactacgcggagcgagtgggggccggcgcgcccgtctacatggctgcggtcctcgagtatctgaccgccgagatcctggagctggcgggcaacgcggctcgggacaacaagaagacgcgcatcatccctcgtcacctccagctggccatccgcaacgacgaggaactgaacaagctgctgggcaaagtcaccatcgcccagggcggcgtcttgcctaacatccaggccgtactgctccctaagaagacggagagtcaccacaaggcaaagggcaagtgaggctgacgtccggcccaagtgggcccagcccggcccgcgtctcgaaggggcacctgtgaactcaaaaggctcttttcagagccacccacgttttcaaataaaagagttgttaatgctggccactctcagtccagcgttcctcagtagtgaatagcgaacctggagctgacgggacgggacgggacgggacgggacggggcggggcggggcggggtgtgtgtgtgtgcgcgccgtcttccatctggagcacgtaactgccttggctcttcgatgagtgggtccccagtcctaggacttcccagggcaggtgcaggcaccaaacgtcctgggcgccgccacggtccgctccacacagtcacaaac

SEQ ID NO: 6594 - DNA, 1200 bp, Homo sapiens; identical to SEQ ID NO: 6593

SEQ ID NO: 6595 - DNA, 1476 bp, Homo sapiens
ctctctgccccatctccaatggagtaagtattactgtaggataggcctccgcttctcccttaacctatgctgcatttattgaaagttacaagatttaaccagaagtttttcctccatactggtttttatcaacaaaataaaaagattatatccaaagattttttaaagattcagtctttttaaggagtggagatggtgttaaactcagtgctgtagagggcagtggaagggaagtaccttccctctattagctcagtttttttttttctatcaagcgaaactaaggcccacagacaaacaagaattagcagtgacttcgtgttgtatatctgcggggtgatactgagcccaaaagaataaagctggttttgaatgtgttctgagaacctagcttttgccattcttaactccttttagccatgtgtccaaggttccagtcacattttttttctcaataaagagtatttcagagatgattgtctctgaattactcagacacctctggactctgagtcttctttctttttcctttttctttctttcttttttttttggtttgagacggagtctcgctcagctgcccaggctggagtgcagtggtgcaatctcggctcactccaaccaccgtctcctgggttcaagtgattctcctgtctcagcctcccaggtggctgggattacaggcacccgcaatcatgcccggctaatttttgtattttagtagagatggggtttcaccatgttggccaggctgatcttgaactcctgacctcaggtgatccgccagcctcggcctcccaaagtgctgggattacaggcatgagccaccgcgactggcctctgtgtcttccttctccaatgagtcagtgccccagacatatagccacaggtgagaagacagaattagaagccccttcccggcctggaatcacctgcactccagatttttctaatttccttctttccctccaggcctttcaactatagatctggatgagtcatgcaggcattctgtctcttctactttgcagacagccagtctgcaaatcacagggtattttgccaccatacatcagttgggtaacaaaatattacgatgtccccatgtagactttctctgtgccatctcttgcattggccaagtgggtaaggggcagtacaaaagagcaacggaagctggctggcagcagttaagaggagtaggggtgggaaggaccttggcctctttctgtgcttataactggatctgtgactcatcttgtgagtcactcagctccacctccctcctccggctgcccctcccagcagcctttactcctggcacaaacctgcagccagaacaggattctgaaaatggaaaaatctgatatagccccttgcctctccacccttcccttcatctagtgcttctactgggggtgtgtggggtggtgagaggcagccttaaccctcagctcctgcccactccattcctgg

SEQ ID NO: 6596 - DNA, 1134 bp, Homo sapiens
agaagcagaaggaggcagagaggaagatcatgaatggaggaatagggggtggccctcctccagccaaaaagccagagccagatgctagggaagagcagccgaccggtcccccagcagagtccagggcaatggcattttccactggctaccctggggactttactatccctcggccgtctgggggcggagtccactgccaggaaccccggaggcagttggcagggggtccatgtgtcgggggcctaccaccatatgccaccttccccagacagtgccctcctgggcgaccctacccccaccaggacagcatcccttctctggagccaggcagccactctaaggatggacttcacaggggtgccttgttaccacccccctaccgagtggctgattcctatagcaatggctacagagagccccctgagccagatggatgggctggaggtctccggggccttcccccaactcagaccaaatgcaaacaaccgaactgcagcttctatggacaccctgagacaaacaacttctgttcctgttgttacagggaagaactgaggaggagggagcgggaaccggatggggagctcctggtgcacaggttctgaacgggtggaacactgaagggcaaggaggctaaacaaagttaagctcaactaattggctcatcaagaacacagtccccatgttgagggggaaaatgcagtaatgtttgtgggagcctggctggaaacttttaagtgtgtgcacacaggagtgctgccaggctggcaagagcaggtcggggctggatggcacctcaggggctgtactattcctctgcagagcttgacttgatgaggtttgaggtacaaggggaaaagatggcgattctgtcttataacctcctgggtcccatccagggacctaagagaaagtagcaggggaaggtttggtgtgtgggggtgggaggtgggcagaagtcttggggaggaatgggcaaaggaggttctcagtcaataaaaccaaagttctttaggttgggaaaaagcacatggtggagtgagaagtgtggaggggaagtgggaaattggacacatttgctattgatttgaattaagctagaaattaaggttggataaattcttccccttgaag

SEQ ID NO: 6597 - DNA, 2835 bp, Homo sapiens
tccactctttaagaagaaggaggtcttcgaggggagaagaggaaacgagatgctgaagacgatggagaggaagaagatgactagatcattctaagaccagattctctaatgtttctgggtgtgcaatagagtgatcacatctttgtttcttcatgtacgatagctatccctacagaagataatgtgtaactttttataggaaaagtgtggttttactatttttgccttatcattccaaataagaactagtctgttaatgatcatattgtatgtagagaaaaattttcattgactcccattgtggaattccctagcaatttatttagacttaattttttaaattcaagcttactgtattagtcatttttagcccataattaaaacatgatcacttttacacaggtgtagtatggtgcatttcattccttatttataaattaactgaaattacagtttgctataatataaaatgacaatagtctcttgagtggtaagttggttatttttttagaggtgatccaggaatctttagtttgaaggcagttaccttttttttttttttttttttttgactaagagtgtttggttgcttttttgtcacaagtaacttggaaaatagaagcagaatagtaaaggttctattcagcaacatagttcatggattttgtggaggttctattcagtaatatggttcatggatttagtggtgactgataagattttatttttgaaggaaaaattgcttatactaagtccagagacatgcaggtgagcccttttgtcaggctgcaaatcatgacatgccgatggttgtttattttgtttttaggtgtgcattctttttcttcttagcaattcctttatgatcaccttcccttcttgtttcactccctcccgctctctcaaaaggaacttgggaaacttgtgaaacccaggaaaacctttagtcttatacctcaactacctttcagtcctgtctgggttttaaataagtgaagtagaagaaattgagtattttctgacataagaatatattatcaatacagttttatgcagtaagctctccttaccataaatgtttcttggttgacaacatctaagacaatattagtgggatgaagaaagaaaagcaggggtgcttttggaagcagtgttagtgttcctcaaaagtcggaacaattgcctgttgatatattaataagacattaaagtcaaattttaatgttggcctctcaaatgatttggataccactctgcaaagtatttctaacctttaattcccagttttaaaacagatataataatagcatttaattggaatatactaggcagctggaaaagtatttgaaactaaattgacattaaaattaagatttgttttcaagtggatgtccattaaaagtagaaaaatatttgggataagtgagtgtgtgtttccttacatggctactaaataaaatataatgagtatacaagtatatctcctcttttgctatggaggctccatgttcaaggcaatggctttttaaatcttggctatctaaaattttttccctttgttttgaatatttgtaagtttttaagaagttagtgtcagcaaattaattgaagttatgcttctatactgggacatatttaaatactgagtatagtactgctgctactgcttctacaatgtaaaatgtatgacttggtgttttaaagtaaaaattatgatgttacttgtggagaaactaaaaatgttgtacaactgaccgaaagaaaacccttggggataagtttagtgaggggattggaatccccaaaaagataacatttttcttctgcttttaaaaactgaaattccctgttctagttcctaacaattctcattacatactatgccagattacaaaatacttatttttaaaatgaaatctatatattgactttcttatcaatcatcttactgtgcaatcaaaattagagtactttggtttgaaaacaacacttagagcctccagataacttttaagacttatttagctttgtgggtggtattttcatgcaaataagtaagggtgggttttatattttgtagaagttttcggtcctattttaatgctctttgtatggcagtatgtatatattgtgttaagttcctcaagaatctccttaaaaactttgaagttaatacttttgtgcaactgtgttttgaataaagccatgacagtgttaaaaacaaacaaaaaaatttgcagtactcctgattattcttttattgtttttgactgttccctgtttttttctgtgactgctgtaacttaaagtttttgaaactgaattgcttcaaataaattgaagatttgttataatgattagtttcagtgtatagcattcactttttcaacaataccattagcggctttgaaggtctttttaaaaactaacagcttgaaagttaactgatttaaatacttggatgtgatataaggcattacaatttatttatttattttttgagatggaatcttgctctatcgccatgctggagtgcaatggcgccatctcgactcactgcaacctctgcctcccgggttcaagcgattcccctgtcttagcctcctgagtagctgggactacaggcatgcaccaccatgcctggctaattttttgtattttagtagagacagggtttcaccatgttggccaggatggtctcgatctcctgacctcatgatctgcctgcctcagcctcccaaagtactgggattacaggcatgagccactgctcccagctggcattacaatttaatagttttaactcatcatcttctttcttaacttttttttttt

SEQ ID NO: 6598 - DNA, 1235 bp, Homo sapiens
acacggtgaaaccccgtctctactagaaatacaaaaaatcagctgggcgtggtagcgggcgcctgtagtcccagctactccagaggctgaggcaggagaatggtgtgaacccgggaggcggagcttgcagtgagccgagatcgtgccactgcactccagcctgggcgacagagcgagactctgtctcagaaaaacacaaatatccaaggaaatggaggtcacaatttttttttaaccataaaatcacgttcagctgggcacatgtctcacaaatgttactaggtcttcttataaaagaatattatctgatttaaataagaaattgaagtgtttttattatatatctcttttctagggtacagccaaagaccggagctttggagagatgaagtttaaacagtgtcctacagagaacatggctcgtgagcatttcaaaaagcatggggctgaacactactgggaccttgcgctgagtgaatctgtgttagagtccactgattgagactactgcaagcccttgcctctcctcccttgcctttgtctcttcagtcctctcacttattctatttcccaaccccctcccacttgtttgtgtgatctcagaactgtgccaagcagacactgggacaaagggagaatatcttgctcccctcctgagtcagcctggtgttgccctttattccccttatgtgcatatgattaaagagttatttttaaacttggtgtgatatttttcacacattcgtaagtattagagtttgggtctacaggtgatcttttttccggacttttagcaattgctgtggaaaaaaacattttttgtcattgacatttatttatatatataaatggatgaatggatggatggatagatggatgtgtatttttgaagtctagtggaaatgtttgatctcatcctggagctagaatgataaatactgttttcctggagcagaatgaagcagggagatgtgtaaagtggtaagggaggaaggagggacaaatgagtatccatcccttaaccaagagaatcaccaggttagacagattacctcaggacttggctaagtagtctttccaggaaatcagttcctctaagggatgcatatgtgggaatgtgtgttgtgggtgaaatggacacagggaaagtccaaggaggatgctatgggtcagtttgtaaagtggaataggatttaagaatttagcccattttgtctcttttactagtttaaaaa

SEQ ID NO: 6599 - DNA, 1165 bp, Homo sapiens
agagaggggacgggaatccttccattgactactcgataagccaagcccaaaataacatcccaacattgcacatgtggttatctgtactgatggaagttttatttcaaatgtaataatactcttcaatagatggggtaaaataaagattgttttcctccccactccccaaccccccagccaaatgaaatggctttggttgtgtttctttactttttttttttttttttttttttaatacaaacaacttggggaaggtagataagtgcaatgggagggaggattgaattgaatagtaaaacgtaagcgtatgtgatttcttactttggaagagaggccctttgttataataaaaaaaaaatcgagaaagagaaaacaaataaaaacaacaacaataaaccaaactcctacttccaatgttctctagactgttcaaaatgcctttcccttggtttccatcagtacctgggagggaagaatgggcgttttggtgcaaagaacggagggcccctagcaaaaggtggcctgggtctctttaaactgtgaaatgggtctctgctgagaaaaggttccctaggccgaaagtctggccggggactccgtaagattataccactccggctgatggtgtctctgtgtgagggacccaagggggggccactgctgctgttgctgcctcccccacctcctcctccatggggtgggcccaggtgttccagagaatgggagggtagggtgaggctctctcgtacacggctaaggccagggccgttgaggtcccgttgggtggggcccccgtggtccctgggtcctgggagtaccccaaaatgctcagccagggtcccttgaaggagggaactatggtccttgggaaatactgccacagcccctgccactccgtgctctgccagtggtggggctgggaagggtacaactccagagtggtcaacagggggtggaggagggggtggagtagaaaaggggacaccactcccaccactgctgctatgttccccaggagggggaggaggaggtggggtagggaaaggaattccactgtgctctccaggaggagggggtggggcagcatgggccagggctgcctcctttgtgaaggggttcgaaagatccacagagggtagatgagtgggtgcatctcgagagaaga

SEQ ID NO: 6600 - DNA, 1545 bp, Homo sapiens
agcattttcctttatattatacacatgtgtctatcccatttcaaggctcaagtcttacccccacctctcgctcccaataggaaataaagaccatttctgcccttagttgttttacatgcaagataagtgctttccttctccctggactgaaagacttgtttgtatttctacatctagtacttgggaaatagacaatcactgtactttgagtgtttatatctttatatctagggacactgaaaagtaaatgttgctttactacaatttttttttaatttagtgtcttaccccaaggcatactcaactgataatctccagctagatgagtaaaacagtatgtgtttagttttccagagaattctggcaagtttcatattttcttccaagttagtatagaactaactataggaagtatggggttgctttttcctccagtagaatattaaagatgggggagggtgggcaatgtagtgacagaaaatgattctctcagaatgaacttttcagagaaagagcagcataaaccaggtgcacatcatgatttgggagtttttgcgtaatttattctgttatttatttgggctcgccatgtgttctggggttaggatgctgcaggtcattcatcttcttaatgcctgtctggtcttaagccaactgttctttctttcctcgaccctctctgccctgtagctctccccacaaaaatgcatgataccatgaccttacgtgtgggatggggtatgtagtgtagcaaagaaaagaaagtatagttatattgagtcctaagacatttgttagggaaaagcataagagaaaatggggtgggaggtggggaaatgatatttgactttcaaaattgaaataggttttttttttgcagaaattaaatgggatgtttttcattctagaataaaagaatgtgaattctctttgctgctcttgtttaagctaaaagtagtgtttacttgataaggctctctgaccatttaatttttatcagaaaatgtggggatgtcaggaaagtggcttcctgaacgttggggcgggataattgtcctcaaaagtatgatggttaatacatgaaaggaagactttgttggacagtttcgaaggtgggcttttaaggagttgggtttttgtggggtacttttttgttttttaagccacaaaatcctcaatatgtttgttttaggatggaagtgaggatttgtatgagactgtcagctattaattttaaggaaatcttaaaatttacatttacatcagtaaatgaagatgacagtgtgtatatatgtgataaatagtgaaacagaaaagacagttctggtattcataacgtgaaagaaaggggttttattctttctgtgtctgtgatttaaaactccgtgaccatgctctgacttttgtatttcaacctgagtttaaacaaataaacaagatattttttaaagaaagcataacatagtgtgtcttagcaaggacatgattcatatggaagcagaatgtgagaagttgtaaggtccttggtactcactgtaaaatcac

SEQ ID NO: 6601 - DNA, 1229 bp, Homo sapiens
attctgaagagccgggaagtccatctgaagttcagctttgaacactggagaagtgaggcttggaagccaccccagccaccaagcctgactctctttgcccccttcttctcactttgagtccttcccacccctgctcctcatcccactcttagttctgctttccaggaaaaaaaaaatctgtttctgttggatctgaaaggcacccgggagaggaatccagggagccctcgcattgctgaggtgggccagctctggggcagaaaatgaccaagagaagggtaggaatgtgcctgggggcagacactcagccccactgccctccctgagacctagggttcggaatttgagggaggggtcagagtggctgagccagagcgggcgcctcagggattggggttggggtgggggttgccgatggccactccttcccctggctgggccggccactaaggtcagcaactccaccctgactgaacgggggaggccaggatctccagagaagggcccatgttccacccaagtcttcaggctctgcctgactcttgttactccagctgagggaagaagaaatggggtgatagtcactgcctgccccttctctgatgccgacccctcttcatgccctctctgcctctgcttctctctgccaccgagatctcttctcgcagcccctctccacgggtctacccagtacacataatcccatcccgagctgggtttggctttggcagttccctggagaagtgaggggtgggggtgacgtgagctcccggggcccgggccaggcctggctccctctctggaaaagtcccaccccaccctcccctgcgcagcccggcaggggcccatgccccctcctctgcagaaacacacgcacatttatgcttctcacccctttccatgtccctcatttggtgtcgttcccggcccaggacgaggaaaggagaggtcagaggtggtcactctggtgccagagtagaccctggtctggacaaacgcgggctcctcctggccacacctctccacactgcccagtgaagaccaaggaacagagacctgcgcagggctcaccccttcacccccaggtctccctgctggagagtggttggaccctgtgtttctgggcctagccatggagaatccctgtcctgagtccgaattcccgggccctcagagccctccactcctgggtctggcaggccaccccaacaggtgtctttcttttttgt

SEQ ID NO: 6602 - DNA, 3092 bp, Homo sapiens
ggagctggtttggcatatctaataagatagccttactgtaagtgcaatagttgacttttaaccaaccaccaccaccaccaaaaccagtttatgcagttggactccaagctgtaacttcctagagttgcaccctagcaacctagccagaaaagcaagtggcaagaggattatggctaacaagaataaatacatgggaagagtgctccccattgattgaagagtcactgtctgaaagaagcaaagttcagtttcagcaacaaacaaactttgtttgggaagctatggaggaggacttttagatttagtgaagatggtagggtggaaagacttaatttccttgttgagaacaggaaagtggccagtagccaggcaagtcatagaattgattacccgccgaattcattaatttactgtagtgttaagagaagcactaagaatgccagtgacctgtgtaaaagttacaagtaatagaactatgactgtaagcctcagtactgtacaagggaagcttttcctctctctaattagctttcccagtatacttcttagaaagtccaagtgttcaggacttttatacctgttatactttggcttggtttccatgattcttactttattagcctagtttatcaccaataatacttgacggaaggctcagtaattagttatgaatatggatatcctcaattcttaagacagcttgtaaatgtatttgtaaaaattgtatatatttttacagaaagtctatttctttgaaacgaaggaagtatcgaatttacattagtttttttcatacccttttgaactttgcaacttccgtaattaggaacctgtttcttacagcttttctatgctaaactttgttctgttcagttctagagtgtatacagaacgaattgatgtgtaactgtatgcagactggttgtagtggaacaaatctgataactatgcaggtttaaattttcttatctgattttggtaagtattccttaggtttttctttgaaaacctgggattgagaggttgatgaatggaaattctttcacttcattatatgcaagttttcaataattaggtctaagtggagttttaaggttactgatgacttacaaataatgggctctgattgggcaatactcatttgagttccttccatttgacctaatttaactggtgaaatttaaagtgaattcatgggctcatctttaaagcttttactaaaagattttcagctgaatggaactcattagctgtgtgcatataaaaagatcacatcaggtggatggagagacatttgatcccttgtttgcttaataaattataaaatgatggcttggaaaagcaggctagtctaaccatggtgctattattaggcttgcttgttacacacacaggtctaagcctagtatgtcaataaagcaaatacttactgttttgtttctattaatgattcccaaaccttgttgcaagtttttgcattggcatctttggatttcagtcttgatgtttgttctatcagacttaaccttttatttcctgtccttccttgaaattgctgattgttctgctccctctacagatatttatatcaattcctacagctttcccctgccatccctgaactctttctagcccttttagattttggcactgtgaaacccctgctggaaacctgagtgaccctccctccccaccaagagtccacagacctttcatctttcacgaacttgatcctgttagcaggtggtaataccatgggtgctgtgacactaacagtcattgagaggtgggaggaagtcccttttccttggactggtatcttttcaactattgttttatcctgtctttgggggcaatgtgtcaaaagtcccctcaggaattttcagaggaaagaacattttatgaggctttctctaaagtttcctttgtataggagtatgctcacttaaatttacagaaagaggtgagctgtgttaaacctcagagtttaaaagctactgataaactgaagaaagtgtctatattggaactagggtcatttgaaagcttcagtctcggaacatgacctttagtctgtggactccatttaaaaataggtatgaataagatgactaagaatgtaatggggaagaactgccctgcctgcccatctcagagccataaggtcatctttgctagagctatttttacctatgtatttatcgttcttgatcataagccgcttatttatatcatgtatctctaaggacctaaaagcactttatgtagtttttaattaatcttaagatctggttacggtaactaaaaaagcctgtctgccaaatccagtggaaacaagtgcatagatgtgaattggtttttaggggccccacttcccaattcattaggtatgactgtggaaatacagacaaggatcttagttgatattttgggcttggggcagtgagggcttaggacaccccaagtggtttgggaaaggaggaggggagtggtgggtttatagggggaggaggaggcaggtggtctaagtgctgactggctacgtagttcgggcaaatcctccaaaagggaaagggaggatttgcttagaaggatggcgctcccagtgactactttttgacttctgtttgtcttacgcttctctcagggaaaaacatgcagtcctctagtgtttcatgtacattctgtggggggtgaacaccttggttctggttaaacagctgtacttttgatagctgtgccaggaagggttaggaccaactacaaattaatgttggttgtcaaatgtagtgtgtttccctaactttctgtttttcctgagaaaaaaaaataaatcttttattcaaatacagggtgtgatatgggtcttttctcatcgacgcctctttttccttccctctcttaggcaaaccttttagagaagtcagctgagcaaatatgtacaggtgaattcaaagcaaaagcctcacaaagttgatttgccttagagcaaaggacagttcctttcttcaattctaattagaggtgttgggtttttaattaaatatattactgctgtacttagaggagttcttaaacctccaagtaaaatc

SEQ ID NO: 6603 - DNA, 2529 bp, Homo sapiens
ccaaagccaagatgaagaataagcagctgccaagtgcaggaccagacaagaacctggtgactggtgatcacatccccaccccacaggatctgccccagagaaagtcctcgctcgtcaccagcaagcttgcggggtaacctgagcccccctctcctccccttcctcaaccactggacgtttatatattataggcagggatgaaatgggcacctagtcagatcttctcagcttgctagccagaaatgactgtgattctgctgggggctgctgagaaggtaatgtaggttgaaaaggggctctaagtttatttatttcgttagattgacacttccacacactccctgtagtccaggtagggcccagaaataggaaaggctaggattggataatgctgcaaatgctttttttgtgtgagaaactggagagatgtgatttctccttttgggagagaatgtcccaaaattgattaggctgagccttgggaatagtttggcaggtttaacatcccaaggctaacctaacgtagttgggaaaggtagattgaatgagacatgttttctgtgcttctaagtgttctgtcccttaggctgctattgcttcatgtttccattatggcaggtttagagaatccttaaaaagaaaaattgacttgcttgcctaaaactacagtgcccccttagcctccattacttagtatctcttacagtttgctctggctctcaaataatataaagattgatgaacattattcacagaaaatgggcaccttctctctctcttccagcatgttgcttttgaaagtatcatgggatagtgggacgagcactggtttaggagtcaagatatctgggttctcactctactcagtcccagcagagctgttgtataaccttgattaagtcatttagcctctctggatttctatttcctcatctgtaaaatagagttaaatgtatgtaagattgattctgattctgaagtcttaactgccagcagaaaaactccatactgttcattgtaaaactaaaagtgaggaaggctcgtgggtggtgaacctctgctctgtaatactgggaaagtactacagaggggaaccatttgagggatacatgaggagagagtaaattgaggtttggggattataaattcaggcaagagaaccttatagatatcacagtcttgagggtcaaaaaaaaatacttaggaagctagccatggaagcttcttgcctctgacccagcccactttcccagcctacctctgggccttagctgctaaaaagcttctctggcagcggagctgcaggcctgaggaaacatgctcagtcatgcacatgtgttgacccatgtttcagatgcagtctgatgccaggtatattgttagggaaagaggaagaagggtaaactgagctagcccctggggctgagtactcctgcagggctggaggaacaggttcttagaagatgattcaccttggaggaagctggggaaagtggttagggagggagaggaggaagactgagaaatctctgcatccccagaactcagcaacccagctcttttatcatgaggagaggtagccatgctgactcatgaacaggtggaggaaaggggttgcaggtgaccagcatcttcaatctagttaccaccagcttggctagaattttattgaacgcaacttgctagttatgacagagaggaccagggtgagaactaatgctcaagagagcaagattctgtaatcctcttgccctctcacatcacaaattctgatatgccaaacatttggcccaatgagaatgactgatagacttgctgatgtgcatgtggggggatgaggtgtgtatatgcctttctcctgactggccattcagtgttcaggctgtcattcaaattggataggagaaagttggtgaggaaggaatggagagagcaggatccctggactccctggtccccaaactccttgactgtcacttgtaattgtatataatttttgtgtttcttgctccatttcctcatgctgtcatccttaaagtccatctgggaaggggaaaatgctgaacaccattgtatagtttcttcaactgtcccagccatgttgtacatagatatgtcatgttattatatatataaatatatatataattttgtacgttttcttcatctccgatcttctcaaattctgtactttttttcttttctgtctgagctgccttctctatcattcagcttgagtcctcaagactactggtcacaatgagtctgatttttaggaaggaataggaggagcagggaaatcagaaaaactgttggtctcactctgtctctctacctggtcatcttcaaggctaagaaaacaaacaagctacattctgtatttgccagtttccacagcatgaagtacatagcttccttagcaaggagtggtcattccaaaatccaaatgcaaattgctttgattaaacctagattattaaatccattcagaacagcatgtgtgtggtctggttctggcctccacacagt

SEQ ID NO: 6604 - DNA, 2609 bp, Homo sapiens
tggaagtaaggaaggctaagagctcagcacagcaaagactcggggtcagggatggtagtgcaggggaatggtggagtagaacttggtaagtgtaagagatcaaggtgtgtgacccaaacttaatctttttcttttatcaggagatgctgtccatgctgggagatcagagcaacagctacaacaatgaagaattccctgatctaactatgtttccccccttttcagaatagaactattggggtgaggataaggggtgggggagaaaaaatcactgtttgtttttaaaaagcaaatctttctgtaaacagaataaaagttcctctcccttcccttccctcacccctgacatgtaccccctttcccttctggctgttcccctgctctgttgcctctctaaggtaacatttatagaagaaatggaatgaatctccaaggcttttaggactgtctgaaaatttgaggctgggtgaagttaaaacacctttccttatgtctcctgacctgaaattgtatagtgttgatttgtgctgagatcaagaggcaggttagaagaacctgacatccactgtttgccttggatagtatggcttgtttttggaaagaaattctgaagagagtggaggagaggagaaatgtcctcatatttgaggaccatgaaacattgtaggtatatatggggctttagcaagtttgagcataggctctttttgctgcctgtgagcagtccctctggaaagaaacatgtgagtaagtgagagagagtgtgtgtgtatgtgtgtgtgtgtgtgtgtgcgcacacatgcttctgtatttcactctttctccctattagggagttatgcaaaatttgtccccgattttacctttgtctttctgtgtacttttcaaagagtcctaaggagttaaatcttccaggtattttccacttagtattgcagccaaagaatatttaaataaacgtctttgctgcgcttgcatccatgcccagccaatatacaactgtaaagcaaatatagaaagtcggctgttgatacgattgtctgttatcgaacacattcagtgataaagctgggttactgctgcttttggtgctctcaccttatctggaagatctgcaaacattacctaaataggctggcaagataaacactttctggaacccgagacttggccataaagataatgctgcatttttctgtcagaatcacatatgatgtgtgttctgtagaggttatttctgcatggaaactcaacttcttggattagccgtcccagtgaaaatcctcattgttggagtgtaaaccaaatacgaagccctcttgcaaagtagcctctttcatcccatactcaaaatacccagtttagcaagcaactgagatttaagtctctctggccctaagaggtttttcctctttgctccctccaatcttgagattgggttttgctttagagtgcaagtatcataattccgtatgatagatggggcctggacacccatctcaacagggtcacttggtaattaacaatagccatataaatgcggatacaggttactaccctcaccctttaccttcctcaggtaacagtcgtagataccagcttttttttttttttttttaaattggctttggccagtagctaaagtgcaagactgaattaatgagaagatatattaaatgtagtcataggggactgaggagcaagggtggccttgaagaggccaaaggaatgtccatttgctgagtttcccttccttatgtctccagtctggtgccaggtagtggagtaaaaaaggagacagtttatttttttattctatgtgcacacttacagtatacatatatatttatatcacaatttacgaaaccaaaaagttgagtttccaatggaacccttgttttttaataatcgactttttaaatgtgatcaggactataatattgtacagttattatagggcttttggggaaggggaggatagcgagaagatgctctgggggttttgtttttgcttttccttcagggttttatttttgactgttttgttttcttgttggccatttctgtattgctggcatctgtgctaagctttacagtggcaaaaataatgacatgtagcaaagattttcaaacaaaatattttttccttttgtaaaatttcttgtgttgtgtgatcttgattgcggctttatcattcctttccagttcataaacaacaggcacccacaaccagaggaatctatagtttaagctccagacatacaaacataaggcacattgtgtctttaatttcaggaatcagaaatcatagggttctgatcacattgcacgcctcccccctcacttgtcctcctgatcctgacacattctgagtaacatcagcaggaatgctctgaccatgaggtgggggttttggggtgggcgttgcctgggttcttgggagagaggggaagagtcgggacttgaaaaccactagggcacatctggatgccttcccccagtatgtccttttctggattaaaatgagtgaaatttaaactgttcaagtctggacctggtttccctctaggagactatgttggttcattagcaacttttttttttttttt

SEQ ID NO: 6605 - DNA, 1213 bp, Homo sapiens
tgcttcccaggctcaggtgatcctcccacctcagcctccggagtagctgggactacaggcgtgtgccaccacacctggctagttttgtttttgtttttgttttgttttgttttgtttgtttgtaaagatggagtttcgccccattgcctaggctggtcttgaactcctggactcagtgaccctcccactttgacctcccaaagtgctgggattaccggcgggagccgctgtgcctagcccaagcctttttattcttcttgaatcctgagatagagaggaagaggtggatagtgacatagagaaagtgaggaaacatgtattagaaaaaactttcttatcgatgaactacatttagggtggaaacctgtggctgtggatcaggtgtgaaccagcagttgcttacggagagatgcatgtggcctgaagtgtcttacttcttcctgtgaatagaaatacttgttttttcagagtaaaatattaacttctatttctttttcttgcgcaggaactgaaacatttgatcttggaggcagcagatggctttctgtttattgtctcatgtgagacaggcagggtggtgtatgtgtctgactccgtgactcctgttttgaaccagccacagtctgaatggtttggcagcacactctatgatcaggtgcacccagatgatgtggataaacttcgtgagcagctttccacttcagaaaatgccctgacaggtgagagttatgtgtatgggaaatgaatgagaagtcctttcttgtttttttcctgagacttaagagatgttttagctgttaaattggtttgttgactctggcaaggcttcaagaattttctactttaatgaatatagtcagttctttttatccatatgagattatctactttgtggctcagccttagaaaatatttcattggtgataatattttacatttatcttaatattggtataaatagaacagtaaaagccaaacctacaatacttttttttttccgttctaaaagaattatccatgtttttatctcatttgtatggataattatctggtattttttctacctcctggtgcttggctttgtgctaggttcaatgataacagctttttattctatagatatggttattggtcaatgtataaggtgttttctgttgttgttgttgttgttgtttgtatctgtactgttgttctttttttctcccctatttta

SEQ ID NO: 6606 - DNA, 1111 bp, Homo sapiens
cctttaggctccacagcctctgccccagcaccctcagcactcccggcccctccagcacccccagtcttccatggcatgctggagcgggccccagcagagccctcctaccgtgctcccatggagaagcttttctacttacctcatgtctgcagctatacctgtctgtctcgagtcagacctatgaggaatgagcagtaccggggcaagaaccctctgctggtcccgttactatatgacttccggcggatgacagcccggcgtcgagttaaccgcaagatgggctttcatgttatctataagacaccttgtggtctctgccttcggacaatgcaggagatagaacgctaccttttcgagactggctgtgacttcctcttcctggagatgttctgtttggatccatatgttcttgtggaccgaaagtttcagccctataagcctttttactatattttggacatcacttatgggaaggaagatgttcccctatcctgtgtcaatgagattgacacaacccctccaccccaggtggcctacagcaaggaacgtatcccgggcaagggtgttttcattaacacaggccctgaatttctggttggctgtgactgcaaggatgggtgtcgggacaagtgagttggtggggggaattgctgcccctgcttccaactttgttatggtgtctgtttcacctcttcctttgccttgtatctgtactgctttccccatcttcctttacctcctccctcacctggaactcctgctataaggcctccatgaaagctatgaggtagggaggctggagtctgacatggccacactgagcaaccttgggtacatgtgtattgtgttatttttgttctctgatccccccgctcctttcctttatttccctctgtcatataggtccaagtgtgcctgccatcaactaactatccaggctacagcctgtaccccaggaggccaaatcaaccctaactctggctaccagtacaagagactagaagagtgtctacccacagggtaagtggtcaaggaatggcacagtacctcagagagactgaggagcatgttcttgtttttctgtgcttatagaaatcatcagaaatctaaa

SEQ ID NO: 6607 - DNA, 1160 bp, Homo sapiens
ggtggctaacacctgtaatcccaacactgtgggaggctgaggcgggcagatcacctgaggtcaggagttcgagaccaacctggccaacatggtgaaacgccatctctaccaaaaatacaaaaaaaattagccaggcatggtggcgtgcacctgtagtcctatctactcaggaggctaaggcaggagaatcacttgaacctgggaggcagaggttgcagtgagccgagatcgcgccactgcactccagcctgggtgacagagcaagactccatctggaaaaaaaaaaaaaaaaaagcaaacaaaaaaaaaaactaataggtccccataaccctagaaggcctttaattctcttcattctcaggcaaaatcctgacagatgactttgcagacaaggagggtctggaaatgggtgatgagtactttgcaaatctggaccatatcgagagcgtggagaacttcaaagaaggatatgagagtgatgccccctgttcctctgacagcagtggtgtagacttgaaggaccaggaagatggcaacagcggtacagaggaccctgaagagtccaatgatgatagctcagatgataacttctgtaaggatgaggacttcagcaccagttcagtgtggcggagctatgctacccggaggcagacccggggccagaaagagaacggactctctgagacaacttccaaggactcccaccccccagatcttggacccccacatattcctgttcctccctcaatccctgtaggtggctgcaatccaccttcctccgaagagacacccaagaacaaggtggcctcatggttgagctgcaatagtgtcagtgaaggtggttttgctgactctgatagccattcatccttcaagactaatgaaggtggggagggccgggctgggggaagccgaatggaggctgagaaggcctccacctcaggactaggcatcaaggatgagggagacatcaaacaggccaagaaagaggtaagcagtggcagaacactctgagagctatggctttaactttggtgcagtaacaatgcagtctcaccatgagtctttgcatgtagattattctacttgatggatatttctgtggccacctcgttatctctccccctaactagcacattcctagtgtttgtttaaagaac

SEQ ID NO: 6608 - DNA, 1310 bp, Homo sapiens
tgtcttcgtggatacccatgatcttcgcttcccctgggtggccttctttgccagcaagtaaggagtcaggaaaggggatgactggggaggggcaaggaccactgaagttctaagggcccctcctccattcatgatccaactccacctacatattcagtaaccccaagtgcctgggttatctgctgtctttgccacacaccatccttttcttcctcttcagaagaatccgggctgggacagaacttacttgggactacaactacgaggtgggcagtgtggaaggcaaggagctactctgttgctgtggggccattgaatgcagaggacgtcttctttagaggacagccttcttcccaacccttcttgaactgtcgtttcctcaggaactgggtcttcctgattgttgaaccctgacccgaagtctctgggctagctactccccccagctcctagttgatagaaatgggggttctggaccagatgatcccttccaatgtggtgctagcaggcaggatcccttctccacctccaaaggccctaaagggtggggagagatcaccactctaacctcggcctgacatccctcccatcccatatttgtccaagtgttcctgcttctaacagactttgttcttagaatggagcctgtgtatctactatctccagtttgtattatttcttgaaagtcttttaacaatatgataaaactaagattgtggttttgtttctctctctcagcccgatactcccaattctggatctttcagtgaggtattatccccatcctcccctgtgggctgctgtcattcatcttctaccttgtctacctttgcttcttgcatgtgaatttttttagatggagttctcgctctgtcacccaggctggagtgcaatggtgcaatctcgactcactgcagcctccgcctcccgggttcaggtgattctcctgcctcagcctcctaagtagctgagattacagtcgcccgccaccacacccagctagatgtatttttagtagagatggggtttcgccatgttggccaggctggtctcaaactcctgacctctagtgatccaccctccttggcccctcaaagtgctcaaattacatgcatgtgaaatttaaaaaagaaaatattacataactgcaaggaaggcataagaaagactctcttcgtttatttagttgatcccccttctcaattcctaatagtctgacacttattgccatgttttatttaatattttttatttaatcttttaatttttaaaaaaaacccattaacagtacattttggtctaaaatggtc

SEQ ID NO: 6609 - DNA, 1818 bp, Homo sapiens
gctgctgcatatcttctgggcctacctcattttgcgcatggcccacaagttcataactggaaaggtgaagccctgttcccattgtgtaggccttactactctctacaacttcctgaactcccatcttgccagtaactctctaaaaaactagtgtggagccctgggtataacaggaacaagccctcagagagaagcagtacttaggggtttgaggatctcatgtaataacccttcttgtcccttttccacagctggtagaagatgaacgcagtgaccgggaagaaacagagagctcagagggggaggaggctgcagctgggggaggagcaaagagccggcccctagccaatggccaccccatcctcaataacaaccatcgtaagaatgactgaaccattactccagctgcctcccagattaatgcataaagccaaggaactaccccgctccctgcgctatagggtcactttaagctctggggaaaaaggagaaagtgagaggagagttctctgcatcctccctccttgcttgtcacccagttgcctttaaaccaaattctaaccagcctatccccaggtagggggacgttggttatattctgttagagggggacggtcgtattttcctccctacccgccaagtcatcctttctactgcttttgaggccctccctcagctctctgtgggtaggggttacaattcacattccttattctgagaatttggccccagctgtttgcctttgactccctgacctccagagccagggttgtgccttattgtcccatctgtgggcctcattctgccaaagctggaccaaggctaacctttctaagctccctaacttgggccagaaaccaaagctgagcttttaactttctccctctatgacacaaatgaattgagggtaggaggagggtgcacataacccttaccctacctctgccaaaaagtgggggctgtactggggactgctcggatgatctttcttagtgctacttctttcagctgtccctgtagcgacaggtctaagatctgactgcctcctcctttctctggcctcttcccccttccctcttctcttcagctaggctagctggtttggagtagaatggcaactaattctaatttttatttattaaatatttggggttttggttttaaagccagaattacggctagcacctagcatttcagcagagggaccattttagaccaaaatgtactgttaatgggttttttttaaaaattaaaagattaaataaaaaatattaaataaaacatggcaataagtgtcagactattaggaattgagaagggggatcaactaaataaacgaagagagtctttcttatgccttccttgcagttatgtaatattttcttttttaaatttcacatgcatgtaatttgagcactttgaggggccaaggagggtggatcactagaggtcaggagtttgagaccagcctggccaacatggcgaaaccccatctctactaaaaatacatctagctgggtgtggtggcgggcgactgtaatctcagctacttaggaggctgaggcaggagaatcacctgaacccgggaggcggaggctgcagtgagtcgagattgcaccattgcactccagcctgggtgacagagcgagaactccatctaaaaaaattcacatgcaagaagcaaaggtagacaaggtagaagatgaatgacagcagcccacaggggaggatggggataatacctcactgaaagatccagaattgggagtatcgggctgagagagagaaacaaaaccacaatcttagttttatcatatt

SEQ ID NO: 6610 - DNA, 1399 bp, Homo sapiens
agtcttaagatcctcacagcacgggagcagggagaggctctagaacaaggtttcacaaccgagatgcctttgacattttgggctgaagtgttctttgtaaggaaaacctgtttcctattttgtgcattacaggatatttagcagcaaccctggcccactctagttatgacaaccaaaaatgtctctatacattgccagatttctcctagggggcaaaatcgcctccatttgagaaccacaactctaaagtcaagatatttttctctgaagtgatttctgcttggcacgctaccctcatcatcttactcatcttaagcccgagccatggatcaactaggagcccatataaatgaggctcagtagggctgcacataatctccaaacaattctttattcagtgttttgcttgtgtttgcatgttgctatgatggacaggtccccctcctccattcttgccctctggagaagtggttcctgcagtgtagagatatgaacagggtatggtaggattggggaaaggggagagagaagcagtagatacactccttatcctccccaaattttaagctctatttctgtgccctagtcctagacacacattagactcagggagttttgtctgaagaccaggtcccactgccccctggctgaagagtctgctttaaatgggaaaacaacgtaggagcaggggtttttaggcactttcagtattctcaggtgttcttcgttctggcccttccagggtaattaggaaggcagaacaagacagatgagctcctgcctgctctgagacaagaagggtggggtctcattagctttgcaacaggaaacatcctgttttatggtagtggggtcaggaatgtaggaactggtatccattctgccaattccaccacccattcagtttgcttatccctacagaacagtgactgaggttctttttttttttttttttttttttttttcaaatttccatgtattttctgccatttttcagggtctaagattggtcatacattcccaatttactctcagttccagtcaagctggttgctctgaaagtaacccagcttgttgctctaaaatacctcagtagcctgagtgttatactagagatctaaagggttaacaggatagggtggaaaggttagagactcctagaaatctctggtcaccgtgatcttcggcctcattctaatacctgttctttggacagtctttttcctttggtgctctcttgcctttagctaccttctctaatatgtatgctaccatcactaataaagtgatgggaatgggtttgagagtcgtaatttatattaaaaagttgttggacttttaaatacattttttcaaataaaaaattaagcaaaatagttgcacagtaatcattgcaggt

SEQ ID NO: 6611 - DNA, 1174 bp, Homo sapiens
cccagttactcaggcggctgaggccgaagaatcacttgaactcgggaggtggaggttgcagtgagtctagattgcgccactgcactccagcctgggcaacagagtgagattccatctcaaaaaaaaaaagaatgtaggatatagaaagactgagagggtgttgtgcagacagaagtaaagaacacactgtggaaatagcttaaagtctgcactaggtagtgccttcttcctaaagccttggttttctttgaggctaatcttctttaagaaaaactttttttttatttcaggttctgccatcttgaaacccccattctgtttccagcccagaagaaatgctgcccctaccagatccctccttgaaccagtgatctaaggacccctcttttccctatctgcctaacagtgcctcacaaggcttgggggctggactccctctactccctctggccatagcccctcctggagatggggtcaaggcagcaggactgatcaagtgactactggttagccagaggagctcagctgaagccctggaaaccctcaggtctgagataggagttctctaggaacctggaatgagttcctgtctcctgaatgatggtctgggtgccacctgtttttaaactcttaaacctggaactccttaaatggggtaggtgggtgagattatcaaagctgaagctggctttgctgagaagctccctacctccctgcccttctcctccttcctgctggaatgaactaaagcagatgtcaagcaggggctggtgggggtgcctactcccttttccactctatctttagatttcaaaccttaggcttacagcccctcaatatctctctgctaacaccagtgtctctttctagttaggcctctaatcttctgtttctgtttaccagcttcccagcaactttccttttttaaaatattaaaaatttaattcaggttctcttaattatcctcatcctgctgttgcctccgcccttaactctatccctattaggaaccttgtttcccaccgaataagagttaaggtaagaggtagctcttcacctgatgacattccatttaagttttggggcatctttcctgccctctgccaacctccctgctggcccaggtgagaggaggaagaggggtctggaaagaaacccagaatgcggcagaact

SEQ ID NO: 6612 - DNA, 1069 bp, Homo sapiens
tggccagaaaaaggcttataggggctatgaaactctggtcttgacatataaactttgctctgactggatttcataaaattacagtgaggagggtagtctcttgtcagaaaaacttgtttccaaacatttatgtaatgtcaagctcagtctctcttttttttttttttttttttgagacggagtcttgctcttgttgcccaggctggagtgcaatggtgtgatctcaactcaccgcaacttccacctcccggtttcaagctattctcctgcctcagcctcccgagtagctgggattacaggcacgcgccaccacgcccggctaattttgtatattcagtagagacagggtttctctatgttggtcaggctggtctggaactcctggcctcaggtgatccacccgccttggcctcccaaaatgctgagattacaggcgtgagccaccccgcgcacagcctagactctaattttataaaactttgttgaattttctaagtgtcatttaggacatattgtgcttttctgtggagcttatatcttatcctcttatgtgcaacaaaaagggggtcggaggtaaatgctgatgatgttgtttagttttatttccttttgatctggcatgagtaaattgctctgtttccttaagcttgggtctgttacagagctttgtgccttatagggtgctcagtgtgtgttgacaaagggaataagaactgtcagtgccataaagaaccaaagattctggctactttgtcttcttcctttctctcccactatgcctacacttcctctgcccagacacttttggaaagtgtttaactgctgggttttctttttctttttctttttttttttgagacggagtttcactcttgttgcccaggctggagtgcaatggcgtgatcttggctcaccgcaacctctacctcctgggttcaagtgattctcctgcctcagcctcccgagtagctgggactacaggcatgcgccacaatgcctggctaattttgtatttttagtagagatggggtttctccatgttagtcgggctggtcttgaactcctgacc

SEQ ID NO: 6613 - DNA, 1733 bp, Homo sapiens
agccgggggtggtggcgcatcatcatactggtgagaaaaaaaaaaaaaaaaaagaggccgggcgcggtggctcacaaaaaaaaaaaaaagaaagaaaaaggaaaaaaagaaatatcagtttgagaaatgatttttttttcttttttcttttctttttttttttttaaacagagtctctctctgtcacccaggctggagcgcagtggcatgatcttggctcattgcaacctctgtctcccgggttcaagcgattcttctgcctcagcctctgaagtagctgggattacaggcacgcgctaatttttgtatttttagtacagacgggatttcaccatattggccaggctggtctcgaactcctgacctcgtgatccaccctccttggcctcccaaagtgctgggattacaggtgtgagccaccacgcccagcctctttttttttttttttttctcaccagtatgatgatgaccattttaagaaagcttgtgtggctctctcctatcattacagacctccagagctggaaaatttgatgcatttactgaactcttcctgaaagtttaatatggagtgggaatcagtttttgtcctaatttattagagaaggcttcctcttctctactccttgtgcaaacccatctctggatagctagaaaaggaacttcagaatggactatatgtgatgaccacctgtatgcactctaggctcttatctgtctctattttatgtggtgactatatctcagaagtactaccccttctgagtagtactattatttcctatgccaattttttttaagtctctgatgctgccctttttaaatttttgtcttattttttagcctctttagtattagggggtgaggtgacattcctagactctacagtagcagtttggcatgttagtgacaggaaattgtgattccctatctccccctcctcctaccttttctgcttttgtgattccattgttcctatctcattgaggctttcccaggcattcgaatttagttagtaggtcatttctaatctctgggccttgtcttttctctctccgttcccctccttccctaccacatattttttgtttattctgaggtggtttgtttctgaaagttaatctaggtcaccttctatatcctgtgctttctagttggctttagacatcttgttctagcaacaatgatggtagcagctctctccctgaccttgccccatgtgctgtccttctgtcaaggccatttgtgtgtgtactgcggcaggtgtgtgtgtggggggatgcgcccagactgttctcacaatgtcctcagtttttcaggttgtctgacagctttatgtacagcgtatttttagaaaaacttaaatatacttctttatttagggttttattctgatgagcaagtttgtgtgtatatgtgtgtatgagcatttgtatgtatatatacttatacagatctatattatatatacagtttttgtactatcatttaaaataaaaatgtttctcaataaaatgtcaaagccgaccatttcagggtgtcattgaatttgttttcatctcctgggcaaaatttgtatctattctcttttttttttttttttttgagacggagtctcgctctgtcgcccaggctggagtgcagtggcgggatctcggctcactgcaagctccgcctcccgggttcacgccattctcctgcgtcagcctcccaagtagctgggactacaggcg

SEQ ID NO: 6614 - DNA, 1187 bp, Homo sapiens
ccaggccccacgagtgcgcctcgccgctgaggctggacgtgccccccgagggcaggtgcgcctctgcccccgcccggcccgcgctctccgcccccgctccccggctgggcgtcggcggaggccggaggttgcctttctccggccaccgggccccccctgccctgctcactcgagtcccctcgggaggtccctccaggtactccgggggtcccgggaagcacctcctgtacctgggccggcccgagggctaccggggccgcgccctgaaaagggtggacgtcgagaagccccagttgtccctgaagcctcccctcgtcgggccctcctcccgccaggccgtcccgaacggcggccgtttcaacttttaaagggagcggcccacggcctccagcgtggggagcgcccgagtcctctcggccacgagctggacgctcttcaggacgtttcaccgccccctcgccccgcacctccagccttcccgactcgcagagtctcccgaggccccttttcgcctcgggtttatttattgactgtctttccccctgtcctcgacagaagagtgggaggtgagaagcccgtctcctcagtgagccagcatttcagggggagctggcggactcccactccccgctcccttccagccaagctgccttaactcgcccctcggggctcccccagagactgtgccccgggcgggccgcgcgcgctgtgtccagagtcctcgggccttctgggtctgggacgtgcctctcctactgtgtaggagcctccgcttcccaatacagccgtgtctgcagccactgcctgacttcactcgggcgggggagggcggcagtcggtcggctcgctctgggcgccctcgctctctgccttcatctgggccctgggctctcccgggtaatgggatggctgcggtcccgccggggggcagtctggaaaggtttcctaaaggagacgagcgaattaacggtgtcgaggtgagccagggccagggggaccccggtaaagtttagttgaggctggggaaggccctcggagctcgtttccagatcgaggtaagagggactttcttaaaggcctagtctatgggatggggcggcggagggaattttttgagaaataaaatgaagctgcagtgtacgttacttgaagttccacatcagaaaatcttgtccttaggagaattt

SEQ ID NO: 6615 - DNA, 1120 bp, Homo sapiens
ccatgttggccaggctagtctcaaactcctgatctcaggtgatctgcccacttcagcctcccaaagtgctggtattacaggcgtgagccgccacgcccggcctgtggatgtttttttgatctgtgttctgttgtgtacagtgtaagccatttgtaggctgatttctttcctagttcttcctcttagtgaaaagtaaagcagtttagatcatgttgaatgataaactgaaatttagaaatgcaaacatagaatacaatgtcagaatatcaccaggtgccattttggttgatattttataaatagggagatatttttctgtttactctccatagggattttgacactttccacccacccctttttccttttgtcaccttggtatattctgccagaaaactgacatcagaatgtcattgcttctgatcgatttatttctgccatgacactcaagcccattgtcagttataattaactagtctaataggtatccagtttctgatattaattgataatgtgtacttacacgttagcgttgaatatcaaaatagtacgttttgcttattaatgtctgtgggcttttttaggttaatttaaaactcttctgattaatacctttgctcaaatatgtgctacctaatagctattaaatattttattagcctgtttttcttggataataaagtggaaactatagcctgtgaagtgaacaacagagataataccaggccagctagcaaactggggagagggaaggtggtaattttatcctttaaattgttctctcctagaatgttatttattatttttttgagacagagtcttgctctgtcgcccaggctacagaccagtgtagtgcagtggtgcgatcttggctcactgcagcccttgcctcccaggttcaagcgattctcctgcctcagcctcctaggtcactaggatcacaggcgtgcgccaccacgcccagataatttttgtatttttagtagaggcggggtttccccatgttggccaggctggccttgaactcctggcctcaagcgatcctcctgccttggcttcccaaagttctgagattacaggcgtgagctactgcccggcctctctcctagaattttggagc

SEQ ID NO: 6616 - DNA, 1235 bp, Homo sapiens
agctttcttcttctttttttttttctgaaaaaaggaaaaagcacacagcacacaatttcaagccattttcagatcagaactccagaagtgttgacaagatgcctattcgtagagttccctcagaagagccatggtgtttatgaagagaagagtagtgattgctctgccagaagcagctcctctttaaactcctcctctcttgatgaatttcttaaggctgaaggaatgaagagagtgggacatggggtaatctttatcccttttgttaaaacaggaggcagccatgggctgggagatcatagcccttcctaggcagaatcctgttcactgccaggctatagtaattattactattttgcaatttgaaatatattctggttgtttttctaaatgtgaagacttaccaaatgaattttagatcattctccagaggagattttttttgctcttctcatcttttccaacagtgttctcctgtttgtggagctaaggtaaagaggggacacttctgtctgtttaacagacagtccatatctgtgaggccagcaaatattttcttaaactcatggggagacagcagattcttgccttggtgaggtcattgctgtgccatatgtcctacccccctgtcttcatgcagggaagttggaaatgggggctacatatgccctctcctccccgtctacaagagttgtggttttccatctgatccttccactcttgtcaggggaagaagggggcctggtatctcaggcagattgttgaattcctgttctatcccttctctatcccaccctgccttgataatatgttagcccataccccaaataactgtctatattagacacccccagccagtttctggctgcctgtctttgctgccatgttttttacaagaaggaaagaattcttgctatttttttttcataatttactatttatgatgtatttaagtgttttattaaggacagagttctgttaggggtgggagggaatatttgagggagggctgggtcttagggaaaggaatggggaagcaacatttttattaagtgttactatttgcctctactttgtattgttcagaaatggcaaatacaatataaaagtgatatatggttttaatgtaataaactttaatgagttatttagacctcttattttttctgattctttttcatataccatctgctcaccctcctactccaccacccaggctcagttttgttcatgtt

SEQ ID NO: 6617 - DNA, 1127 bp, Homo sapiens
tccctttgggtttggccctggagtcctagtagagtggaccctccattcctcctttctgagcccaacactaattaattttatgctcctgctgcagaacccccagtgtgggcctgggggtgggaggatgggacttaggtatgcctgctagacaggttcagggaaggactgatgggggtgtcatggatggacacacctctccacaattccttcaggcatggactggaactttcctcctctaggccgggccctgccctagtgcccacccccgcccccgcccccgcccaaccccaactcactggcactcaagccccctacccctgcagtgcctttcacttctttttttccccagaaatccggggcgggggggtggggggttggtagggatgagtcctgtcaagggggccacaggagaggaggggacaggctctcaggaatcctttattcttgtagtaataataatactaacaaacagttggggaactagggagaaaaccagaccattaaaactgtttgtggtcgaatctccattcaggcctctctttttctgtgacttggacaatgtggagttgaagcgggtgagagaacatggaaggcccgcccttctcagggaagaggtggtagtgaccaagacaggcagggaaaaagcaaacttctatgtagtgccttttgtatcttggacactgaggcatccgttcatacctcatcacccatctccccctgcactcccccagaaaacctggaaatgacacaagtggctaactaaggactttatttcaaacaaaaattaaaaataaaaaattgagagctcttttccctgggtttggggaaggagtcagggtagggaattccacatggctaggccagtaccctcagtacactggagggctgtgggaattcccttccttgcccatgatggggaacctcagcaagtgcagggcccacgcagcgcccgccagcaaggggagcttgggccaggggtcggtccctgggaggggtaggtccctgggaggggtagagctgggcagcagcatggccagtggccaaccacaggatcaagtcctaagtaccgagaacctactcttccccacttcctgggccccagaacggaataagaggatggcctgtgg

SEQ ID NO: 6618 - DNA, 1148 bp, Homo sapiens
ttcaaaggaaatactgaagtttgggacactccttgggacagtgcccagctttgtcccagtctttttgtccactgtagctccctgggccctgtcttcaggacgagcccacagaggcatctaggcctcccttacagcctgtaattgatagtctagagtggtttggcccaagcacatcatctgtacattttggagctcagttgaaatattttgaagacttaaggattctgtcacacaaattctttacataggtgatcataggacaagtatctgccctaaatatagtgttcatagtttcagaggactattggatgaaggctggagctaggagaaaggacagcaggaagaaccttgctaacagagttgagatttgggggttagtggtggaagtaagttgcaaatactgtctcactcttcccccaggctccctacctgatttatgtggaagtccttgaatgtgaaaactttgacaccaccagtgtccctgcccggatccccgagaaccgaattcggagtacgaggtccgtagaaaacttgcccgaatgtggtattacccatgagcagcgagctggcagcttcagcactgtgcccaactatgacaacgatgatgaggcctggtcggtggatgacataggcgagctgcaagtggaggtgagagggcttcagggaggtaatgctgggtcacaggagctttctccaggagctttcactatattggaaacaagacagcatatcccaaggcagggtaaggcaagtatcctaatgagtggtgtaggtagtgaggggtaatatggggaaagctctgaacaactctagcctggaatagattcaggtggagttcattttccaggtgaaggattcagatttaaatgtaaagaggagcttctaggccaaggggagtgagggaaatttaatgaaaatatttattgaacacctacataaagttgtcatagaatagcagaggatgagaagtcatacattaattcattcaagaaatttttattgagggccttctatgtgccagacctgagtgctgtatgctagtgaacaagacttggcccctgcctacaagggatttatgacctaactggaaagagaacaaggccagtaagcaagtagttgtagtgtggtgagagtcaagtcatggggga

SEQ ID NO: 6619 - DNA, 1192 bp, Homo sapiens
aaaaagaggaggtgcctgggaaggtgtcatagcaaagggaagatctgaggatggcaccactaaccaatgtgtgtatgtgtctccctttctgttcttttctccctccctcttcctgtagcttggaagctcgaagtctggctgtggccatgggagatacagtagtggagcctgcccccttgaagccaacttctgagcccacttctggcccaccagggaataatggggggtccctgctaagtgtcatcacggagggggtcggggaactatcagtgattgaccctgaggtggcccagaaggcctgccaggaggtgttggagaaagtcaagcttttgcatggaggcgtggcagtctctagcagaggcaccccactggagttggtcaatggggatggtgtggacagtgagatccgttgcctagatgatccacctgcccagatcagggaggaggaagatgagatgggggccgctgtggcctcaggcacagccaaaggagcaagaagacggcggcagaacaactcagctaaacagtcttggctgctgaggctgtttgagtcaaaactgtttgacatctccatggccatttcatacctgtataactccaaggagcctggagtacaagcctacattggcaaccggctcttctgctttcgcaacgaggacgtggacttctatctgccccagttgcttaacatgtacatccacatggatgaggatgtgggtgatgccattaagccctacatagtccaccgttgccgccagagcattaacttttccctccagtgtgccctgttgcttggggcctattcttcagacatgcacatttccactcaacgacactcccgtgggaccaagctacggaagctgatcctctcagatgagctaaagccagctcacaggaagagggagctgccctccttgagcccggcccctgacacagggctgtctccctccaaaaggactcaccagcgctctaagtcagatgccactgccagcataagtctcagcagcaacctgaaacgaacagccagcaaccctaaagtggagaatgaggatgaggtaaaattctggggagggccagagacaaaaggtggtagagggctgcatggagacaggatgcctcctatatacacacagggttacgctgttctttctgtcctccctgtttcatttcactgataaaagcatggaatgtt

SEQ ID NO: 6620 - DNA, 1180 bp, Homo sapiens
agccagtgctaagccagaccgaggcccgcgacttagtagaacgctgcatgcgagtgctgtactaccgagatgcccgttcttacaaccgggtgagggatgtgctgggaacctaattggcgggctctggctacttgcaatccctgggtctctatgctttgaagaacagattgccttacttgtgtgactcctattttcacattggggaagacctccacctgacctttcatttaaggacttaaggcgtgggcattattgaatgctctgctttcttccagtttcaaatcgccactgtcaccgaaaaaggtgttgaaatagagggaccattgtctacagagaccaactgggatattgcccacatgatcaggtgagtaatagggaaaaaattggtgacagacttgggaggtctttggcttacactaagctgggcttttctgggaggctcacccaggaaaattttctgggtggaaagttttggttggacagtacagctatttttaggaattgatccctttatgcttcacaattttattattctgtcttccttttttagtggctttgaatgaaatacagatgcattatccagaactgaagttgccctacttttaactttgaacttggctagttcaaagatagactcttcttttgtaaagtaaataaattcttcaaaatgcttgctgagtggtttttgtctgactgggtcacaccaagtgcaaaactgctgagtactgccatgtgccatctccctccctggtcggagaacccttgtggtcttgcagcacacacagaaattctctctgcacaacacagaaagacacactagcgtcatttggagctgtattagaagcagagcttcctgtagaagccagacttaatttttgtgtgctaactggcttttgtgttcaaattcccctcccaaatcttcctccactgcactggattatcaaatacagatttcttaatgttggctgtgattttcattaaaataccactttaaaaataatctagtagaactattctgcatcaggttgccctcaagtcagctggggcatcagccatccctggaatggttctaaacctgaatattttagagacaaaagtctcattctgttgcccaggctggcgtgcagtggcatgatcatagcctactacagccttgaatttctgagctcaagcaacctcc

SEQ ID NO: 6621 - DNA, 1767 bp, Homo sapiens
gccacggggtaagtaggagagaaggggattagttgagcaaggggaggaaaaaagatacaggttcgtactgtatgcatcaggagcatacctacttggcctcactcattcactgttgagatgtgctggacctaattagaaaccttccgacctgaagtttatataaaactgggaaagctggtcactgcgaacagcgtatttgtatgtagtaagttgaatcccagggcactgtctttggagggcttattttttcactgagctaactatttttgttgtttcattttccataggactcacttggatagctcactcaaggtaacaaaaactcacctcacaatttaatttctggtttgcagtgtgtttactctgttattattattattattatcatattattgtttcaatttcctagttgaactgagatttctcctcttctctttgctcctcacccctttaggcatggccagactcgtgaccgagtgcatgaccggaacgtgaagaatatgtaccctcctccttccttccccactaacaaagctgccactgtgaaatctgcgggggccaccccagctgagcctgaagagctactaactcccttagccccagcactcccatcaccagcctcaactgcaaccccaccaccaacccccactcacccgcaggctttagcccttccaccgctggctacagagggagccgaatgtctgaatgttgatgatcaggatgaagggagcccagtcacccaagaacctgagctagcatcaggtggtggtggtagtggtggagttggcaaaaaggagcagctgtctgtgaagaagcttcgagtagtactgtttgctctatgctgcaatacagaacaggcagctgaacacttccgaaatccccagcgacgtattcgccgttggcttcgacgtttccaggcctcccagggggagaatctagagggcaaatatctgagctttgaggcagaagagaaactggctgagtgggtgctaacccagcgcgaacaacagctacctgtaaatgaggagaccttgttccagaaggccaccaaaataggacgttctttggaaggggggtttaagatctcctatgagtgggctgtgcgtttcatgctgcggcaccacctgactccccatgcccggcgagctgtggcccacaccctacctaaggatgtagcagagaatgcaggactcttcattgattttgtacaacggcagattcacaaccaggacttacccttgtctatgattgtggctattgatgagatctctttgttcctggatacagaggtgctgagcagtgatgatcgaaaggagaatgccctgcagacagtgggcacaggggaaccttggtgtgatgtagtcctagccattctggcagatggcactgtccttcccaccctggttttctacagagggcagatggatcagcctgctaacatgccagactccatattgctagaggcaaaggagagtggctacagtgatgacgagatcatggagctgtggtcaactcgagtgtggcagaagcacacagcttgccagcgcagcaaaggcatgcttgtgatggactgtcatcgcactcacttgtcagaagaggtactggctatgcttagtgcctctagcactttgcctgcagtggtcccagcaggctgtagctccaaaattcagccattagatgtatgcatcaaaagaactgtcaagaacttcctgcataaaaaatggaaggaacaggctcgggaaatggcagatactgcatgtgattctg

SEQ ID NO: 6622 - DNA, 1229 bp, Homo sapiens
gtggtagtccccatacccctccagttcctatatttttgtcttcttcctttcccctctttgccattcctaccttgcatttttcctgtcagtgccttagccaaggcaaggagataaggatgctcttcttgctttttatatctgcacattcatacctctccaaagaccagcttttccccagccagggccctcagccttccctgctgccccagtgattgattgagagagctgttggggtttctctgccaatgacccctgggagagggactttggtagggtcatgataaagtggcgggggtctggtcctgctcagggttttcatccttcctcctctccctcctctgtgactgtggatatggttataaggtggttgcacctgggagccctgacaactggctgcacaaattccaaaagtaaaggtgtcagtccctgtggccttccttggggcttctctgaccacatgtgcccaacttcaataagagaaccaagggaccctcattttctgaggtgcttggctctgattcagggctttgcaaggggttagaagctgactgtaaaaatgggaagaggcaacggaagacatttatttctcctttggattttggggagaaccaagccctggtagggaagaggtaagggggatgattcacctccatatttcctaagcaggttgtatagggagccggtggcaggaggaaggctgttttcacaaatgacttgtaatgtcgtgattaaaaaaattcctatattcttctgcaaatcaaacgttctttcccaatccaatccagccttggttttattttaaattaaatattaaaattacacatttatattgaaatccttggtttgtcttctcattctttttcttggcatatttggaggtccagattttatgaagtcatattaactgtacagcttaggagccgaagctggagttttcttcacctgacttttcagaggccctttagaacagagcagatgggacctacgaaacctggagatgtttatagcagccccattctcttctctcctgaacaaccttctgggaagaacaaggacagtaaatgccttttttttttttttttttttgagacggagtctcactctgtcacccaggctggagtgtaatggcatgatctcagctcactgcaacctctgcctcccgggttcaagcgattctcctgcctcagcctcctgagtagctgggattacaggcgcgtgcctccacaccc

SEQ ID NO: 6623 - DNA, 1215 bp, Homo sapiens
gaggatttcttttgaattaaggagagtaagaattgtttaccttttgctagaagaaaattgggcatcaggctaactttgaaaggaaaaatggatgagactcaggtatccattttttcttttaacaatctcctgattatttcagggttcagaaagaaacttagtatatctcttgatccagtctatatgcctgaccattaataccagagaatatacatcgaaactactgctttcagttgttttctcctctcacttgtgaattctgaatggggaaagggaagcgaatcaaaaatctcatctgtgtttgacctagactgtttcacgcaagtttcctgttttgaaatgtgaacacgttggcttcaacatgtttctttccttcctgcttatcttaaagattaacttctgctgcagccctgaagtcagctttatgacttgtaaatgtattgatttttttcccgttttcattggaactcacttcttctctaccacgttttaggttattgtctagctagcttgttacagggagagtgaagatatactgggccataaattatttctctatgtcttttcccccagaactacaatggtgtgtccgacgtagagctgagagtagcattaccagatggaacaacggttacagtcagggttaaaaagaacagtactacagaccaagtatatcaggtaaattaaatgaacacgtagacttgacattggatggtgtgaagctaaggaagatagattaaataagtcaatacatataaagtgcttagggtgtctggcacataatccgtttattaaatgttagctactattgttattattaatgtgaaagtactttgccctccttaaaagaaaggtacggtaaatatcccaggttgtagtagttgtgattaacgcctcctttttttttggagatggagtgttgctctgtcacccaggctggagtgcagtggcgcaatctccgctcactgcaacctctgcctcctgggttcaagcgattctcctgcctcagcctcctgagtagctgggactacaggtgcccgccaccacacccagctaatttttgtatttttagtagagacacggggtctcaccatgttggccagaatggtcttgatctcctgatctcatgatccacccacctcggcctcccaaagtgctgggattacaggcatgagccaccacgcctggccaacccctcctttttttattgtaaaa

SEQ ID NO: 6624 - DNA, 1862 bp, Homo sapiens
ctgccagttttttaaatcagatcaccctccatgttgttcctgacccacaggggaagctgtcctcagttgtagccgtcttgactggatgagtcctggcagtctttctaggcgaaccaagaatgtttgtgtgagggaaggtgtttgctgttgctttactgctgtctgtatgtgccagtgctggaacagaatttggaagattctgaataattagttacttattctcaaagaaaatctttgaaagaatcaggaggtcaagtcaagaacatgaaaatttatattttagtacagtagaaagaacattgggctctgggaattttatctgggttttctcctggcttttttttccctctgtgtaattttgggtaaatcagcctccctagctttcagttttctcttctgtgaaacaggaagactgaaccacgtaattaatatccaaggtcccttccggctctaaaaggctatgattctagatgagaagttatatcaagaaagatgtggccaatcagattgagtcatccaggcatacctttttagcttctgtttgtggagttgtctccagataagaggagatgtgccttcccaataactctttttttttttcctttcagaacattttccagatggcgaggtcacagcagagagatgtggccacctagcctttccttatccccttcccttcccttcacccccatcctcttactcctttcatgtcccatttcagacagagtaaccattaacaaaaaagaagagaaaaagttaaagtcgttatattcaaaagccctaaactaaatattattaataaccccctctgaatttcatgtctctggaattgaggtggtagtgaacagcagatcggtcagcaccagaagtcaactgagttaaggcaggaaaagaaataagcccaaccaacttgccaaaggtatctttgtcctttcacctgggcctcataccaacagcctctccttgtactatatttttaaaactggaactatgaacttcatccatttgcactgttcagacatatatatgtatgtatgtaaaaattatatatacacaaattagctgcacgtatatacatatatatatttctttttaaatttcatattgatggcagtaccttttttagcttgtgtttttacacacctttcactagaatccatgacctccctcgtgctctctttcttttgaaacaaactttaaaaaggaaaaaaaagcattttacagggaaaaatacctctcctcatgaaggacttgaaaagtttacaacctgcttggatttttgcccctttttttgtattgagtatagattccggctcatgggttgccatagagtctaggaacaaggagtatagtttctttatcttccaagagggtgctggggaggagaaagaggtgtgtttctcaaggttaacaggctgtagttctgcagggagagcctgaagtcctggtatgggctcttgattctgtgacaatttttttgatccatctatttctctcactcctggctttctagccacattctgcacctccttcctgctttcctagagcctcggtatgctttccctcaaccgaccctggctcaggaggttgatgccatgggaacctgaacctgaaacacttcatggtagtaatttcctgttttccttgccttttttttttttttttttttttttttctgagacagggtcttactctgtcgcccagactggaatgtggtggcatgaacatagctcactgttaccttgaattctgggctcaggtgatccttccgcctcaccctcctgagtagctgggactacaggtgtgcaccaccacacctggctaattcttcttaaaatttttttgtagagacagggtctcac

SEQ ID NO: 6625 - DNA, 2869 bp, Homo sapiens
tttgcagcagggatagtactcaggaccagagttaagctgataccttaggcacacaggttggacttacatagaggaaagaaagcaagaaatgccctatgtacatgaggttttacctcctccattcctgaccaataaccacccataactacggcattctctgtgacttccttaaacagcagtgatgggaagggatccaatagtatcttcaaggccttggggaaacttgcagtgggtcagtggtctgtgccaaccaaacgatagccccatccaagccagctgagaacctaggaaggagtagtaggaatatggttgattagattggatctcccaagttttaattgaaaggagactgaacgaaaacctttctgctttctgtccgttaaagagctcctcatctgatcttgcagctagaccctttgagacttaagagctgcatcccaggatcagaagccagggctaattggggtaggacaatattcccagcccctaagctctgtagataatgcataagaagcaccaagtcaggctcagatgcaactaaaacacatctttgagccttttctttttcccttctcccctttctaaacaaaaaccttcctaggatggcatcttttgctctaactgggagacagtcataattggttgtagtcaattctactaagcagtgttggggtggttggaaagtctcttttttgtaatttgtttttgcaaatcattgtgaggccactttttctttctttctttctttctttctttctttctttctttctttcgttctttcgttctttcgttctttctttctttctttctttctctttctttcttttgctttccttctttcatctcttttttgtaatttgttgttgcaaatcattgtgaggccacttttctttccccttccttccttcctttttttctgttttttttttttttttttcccagagtcttgctctgtcgcccaggttggagtgcagtggcacgatctcggctcactgcaccctctgcctcttgggttcaagcgattctcctgcctcagcctcccaagtagctgggattacaggcatacaccaccacgccccactaattttttgtatttttggtagggcggggtttcaccatgatggccaggttggttttgaactcctgacctcaagtaatctgcccacctcggcctcccaaagtgctaggattacaggagtgagccactgcgcctggcccacttttctttctttccttcttattttgttatgctggcagccatttgcccctgcatggtatgggatcaaagaggacagcctttcctccctcaccttctccaaatctaggtgaaatcacagagtacaaaacgtgagaatgctgaatgtgtaaagttgcagagggatccctaatttgaagactttgacacagaactaacttcttttgacttaaatgaatttaaaatgagccaaaggaccctgaaaagaagacatgttgatttcccactcctagatgctaaagagacttggcaccagctttgttcaaactgtaaaaatagcaatttgcccctactcgctcagagtgggacagtagtgaacagagctgggattccatgcgacagcttgaatgctgaccttcagacatgagacatagggatttggaggccccttagaatgggtagatggtgttatgttccctttctggcatagcattcacttggtgctttggagattaggtgagggccctataggtagttggcctgttggcagaatttatttaggaacagcccttttgaaagtgtcccagtaacaacgcacccagctgcagcaaggaggtggggaaggagggcaccccaaaggacagcgccttcttctcttccacccatgcacggccttgggtgatggaggcgggttccctgtggctgcgtggatcccataggatcaagcccttctttgcatgaagcagtgttgtgactcttctctctccccttcctctgcacttcctttctgtaatccctactgttcttcttagtcccagcttctgcccagggaggcttctacccagacttcttttgcaatttgtccctgggaagagggggtctcccagtgcccccagcttcatcccagcagaaccagcaggatcctcctggtctctcactggccttcctccacacttggtttctatcctcaggggtagaagctcagagctttttatggcccaggagaaaatgtagaccctgagaaacctgtccctgcagaaaggttcccttgggccatgctttgggccctctgctctttatatgtttattctattctccatttttccaccccgtccttaccctaggcctaaacacaggtacagatatgtgcatgctcagggcagctcctaggcctggactgagctctcaggggggaattagataaatattccaacatcctcatgcctggcccatttagtttcatcctttagttacccaggccagtagctttgggttatcccttcctgtagctccaaacccagcacttggagcagcaaaatagggcactgacaggagatgaaactctctcctatctcagaatttgccaacttctgggctgggctcctaggaggtagttttcttgaaggggactgcatcctagttgacctgaattttccagaccaggagggactgctgtgctctcccttctcgccatcatactgtttggctagattcattcagcagtagaagctgtttgatctgttgaccccagcatactgctgtttcttcaccagcttcattgtgtcacagtagcttcctttgggaggatgatgtgatagaacactcagagagagggagggagaagagagatagtgggtatgcttctctagctccccatcttccaggtccacctct

SEQ ID NO: 6626 - DNA, 1111 bp, Homo sapiens
atcctgacgcagtcggtggagagtaaggcccgggccgaggcgcttcctctcaggctggtccggtttggcatcagctttttctagcccgtccccctcaactatttgccttgctttttctttgtggaaacaatccaactctatatgtgagaagaggaagccataaaaactattgtgattgtgacactggcctccagcattgaaaattaaaacataaaggcagcaacatcattaacagtgtgtggggagaggagcctgacaatttgtgccacagatactgaaatcctccatgggacgacaactccctctatacaggggatattaaatttatacatcaagttctaaagaaactaattagcagtctcttaaatcttgttcctagtgaatatgaattagcatttcttttaggaaaaataagcactgtgagaaactaagaggtgcttctctttttgacatcttttctttagggactcctagatggttctaattcccctgtctctgttctaattgacagatgttggagtccggggtgacctggtctcagtgaagaaatctttaggccggaatcgactccttcctcagggactggctgtatatgcatcccctgaaaacaagaagctgtttgaagaggagaaattggtgagctcaaaggaaggacagagagacttggggagataaaacttcttttctcttgcagcttccttccctttgacatttaacttaacttgaaaatgaaataggaactagaagaacaggaatgcagaagcccagccaatgtccaacataggaatagtttgatgctatttaacatgggctcatttttcttttactgcttttcatctttaactttcttttctagctgagacaagaaggaaaattagagaagatccagaccaaggcaggtgaggcggtgagtagaaacataaaaagtgtttatttgtcacaagacttaccaacctcaccctgagagtctccctgattcccttgaggtctcctgattgcagacccaagagtgggagaaaggggaagtgttgtggctgccccacaaaacaggtatggagacctcttgggagatccctgatgtgttgggtgaagtgccttaaagtaccaaggg

SEQ ID NO: 6627 - DNA, 1179 bp, Homo sapiens
aattttaataagagaatgtaagtttaaaccataaaatgaggagcttagggtggttcttaggcagaatctaaatatgaaattactgaaatgctcccacaaggcaaaaaaaaaaaaaaatacatttagatgaactccaaaggttgcttatgacctaaaacaagagctcaagtaattgggagatatatacacagttctcagcagtacaaatcaaataagctcctcattgcaacctttgacttctatttcttgcctttgttcttttttttttcagaatcaaaaagaccctctggctgtggacaaaataatgaaggacctggaccagtgtagagatggcaaagtgggcttccagagcttcttttccctaattgcgggcctcaccattgcatgcaatgactattttgtagtacacatgaagcagaagggaaagaagtaggcagaaatgagcagttcgctcctccctgataagagttgtcccaaagggtcgcttaaggaatctgccccacagcttcccccatagaaggatttcatgagcagatcaggacacttagcaaatgtaaaaataaaatctaactctcatttgacaagcagagaaagaaaagttaaataccagataagcttttgatttttgtattgtttgcatccccttgccctcaataaataaagttcttttttagttccaaatttgagacagaatgtttgttgttccctcagaaattcttgttccccaagaggcagcttgcccttgggcagccagcacacagcagagcttttcttacacagcagagcttttctcacagaactggcaaaatgagaaaacactcttcattcaggcttggagtctgacttctctaattgttctgcccttgtagctgtgtctatatgaaggactcaaacttgaaggattaggagaaggctctacaggaatagatggtaagtttataattactgggcacagttttgcccagttaaatcagtgcttttctagccagcactttgcatgcctgcaatgtctgaatccaattttcatagcaaagtgtcagcaaacctaaggcagaactaggagaaccaatcaggagagggtgtagcttgacaccttggtaataacatcacattagcatctattaagtcaactcccagatgtcaggaaatatggtaggcatgacttatacacggggcagt

SEQ ID NO: 6628 - DNA, 1235 bp, Homo sapiens
cagctccaagcccagccctcagccatggcatgccccctggatcaggccattggcctcctcgtggccatcttccacaagtactccggcagggagggtgacaagcacaccctgagcaagaaggagctgaaggagctgatccagaaggagctcaccattggctcggtgagtggcctcctccccaggaccccttttcccacccttgtcctttggaagcaggattaggggagagagaggtgccaggtgcatctgactcacatttacccacattctgaggccctggtccacatgtagaccctgagctgtagacccactctcccagcgggtaggggatgcttccagccggatatccatctctccaaatgaggaccagtaactgagaagtagctgaggagaagcaatgccaaagtgacatgggtccttggtgatgagggagcacagagccacttgcagagaggattgcctgggagggggaaggggaagaatccagggttgtcatcaccactgagtatggatttcacattctaacacattagaagctgcaggatgctgaaattgcaaggctgatggaagacttggaccggaacaaggaccaggaggtgaacttccaggagtatgtcaccttcctgggggccttggctttgatctacaatgaagccctcaagggctgaaaataaatagggaagatggagacaccctctgggggtcctctctgagtcaaatccagtggtgggtaattgtacaataaattttttttggtcaaatttacccttgcgtcctggcttccgaatgatttctgttcctccttggcttagtgggacaccagccattggaagatttgctcacggtcaacctctgaaaatgactcattgactcgccaggccagaggacccaccctgacaaggctgcctctagcacataaggtgcctttatgtgaatgaggagagatgcccctcttggcaacgccatcctaaggaaaggctcaagtggtttccagtagagagagtcctgggatgagcttggagatggaaatggtccctgggccgggatgtgatggggtttgggggcctggaagtgaggcagagatagtcccagaggctcccagatgtgttttgctctgggtgtggcaagaggggccctggggtggggcaagtcccctttctcatcacagcgcaggggttagatagggcacatctgagatgcctgaggcttggctcagggagtttcctacaccagtg

SEQ ID NO: 6629 - DNA, 1102 bp, Homo sapiens
aaaggcagtttctatctctgacaactttgttcattaagagtgcctttgtttaggcgcggtggctcatgcctgtaatcccagcactttggcaggctgaggcgggcggatcacgaggtcaggagtttgagatcagcctgcccaacatggtgaaaccctgtctctactaaaaatagaaaaattagctgggcgtggtggcgtgtgcctataatcccagctactcaggaggctgaggtaggagaatcacttgaacccgtgaggcgaaggttgcagtgagccaagatcctgccactgcactccagccagggcaacagaggacagagtgaggctccgtttcaaaaaaaagaatgcctttgatcagtgatttcattaagttgactttcgaccactgaaatttacttaatgtctatttttgcctcttctgaggcatatgtgcttctctccttatctctttggctatgataagctaattatttatgtttgcataatatttatgtttgcatgttagtgacatatattttaaaatgtgatacactcctgtaatttatgagagtatgttcattgctgtgagctttgaaggtgctctaatccttcctcatatttggccttagaatgcacctcggatcccccaaggtttaggctttcttcatttgtctttgaaactatatcttctgtctcttgtcatatctgcttattgcgtgtttttcataccttccacctctctaaaagccgttacctgagccctcgttatcacttttggttgaatgtgctgcacttagctgcatttctaagtttctgattcttgcaagtttgtggaaacagaggagtctttaacccacatcagccttgatctaagtgtaccactttacttaaaagttcgtgggatctggagctcctggtctagcaagccatgaaaatgccaataaatgtttgtaataaagcttttatttaaacatccattttgttcgaccttgaagctttactaatatgctgaagaacaaacagccgacgccagtgaatattcgggcttcgatgcagcaacaacagcagctagccagtgccagaaacagaagactggcccagcagatggagaatagaccctctg

SEQ ID NO: 6630 - DNA, 1520 bp, Homo sapiens
tttagagatgatcatgtgatagaggattcattatgtgtgctttccatgtgttgctttctacccattgtgtttcctttttttccagatttctcctctttgccctgcccttcagcttttctcagctaggccccactgctctaaggggcatttactacagcacctattaaacttacttgtaactgtctctttttttttttttttcccctttgggccaggtcggggtatgataggtcggggaagagggggctttggaggccgaggccgaggccgtggacgagggagaggtgcccttgctcgccctgtattgaccaaggagcagctggacaaccaattggatgcatatatgtcgaaaacaaaaggacacctggatgctgagttggatgcctacatggcgcagacagatcccgaaaccaatgattgaagcctgcccatcctcccatgagagactcttgttagtcaacacatctgtaaataaccttgagataacagatgagaagaaatctgattgatgctggatggacctatcacaataggctgtggacttacttgccaccagcttgtgcatttagtgtgttccttttactttttgatactgtgttgtatgaaacccttttgtcctttgatttggttttttgtttttgtttttttaggggggagggggggtttcccctcctttgcccagacttctctttgaacacaaatgcattagccttgtggctagaacaccctcttcctacctctgtctcccctcacttgtcatatgctctgacatgctaacatttcttttgttcatccctgttgcccccacagaaacatcccagaaaaaccggtcagtgttccttcctccctgatccttaggtttctgaaatagggttctgttacatcctcttcgatagcctgtttaaaatgtttagaaggtctggagctcaaaaatgcgttcttccacattgataatttagtaaactgagaacattgacatcactacagggcagcataagaggttgcttacatgtggtagcagctctggtttgattcaagttgctaccatgtacattgacagcacatataccataaccagcgtgttgggttgaattgcactttctacctttgtatgagatttacagactttccttctgggtttgtatcatgaccagaggggtactatagggttggtttatactgcaatatagaggatcagaagccatttgatttggtaggtgtgtcagaagggagaatgatggcagacgaactgctggaagaggtcagaagatagccatgctaaaatgcaattatatcctcatgtttatcccaaactaatcttggacttttccactcattagctttgttttgcccttgtttcccttgaaggtttaagttcaaccatattctgtcaactgttcagtttcagtggaatcttgtatttctggttcattataacaaactgttcgcttaaatccacccaggactctctttatttgaggtgcctcaaaatgccatggctactttaatgatgttttttt

SEQ ID NO: 6631 - DNA, 1469 bp, Homo sapiens
gtgagagtggcaactttagagtacacacagtcatgaccctagaacagcaggtattgggacagatatgaactgagttgttttgccccactcttttgaatactgctgctcagcaggcaaagcggaatatggtctttacgggtcaggaatttggggattctgaaagactttggtcctgagatttaaaaagctgtcttaatctctgttttcagaagggtattactcaaataaggtcctttgattttccttgcttactctcactttgctttccttcaggacatggtctgctatacagctcagactctcgtccgaatcctctcacatggtggctttaggaagatccttggccaggagggtgatgccagctgtgagtgaccactgtgggtcaggggttttgtattgtaatctggtacagagaagctgtacactacttaaatgtctttaatatttccacagtgtaagtaatgacttttatgctgggctactcgtctaaatcacctttttctctttcctagatcttgcttctgaaatatctacctgggatggagtgatagtaacaccttcagaaaaggcttatgagaagccaccagagaagaaggaaggagaggaagaagaggagaatacagaagaaccacctcaaggagaggaagaagaaagcatggaaactcaggagtgacattcccttcactccttttcctacccaagggggaagactggagcctaagctgcctgctactgggctttacatggtgacagacatttccgtgggatagggaagatagcaggaagaaaagtaaactccatagaagtgtcattccactgggttttgatattggcttagctgccagtctcccatttgtgacctatgccatccatctataatggaggataccaacatttcttcctaatattctataatctccaactcctgaaaacccctctctcaactaatactttgctgttgaaatgttgtgaaatgttaagtgtctggaaatttttttttctaagaaaaactattaaagtacttcctagtagggctcttggtctttctggttggtgttttttgtttgtttgtttttttgcatgtggcaaccttttttgcttttggctttgtgtactcttttgttgaaaatgataattgagtcatttaattataaatactcagatcacaatttgaagctgtctttgaattaaaggacaaactcctggaacctttccatataccagagtaaactagaatatcattttaagtatttattgaataaaatgattctatcaacactgctactgtattcaagccagtgcaataaaaaagtgggtggacagaggtcattcactttgactttgcctgccccctccaaatccccagtgtaaacaggaaaatgagaagtcacaggtagaggacatgctgtccaggcccatgtaaccaggcatgtaacatacaaaggaagcccctctggttaactagtcct

SEQ ID NO: 6632 - DNA, 1155 bp, Homo sapiens
tgatctcagccgagtactggagggaggaggggtgcagatcctggacacagggtactttcctcccccttctctagatgaggccctgcctaccccacacacctccagacataaactctctacaccacctctttggccaaaggtcagcacaggttggacttctttgctgccagggatgcaaatatttattctaccactgctcccacacagaatcagccaccatggccagtcctctcagctctggctttatctctagtagttccccattcctttctgtacacacatgctttgggaagtatcagagaaaacccacacccctgatggtgtgcacacataaataacaaaacttgggggcttcaagttcttgaagtcttccagcatcatagctgttggatctctgtttaggggtttattttagggcctgtgtctggctgacccagtcaaaccttgagatgtaataaggaaggagagtgggctatgggataaaagctgaggagcccatccaggactcttcccctctctttttccatttagtttccagatgaaaccttgaggagcggagagctgctgaacatgatcgtggctgttattgactctgcacaggtgaacattgagctctgacctccccagaagatctgggaggcagcattagggacatagggcctctgctctccctccaggcctgcagacagggagcccatgcctcccaggcaccctccctcctggctacagtggtgtgcgctttcagccatggggcctgggaaggaaaagtggaacacaagcaaggcaggctgaggttaggccaatcctgcctggagttccccttattctccatattctttgggcactcctgttccacagcaaaagctgagggggttgtgattttagctctcaactggcctttcctttggctcggaatgaaaatggtcagaccatttctacttgacctttttaccatgcataaggtccccaagaggctgtagctttgctcgggtccttctgaggcctgcactgggatcccatttctcctcctctccacttagttctcattcataaaagaggaagcttagcacccaagaatcctccttcctttgtctttaccctgcccaacctacatccagagcccagcctctcagggtcctttcctcctcaggctta

SEQ ID NO: 6633 - DNA, 1252 bp, Homo sapiens
cctgagagactataaatggtacagagtgtcctagaggaagtgggaagcttggaggctgtatggggctgtgacttcacaaccctctcctgcccccttcctccagctggaagccaggttggcccacagctttagcagggtaggggtaggggagcatctgcatgccacatgcttgtgcttctgcctcccaggcccactccctgactgttctaggggaggaggaggagaactgagggtcctccttcccaacacacacacgcacacgccttctcctaccacagcaagtgaagaatctcacttcttctctcctggcttccacagaggatgaaaccaggcattccttggcctaaggagaagagggagagggatgtgagagtagtgggtgggtggggaggccagggcttgggaaataagtgggagagacccagcatgccctgcggccactgtgcaagcagcacccagtgcccccttcctcccccaggcccagcgaggagatggtgaagatggtgctgagccggccctgccatcctgacgaccagttcaccaccagcatcctgcggcactggtgcatgaaacatgacgagctgctggccgagcacatcaagtccctgctcatcaagaacaacagcctgcctcgcaagagacagaggtgggacacggtccctgtctaccctccaggccatggcggtctgcagtgattgctgtcggtggtggtggtggtggtggtggtggtggtgatgggggtcagtgctgtcccagcctggtttgtgggcgacatctagtggtccgaagccacatggcatgcgagaccaccgtggccctttctccccatcttccagtgcccctgtggccaggatcccctgttctaggcacacctttctcacccaaccccagccctcccaggctgcctatcctgttccccatgtaggctgcctctgtcttaagggggccctggcgggtggagggtgtctcgcactctggaaccctcccacactcagactctggctctggtgattcctgcacagcctgaggagctctagcagcaagctggcccagctgactctggagcagatcctggagcacttggacaatctgcggctcaacctgaccaacaccaagcagaactgtatgccttccaccctcggcgtccagtgtagacggtgctgccctggcccagactatgcctggagccaggctgggggcaggggcaggacacccggggccacaacccacactcgggataaaacaacctgtg

SEQ ID NO: 6634 - DNA, 1428 bp, Homo sapiens
gccagcagctgcccaggctgttaacttcccatttcccctcccatctcttccaggaagaggaagacacgaaaccgaagcctaccaagcggaaacgaaaagggtcctctgcagtgggctctgacagtgactgaggccctgcattccccatcccacccccggctggactgccctctccttcttggtgattcaaaggttaatagaggctgaggagattgcaggggaaacacccttgctgcatccccaagctcccccggtggaaggaggagctttctcctctggctgagtttgagaagctgccatgcagcccctagccccttccctcctcctggggcctccagcccctcacactgctgttcccagtgatatttgggatctgactgaagccagaggctctgtaaaatcagaccatagtggaagtcctcagccccctggccccttccgcaatctcctcccccagtctcccaaagagccatttcaacagagaagggaaatgacaaaggggcagctggccagataagctaggatgagagcagagactcagtgtgtgggtgtcccttcctgcttccccttcaggtcttggtttgttctgaagggacgttttatagtcactatccacatgccagtgtgaaatgggcatctatgacgtggtcagggtgtccattcctaatcatggggcagatgccacaagcattcagaaaggagtctgaaagggtggccacagccccacgtggtgtgccctggaggcttaggttggtctgaggttggcacctcaatctacaccagagcccagggagtcccagaggcaagtttcacagaattgtcaaatgatcccatttccttgagtctgtttttttttttgtttttttttgttttttttttggcagagataatcgtgtcttaaaagttgtttttaaatgacaataaaacaagccagaatgtcttttgtgctggagtgtctgctggcatttgccccgtgcatgtatagcttggtcttgatttgattggcacccctacttgtaaccgcagaacatccccctttcccttcctgttctgcccccacttttgtctagagcagaagggacttggctttggccactacccatccttcctgctgccactggaggtgggagccaggcactgatctgtctatgcagaaccatcccccgtaggatgaggcctgtccttactcatttctcaagaaacaagatgcttccaaaaggtctgtcatcctccagttgaagtctgtgtgcctaccaagaatggccggaggactcgctgcttgacgggagggatgctccagcttggtctccagggacaactgtacctggagataaagtctggataccagggagggacagagatgctcttccttccacagtgtggccacttgctgggccatgtgaaccagcagaggagagttccttggct

SEQ ID NO: 6635 - DNA, 2125 bp, Homo sapiens
gtattttaaggttggtgtcttactccctggaagcctgaaatgggtggaatagcggtaaggcttgagtaaaactaggggacagaggttcttatttgtcgattttattttataatttgaccacagcatctgaactccctctctccctggaataagtatttttcccacatttttggatatatgtatggtagacaatttttttttaagacacagagataaatgttttcctgctttggttacctttcctttcccctttaaaaggaattagctatagaactgctttgtaaagatgcttcttgatattttacttttgttccttttccctaatcattcccttttctccccactcctccagaaggcataacccttctctccacaccccctacccccacccccgtcctaggctcccatcctttccatcaagaccttcattagcttatgatatttgctgccgagatgttataacaaggactcgttcatgtatataagctatttcttgatccatttaaaaggaattgtacattgtgtagaaaaaaaaaaaaacctgaaaaagagaaaaaaaagccctagccatggatattgtgaaactgtgttatgtcattttgtaatgtgcccgtttgtgtatgatccgtgcaaaagggtttctggggaaggggagggggtagggaggcagggctgtggagggtgggtaggggagtgggccgggcccagcacactgagactggcagctgctccaaccccatccctccttagagatgccacctcccccaccacccacccctaatttgtgccttgcctccccaccctggagtagtccctccgggtcaccagcactgccttggcagagcccactccctaccctaacctgcccaccctccctatcccccagcattaggttgatactgtggggaagtgctgggggctgggaggtagccgaggaatggggcagttcccgggggcatcgaaaccaagtattattatgaattgtaattgtatttgcactgtttttttcctctgattgcatcagcatatatacaatatacctatataacaaaattcagtgtcaagctttcttatgcaagggatttcccccaccccacctcctcaaaaaagaaagaacctagtcttatgggcctttgagggtggattgtcaggggatgatagaaaggattttaataagtcatcctgaggaaatttcacctagtgagagccacatccatctgcacagccttaggctgcgtgaaccgaggtgaggctgagctcctgtgaaagccaagacctcctggtccaggactttgtagagtaaaaagaaccaccaacacaaaaggggttgagggggctacaatctggagacctggggtctcctactaacttgctatatgatctttggtagagttaattttctgagtatcaattttcttatctgtgaagtgaagagggggatcatctggccaccaagtttaaaattctatacttctcacctgccaaaaccaaaaaacaacttgaggtgaggaaagtgttgggcccagaaaccagggaggaactgaaagtgactcgcgttgaagtggttatgtgtatgacaatgctcttggagaactgccagtcctctatggttacccttgatttgggagaggcagcagagtcatgtccagggcatcagaccagtgacatctttgcctttatgcctctagtcatctgagggcggggactaggcctcaagccccatctcacagccaaccacagagcccttaagggtggttgacaattgaatgccccaggttggtgctttagttatttactccctttgtgagctacaggatgtgtaacttttcccccatcttggtgataaaataggagagcgcagacacagcccacattttgtctcctttcctcagatttcatctgaaccccgctaaaggcagctgtttcacagtctgtctccttcaggggcccaatttccccacagcctgggctgagtactcctactctcttctttaggttctgggctgataaagcctggagagggtacagggtgatgggtgaagccctggtgaaggtgaaaggatagattggggttggggggtggggagcagggaggtgggatggggaatggccttccctgaatagg

SEQ ID NO: 6636 - DNA, 2870 bp, Homo sapiens
ctaccatacacggaaagcaaaacagaaaaacagaagacaaaaaatagagatcagcaagaaaacacacgccctgccctgccacctcccctttatttcacactgctgcgatctgttcttctgccgctctgtcttctctcttcagttttctttaacagtgaggtggatctttacctctgatagaggtcagaatgaggtcctggggagaatctaagccctccgatgtgtgtttctaaagttgttttatgctataattattaccatttttaatgatgttgtgtgtcctccctttgttcagtggacggttaaaccttcccccactcaaccaatctttttctttttccttttcttccttttttttttttttttttgtaaacacaaatgacattcagttcaatgatacgagcattgcagattgcagtaggggtcccagctgccaagtaggacatgactaggagtgttaggggcagaagttttgaatgcacttaaccggaggagggcgcagggtggggggtatcaaagaaggacgaatagcaccctacctgtgggtgtttgggggctggacaatttgggtggcagtgtttggtactgaagttgggctctaagaatgaggggaaagagcctggggaggagcttaaaactcaaccactctggaatttacccatagaagacgggaagaaagaggtatgaagatgggctcaattatgagccagggaggattgaaactaggtcctgcctttctgtatcttggggaaataagaccgatctcctgaccccattgggaacacggaagtctattccaggccaaccagcccaaaattatttcatcttgtattctttgtaaaattctccctcaccccaccctgcttttaaaaattctaatctatcccctctaaccatagccccatctataatacagaggaacggctgttccaaggctgtttgctgggtgtcccacaagttgggtggacataaatgagtcaagtgacaacaggaggaaatagacttagacgaaagaaaggatttctcttccaacagttgagattcgcatatttgcctattctttcaccctctgagtgccaggagatgagaggctgggggtacacaatcaggttggagtcctgtccttactctgctgcaccagctgcagaaccaactgctcaaagccaaacagctcatggcaaaaccagcttaggacctctgctgtacaaatagttgcttcccactgccccccgcccgcccccagaatgatattaattttgccttttttttttttttttttttaagcgctactaatgtagagaatgaattgaattgtgcaatgttgctgttctggggactggggagattagcatcccatttgcccacactgtgggaagacggagtggaccaggctgtttttgaagtaagggaagccccttaaaggtacgggtttctgctcttctcatagtgtacacccacctgcctctctggctccagaagctgccagagtgcactggggggaatgttctcagcagagaagaatgaggagaagtttaatattttgcccttgaaagtcacctgaggaagtttccccacttttattttttaaaattaagtaattttttaaagaaggcacttttaaaattaacacacacatgaactgcacaccttccccataaaatttggaggtggggtgggagaaagagctaaaatcaggctcagttcccctactctggcctctactccccacaccccagtgccactgtgggtgactatactggccctacgggccttcctggcttttttctttcctcccttaccccaaattcattgagcacttaaaggagcagagatgcagccagtgtctgggctcccccagtggtgaaatgatctggaagctagatgctagtaacaggtagtgattgggttttttgagtatttttccggggaatgtggtacccctgactgtaagtggtgggagagggaggggggttaatggaactgggtctgggattattttaaaattatatatatatatataaagatatattcttacatcttttctttgccctctgtgctttgaaagcactggataaattgtttggttttgcttttctctcttccacaaaattggaagctttttttaaaaatgttttccccacaagtcatcttgccttgtggcatgtctgtctagcctcttcctccctccctcatgatgaagtgccatttctgttacgtctccctctccccaagctcagaggtgctcagaggtacgagatgcccaagtttgtcagttgagattaaaagtaaggaacagagaatgtgcaataccgtctggctgggggctgtccctgccctgccctgagctgagtcctttccctgggagccaggccaccttagaatggggtttggaagtaagatgtatagagttggggaatcatggagaaggaaagcctatagtcgagtgcctgcttaggtgctgaggtcacaggggagatggtggaatcttccctgtttttatcccctcagggtcagttacatagaagctgcttcttgactagtatagctcggtgaccctttgttcaaccgctgaggtttgatttcttaccctttcttctccccattttcatactcttcccagggattagtgatggaggtgaggtctccctaatcatggtaaagtgttaaccttccacctcctcccttccctcctccttcctcatccttctgtcttcctcaattctccgtctcttttttttcatcactgattgccttgtgtccctccaagtctacttgttactatccatctccaggctctgggccgtgtagacactaaacctcatgccctaaggacaggaggaaagaccctctgtttggagcattattagtag

SEQ ID NO: 6637 - DNA, 1309 bp, Homo sapiens
aaaaatagtgcttcttatcaggctaagcacctgagttcttcattttaaaaagcatcttaaatgtcttcagattttgaatctgctaaccctggtgacatgcagtttacctatataacaaacctgcacatgtacccttgaacataaaataaaagccaaaaaaaaaaaaagattttcaatctgtatccatgtagaattaagggcacgtgtcaacaggccttgcttatgtagatttaagtttacttaaattgctgggttgaatgcccagaaatctcctttaatataaatgttctaggacaatatcaggtaggacatagcttagttaactttgaactttgtgtgtgtgtgtgtgtgtgtgtgtgtgtgtgtgtgtatgtgtgagagagagattcttgttaataacttcaccattccacctttttaaaaatggactatttaagggactttattctgatcttacttgtatttttctttccataggatggatagaatgacagaagatgctcttcgcttgaatctgttgaagcggagcttggacccagcagatgagcgagatgatgtcctggcaaagcgactcaaaatggaggggcatgaggccatggaacgtctgaaaatgttggcattgctcaaaaggaaggatttggcaaatcttgaggtgccacatgagttacccaccaaacaggatggcagtggtgtcaagggctatgaagaaaaacttaacgggaatctcaggcctcatggagacaacaggactgctggaaggccaggcaaagaaaacatcaatgatgagcctgtggatatgagtgctagacggaggtatggctcagttcagctgcctccagggatagggtcgtctcataaagcctgtgaaaatggaatgaattccaatgagaggagggtgtttttcatcctaaagattcttaaaagaagatatatcatcgagtttgaccataaattcattttatttccaaatgaaaccaggtgcctcaaaaactgcttagcctacagagaatcgtagttcttactcttaagagaaaaaatggtcatttctagataaagggggcactagagagctgataggccaaatggaagtgagttaatatataccttcattctaatcttcatggccgtcttaggaggagaaaaatagtctttttgtcagataattccaggagttttaggatgtatttattgtggagtcccagcttttattacatccaaaaacatgggcctagcttttcttgtgtcagaaagcaaattatcttcatgtggtaagtctctgcattcttgctgtatctgtaccacttccccc

SEQ ID NO: 6638 - DNA, 1164 bp, Homo sapiens
tctagggcacctgcccatgctcaagggccagcctctctgcacggggctccaggcagggctgcagcctgtgaagtacagcatcccttctcctccttagagcacagacccttcctcagagaaggtgctacttcttcccacaccactttagggtctgtcctggtggctcatgcctttaatcccagcattttgggaggctgaggcaggcagatcacttgcgcccaggagtttgtgactagcctgggcaatgtggcaaaaccttgtctttacaaaaagtacaaaacaatcagtcgggcttggtggtgcgtcccagctacttgagactgaggtgggagaatcgcttgagcccaggaggccgagtctgcagtgagccaagattgcgccactgcactccagcctgggtgacagagcgagaccgtcataaataaataaataaatagataagtaagaaagacctggcattgtactcaccctgatgtgtcccctgtcctacctaggagatgaaagttgcacagcggatggcacagaagtcagcagctgtgcctgagctgtgggcccggtgcctgctggggcactgctatgggctgtggttcctgtgtctgcctgcctatgtgcggtcggcaccctcccgagtgcaggcactgcacacagcctaccatgtgctgcgccagatggagagcggcaaggtggtgctccctgatgaggtaggcaatctatgtgaccatgctcatacccaggcccagtgagccttgtgcagctggagagggctgtgagagggaaacttggtggagactaaggaaagaagttgcagagccccagagctgggcagattatctataaacattcgtcgagtgaataagcatgttcagggtttagcagtgaagactgtagggtggcagggtcagcagaaagggtgggtggctctgaggtagccccaggacctgccaggggccagtgatgtctgtgagaattggggaggcaggaagagggtgcttgctgagactttggttttggttgagagtgagtctcccattgtcctgtgcctctcctggcccaggtgtgttaccgggtactgatgcagctctgctcacactatgggcagcctgtgctgtctgtgcgggtcatgctggagatgcgtcaggcaggcattgtgcccaacaccatcac

SEQ ID NO: 6639 - DNA, 1153 bp, Homo sapiens
tttgggaggcgcaggttgagggccgaggggcaggaagaaggattttgccgggggagaccgaaacaccggagaggttcggggtgtagaggcgactgggggccgagtacgtgaggtgggagtgggcggagaggggagatgaagtccggcggaggtaggaggtgagtggtccttgtgcatccctgacggagtcccctcgaggacgctactgaagcatgcctggtattggggtatggcctgggaggagggctgcttgtctgtaacctggctcctctgagtttgtgatctcctccaaactggtccctctgccttctgcgctttggtgcccccgggaaagggccccttgagtggtttgaacgagcggtgctgtgtatagtggggcaggaagtcccctcctgcgtcccgtccttttgcttcctttttcaaatacttcttgtggtttcctgacgtgaatgaaggtgaggtccattgcttggtgttttgtcctggcctccttggaggagaggtagggttttgaatccgacaactgggtaaccgtccgaccataagttgtgtggaactctatggtttgctgagctttctagggagttggctgctttgtgggttagtgtgtagggtgccttggagggtcttctatgtgttgagaatattcattcctaggagttcttgaaagaactttcaggcctctgccaggctgcctctgaagcccccctggcttggtttcttgctttccaaggctggaggtcagagggaccaaggggtaggagtccgcctaggtggtatgcagtcttaatttagggacacattcttctaaaacaacagtaggtaaggatattgcaatgattcctcatggcagagagctagaaggaatttaaggattgatggtggaacattactacaacatctctagcctttttctgctggtctgactgtggttgcatttatgactgtgactctggttgtatttttgtgtgtatcccccttgactctgttacttttttttttttctcgtcctttcccctttgagtctctagggactatgtgccctagtttgtgggagtcagaagttaggtggggaggcaaatctgggagggtgtctgtgcacgcatgtgcacacttaaatgcatgtgtgtgcataacccactgtaaccattgt

SEQ ID NO: 6640 - DNA, 1931 bp, Homo sapiens
gtggagccccagcaaccccctcagccttgcgtgcctgtgtactggtgttctccctggccctccactccgtgttcgaggggctggcggtagggctgcagcgagaccgggctcgggccatggagctgtgcctggctttgctgctccacaagggcatcctggctgtcagcctgtccctgcggctgttgcagagccaccttagggcacaggtggtggctggctgtgggatcctcttctcatgcatgacacctctaggcatcgggctgggtgcagctctggcagagtcggcaggacctctgcaccagctggcccagtctgtgctagagggcatggcagctggcacctttctctatatcacctttctggaaatcctgccccaggagctggccagttctgagcaaaggatcctcaaggtcattctgctcctagcaggctttgccctgctcactggcctgctcttcatccaaatctagggggcttcaagagaggggcaggggagattgatgatcaggtgcccctgttctcccttccctcccccagttgtggggaataggaaggaaaggggaagggaaatactgaggaccaaaaagttctctgggagctaaagatagagcctttggggctatctgactaatgagagggaagtgggcagacaagaggctggccccagtcccaaggaacaagagatggtcaagtcgctagagacatatcaggggacattaggattggggaagacacttgactgctagaatcagaggttggacactatacataaggacaggctcacatgggaggctggaggtgggtacccagctgctgtggaacgggtatggacaggtcataaacctagagtcagtgtcctgttggtcctagcccatttcagcaccctgccacttggagtggacccctcctactcttcttagcgcctaccctcatacctatctccctcctcccatctcctaggggactggcgccaaatggtctctccctgccaattttggtatcttctctggcctctccagtcctgcttactcctctatttttaaagtgccaaacaaatccccttcctctttctcaaagcacagtaatgtggcactgagccctacccagcacctcagtgaagggggcctgcttgctctttattttggtcccggatcctggggtggggcagaaatattttctgggctggggtaggaggaaggttgttgcagccatctactgctgctgtaccctaggaatatggggacatggacatggtgtcccatgcccagatgataaacactgagctgccaaaacatttttttaaatacacccgaggagcccaagggggaagggcaatgcctacccccagcgttatttttggggagggagggctgtgcatagggacatattctttagaatctattttattaactgacctgttttgggacctgttacccaaataaaagatgtttctagacatctgtacagtatctgattcgtttgttttgggaaaggggtgggcatgtggccagcctgagagggcctgagtcccagatgtttacagctgttttaagattcttggtctcactgttttcactcaggacccgatagtccccttccctgaagatgacctaatttttcctcctttgtgtcttggtacttctttcccggtctccacccctcggcttcccttctcttccctcccctccctcttcctttcttctctcttcaatccctctctcctttccgttcgtagtctcagggctaatttagaactactcttcccagcttgcacctctcagggagtagccgagagggtggagccaagtccccagtttccggagtcagcagggctgctgggaagtggagtccgtttcctcctagtgctgcgtgactggggatgtgaaggagtctcgtaaacaaactacaattcccggcggcccccgcgcgca

SEQ ID NO: 6641 - DNA, 1931 bp, Homo sapiens; identical to SEQ ID NO: 6640

SEQ ID NO: 6642 - DNA, 1156 bp, Homo sapiens
gtctatttttatattgcccttattcctctggagccttagaacaaatttttgcctctcaggagccttccaccgttcccttgaaatttgtcttcactctggaaatttattttcttgcaattccccctaaccagagttaaaatgagcagaaaatgttaagcaccttggaaagatgcaccactggccactttcagaacctaatcttggccaagcgtggtgactcatgctgcaatcccagcatgatgggaggctgtggcaggaggattgcttgaatccaaaattcaagaccagcctgggcaacacagtgagaccccggctctacaaaaaataagagaattagccaggagtgatggtatgtgcctgtagtcccagttactcaggaagctgaggtgggaggatacattgagtctgggaggttgaggctgcaatgagctgagatcatgccactgcactccagcctgggcgacagagtaagaccctgtcttgaaacaaaacaaaaatctttctcacctgaaaatacatgggtttttgcagaccaatggagcaacaggacgaatactctgaaaattatattcttcgagctaccactattgggcaaaccacacttgtggctattgccaaggacaagatgggaagaaaatacacatcaactcctcggcacattgaagtaaggaaattatctcatccaaaatttgtactttttcttgcttaacatcatttgtctttttctgttagtttatacaagttaaaaatcatttgactggctgggcacagtggctcacaccaccatgtgagcactttgggaggctgaggtgggaacatcacttaaacccaggagtatgaaaccaccctgggcaacatagtgagactctgtctctacaaaaataaaaataaaataaaataaattagccagacatggtgtgcctgtagttccagctactcaagaggctaaagtaggaggatcacttgagccctggaggttgaggctgcagtgagctgtgattgtgccattgcactccagcctgagtgacagagagagaccctgtctcaagaaaaaaaatcatttgactgaaaaaaaggatggtgtctaactcttgcacaacatgcagtatttttgggttttgtctctctgtataaaacagttcttatagaaaatttg

SEQ ID NO: 6643 - DNA, 1283 bp, Homo sapiens
tgtgggaaacctcattgttctgtacaaagtactagctaaaccagaaaggtgattccaggaggagttagccaaacaacaacaaaaacaaaaaatgtgctgttcaagttttcagctttaagatatctttggataatgttatttctattttttatttttttcattagaagttaccaaattaagatggtaagacctctgagaccaaaattttgtcccatctctaccccctcacaactgcttacagaatggatcatgtcccccttatgttgaggtgaccacttaattgctttcctgcctccttgaaagaaagaaagaaagaagactgtgtttttgccactgatttagccatgtgaaactcatctcattacccttttctgggtttgaagctgctgtctctagaagtgccatctcaattgtgctttgtatcagtcagtgctggagaaatcttgaatagcttatgtacaaaactttttaaattttatattattttgaaactttgctttgggtttgtggcaccctggccaccccatctggctgtgacagcctctgcagtccgtgggctggcagtttgttgatcttttaagtttccttccctacccagtccccattttctggtaaggtttctaggaggtctgttaggtgtacatcctgcagcttattggcttaaaatgtactctccttttatgtggtctctttggggccgattgggagaaagagaaatcaatagtgcaactgttttgatactgaatattgacaagtgtctttttgaaataaagaaccagtccctccaaccctcagacctatttgacttttatttattaaaactaaatgtgctttctccacagaagctatgaggtttgggttaaaaatagcatctttgtgggtggtagcaacaggatttattctttattattattatttttgagatgaagtttcattcttgttgcctgggctggagcgtaatggctcgatctcggctcactgcaacctccgcctcctggttcaagagattctcctgcctcagcctcccgagtagctgggattacaggcacctgccaccatgcccgggtaattttttatattttaagtagagacagggcttcaccatgttggccaggctggtctcgaactcctgaccttcaggtgatccacctgcctcagcttcccaaaatgctgggattacgggcgtgagccaccgcacccagctggagcaacaggatttaatatagagcaaatgtttagttttatcatctgtaaaatggagataagtattgtcagagtaaaca

SEQ ID NO: 6644 - DNA, 1241 bp, Homo sapiens
gagatgaaacttgagggacaaagaagagtctagacttgaacttgtcctttcccaagcaatggaggtcacatgcagcttacataaaaaaggttgtaaggcaggtaaggctgttttcttaggtgattgaatacagtatttaaaattatttctctggagtgtagactaatctccttcctggaaggtttttgtttccagactttactgattatctttccttctgtcaaaggtacttcagatacttgcatctatgtaaaaggcttttgattattagttaaatgtaaagtctgcttatgggggactagtaaccaaactgctgtaacttcttaaaaaaatccatcacttacacatgctttatacatttcttgttacataaaaatggattaacagccatagctccttaaggaatttatcaagctaattatgttgtaagaataaatgaatcttattgatttgttcctttgaagaagtgaaagtgtttggtggtgaaggtgctgatgagagagttaaaaacatattttgcccacatttaatacctaattttcttttaaatctttcagtattctaccttgtaaatactgttatttgtatatactgtaaatgatgacatcggtgggcactaaccgagcccggggaaactgggaacaacctcaaaaccaaaaccagacacagcacaagcagcggccacaggtaaataatccaaggcatacggattcatggatagcgttgcctgctgatactggtttccatgcagtacagcatcattctgtgctttgaactgttggtttaggttccttatttttgttttctagtccttggctctttttttacttaggtcctgataactgttcatgacatgctgtaaggcaagatgcttacttttttgttgtttaatactgtattatgaggcttagcactttattatgggtcctgtgctttttatcttttttttttttgttttgttttaagataggagctccctttgcctaggtcaaagtgcagtggcacagtcaccattcatttgtagcctcaacctctggggcttaagtgatcctcccgcctcagcctcctgagtagctgggactaccagtgcacactaccatgccaggctaattttaaaattcttgtagagatggtagtcttgctgcattgcccaggctggtcttgaactcatgggattataggtgtgagtcactgcccggctctataactcttaagatagcatttcccttctcttacctggg

SEQ ID NO: 6645 - DNA, 1227 bp, Homo sapiens
gcattgggtggttgtctgtctgtccccccccccacccccattcctgctttgtaacaaaaactgaaagtagctatgaaatcataatcttattaaaaccctggtactctgagatatccttttctaaagagtgtttccttacctttgaagcccaagaatttctttttttttgttttgttttttgtttttgtttgttttgagacagtttcactcttgttgcccaggctggagtgcaatgccgcgatctcagctcactgcaacctccacctcccaggttcaagccattcttctgcctcagcctcccgcgtagctgggattacaggcatgtgccaccacgcccagctaattttgtatttttagtagagacagggtttctccatgttggtcaggctggtctcgaactcccgacctcaagtgatccacccacctcggcctctcaaagtattaggattataggtgtgagccaccacacctggccttctgattactaaattttagtcatacttttggctgccaaaaaaattaatacattgatgttttctatacatgctttgtactggcatttaatagtgaagttacttcactatttttctttattctcaggtgcatggaggactgcaacagaggagtgggggactgaagattggaatgaagatgtaggtattcccaggtcattcctcactaatgccttctatccctaagtgttgtttagggatagaaaatgggtatgtttctacccctcaaaattcacccttaagattctgacccaaaacttttacatccaaaatagtgttctgagccagaacatttcacatatgttatatgaaggagactgggcatgaacaggactctgtggaaccacactatggaaagggcaagtgcacttgtgtaagtccaatatctgattgtcggatttatcccaggaagagattggtggttgggtagggcaccagaagtggagttaggcaggtagtgcattgagtaacagctgctggtggtacatgactacttggtgcatttaagtatttgctataaggtcctgtaatggattggcagtggatccaaagcgagtgttgtggtaccaaatcctcaaacttgtaatctggttgactctggaacccttgtatttatttgaagcccaactgtataattgtgattgagatgaatatctgtagaattggctatctgccagcttgacttaacttggaaacctcatagatgggtggcacg

SEQ ID NO: 6646 - DNA, 1185 bp, Homo sapiens
gaaaattgtgggaaaaaatatctctcagactgcccctgttctaaagccatttgaagattccagtgttctggtatatgattttctgttttaggaattggtaatgacaggtattcagtattaaaatcatggataagtacttgtaagttttggctgagttattgagctgccatgttaaaactagcatttgaggccgggtgcggtgcggtggctaacgcctgtaatcccagcactttgggaggccaaggcgggcggatcatgaggtcaggagattgagaccatcctggctaacacgtgaaaccccttctctattaaaaatacaaaaaaaaaaaattagccgggcgtggtggcaggcacctgtagtcccagctacaggctgaggcaggagaatggcgtgaacccaggaggcagagctagcagtgagccaagattgcaccactgcactccagcctgggtgacagagcgagactttctcgaaacaaacaaacaaacaaaaactagcatttgatatttcattaaattaataacttcacttaaaaaattaaccattattattggcaacatcagtggaattcagctatatactgtagtgactcttatgcatcagttattttgggacatttaagcatttcaaggcttttgtgtttgaacccttttagaagaagccccagcaagtggcttcattttgatctaatctgatttgagtgttggggaatgttagcgtgttcagtcattcttcatgaagatcccttcccttccccattagaattgaccttgctgttctgctggggaagacaccatctacaatggagaatgattcatctaatctggatccgtctcaggctccttctctggcccagcctctggtgttcagtaattcgaagcagactgccatatcacagcctgcttcagggaacacattttctcatcacagtatggtgagtaggaaacgtggtttatcctaatcaaaccttcctgctaatcctagcacacatacacagttccttccaaagacagtcaggtttttggcaggtgaagcatcctctttgtcttcttaagcagacttggttgtagaaatgtttgagttgggtaatagggggtagctctaagagaggacttagttctggacagactgaatattcttataagaataagttaacattatttattgactactcattgtgctga

SEQ ID NO: 6647 - DNA, 1159 bp, Homo sapiens
tggtgctagtgcaggacaatagcatttccttgagattcattagcatctctggcttcatatactgggtttcctcttgcagatttgaagaacccaagtgattcagcagtgcacagcccctttacaaagcgccaggcttttaccccatcttcaaccatgatggaggtgttccttcaggagaagtcacctgcagtggctacctccacagctgcacctccacctccgtcttctcctctgccaagcaaatccacatcggctccacagatgtcgcctggatcttcagacaaccagtcctctagccctcagccggctcagcagaaactgaaacagcagaagaaaaaagcctccttgacttctaaggtacttaaacttttaggtagataccattttatggcaaggggtgtggggcttgagaattgagattaaaagggtaagtttggaaatttaaagggaagggttttttttagtctttagtaaggttgtattaaagccattactttctcttctccttcaactttatagattcctgctctggctgtggagatgcctggctcagcagatatctcagggctaaacctgcagtttggggcattgcagtttgggtcagagcctgtcctttctgattatgagtccacccccaccacgagcgcctcttcaagccaggctccaagtagcctgtataccagcacggccaggtagaggaaacattaaccataagacctctcttattaacctttactacttttttaatctgtgggagatttctagaactctggagaggccaagcccctctgcatggctgagggggaaagtagtcagtcatagcatttttagtgctttaaaatattgttattagggttatctgtaactaaacaggtagaaatatgccccttaggggctgggtgtgatggctgacacttataatcccagcactttgggtggccaaggcaggaggattgcttgaggccaggagttcaagaccagcctgggcaacataatgagtccctgtctctacaaaaaaaatttttttttaaacacagagtttcactctgttgcttaggctggaatgcagtggtgcgatctcggcttactgcaacctctgccacccgggttcaagcgattctcctgcctcagcctcccgagtagctgggattacaggtgc

SEQ ID NO: 6648 - DNA, 1180 bp, Homo sapiens
ttatgctactactcacagtggcaatctcactgccttgccactccttcttttacctgacctatcattgtcctcattgacttaccgttttccctgatccatcgttgtccttcaagtccagcatggggtattccccatggaggagaagaggggagggaagaagagggaagatgaaagagaacacaagtgggcagagaaattgtgcaggtgccttattccaagagcctcctgccatagcattgcacagttattcaacattagtccttgacttgcagcaactgtgctaagtgtatgctgagcaacaataattggagccactaagaaatgtaattcaaggaattgaactttaatagtctttgaacaggatctcctggaatcatgtgaaatcagaagaggtaattctgtattggtattggggtgaaagaggcaggtacatttagcttctcctgtcacaggtgacctcacaaagttcggccgtggggatgcctcctccccagccccggccacaaccttggcccaaccccaacagaaccagacgcagactcaccataccacgcagcagacattcctgaacccggcgctgcctcctggctacagttacaccagcctgccatactatacaggggtcccgggcctccccagcaccttccagtatgggcctgctgtgttccctgtgagtacctggctttggtcactccttgtggtgaaggatcctagccctggacactatcctagctgcttttaagggtcaatgactttaataatggatgaggaggaacagtttccacctctggcctgtttttggcctgatgcagggtggtgggggaatggggctggaattggtggaattaggatagggattgcctagtcttagaatttgccaaagggagaatatgataccatacagctttgcttcactcagattcattcattccctgctgccattgtccctttttcttcctccaaactaccatttcttgacttcattagtagattctagaacagttagtaaggagctaatttcactaagcaaactgtagtcaacttgcatcaggataggtagccatctgaatggccagtacctggagcaggacaagtgggacagatggtattctgctgccaagtcactgcaaatctggcctttttgctctttaggtggctcctacctcttccaagcagcatg

SEQ ID NO: 6649 - DNA, 1217 bp, Homo sapiens
agcaggatggccaggtaatagcccttccccttctctcctttcccttcctcttccttcctatcccttaaaactgccttccctttccttttcttacccttcctcaccaccaccttcacccaatccctccccagcgccagtcatgggcacacagcacatacagacacaagcgcacataacacgagcggccggcaaaggaaatctcagagaagggccgggttgaaaccttttttgcccaattcctttggtgcccttctcctcctgtgccacagttgtcctcatcccatcagacctgggtcacaccttccctctttcctctcccagccttccctcttccctgacattttagctttcccttctaatggtggagttctattgtcaaagtttgtccctttattttccatatatcctggttctgcctcagctaccatatttgcagatgattctctgttgccagcgccagcaggaggagcaggtaatgaaattgaatgatcatatgcttgaacccactccttttcagtccccatttcaccttcacagcctcagggaacttgaaaagactgcgcggtcacaaatcgggatacacaaacacaaacaccttgctgagctctctggcctccccttcctctctcctcctcccctccccaacaccctctttatctttgtacccttccccagctgtggaaaacattcggttaccagaatggaaaagattcttggggcagcatctggagcctgaggcctcagactgcctctcatacctgcctgaaatgggctcacagatgtgatgtgtggtaggggtggggatctgtggggcgatgcaagtggcctcttgagagctccattataggtggctggagctagaataagggcttccttcctcaaagacagctttccaaattgaggcattaatggggatcaatggaaatgaaattgccttgtgatcacccatctccaagagcaggggagagagggggtagtgtgagaatgtagaattgaaaatgagtagaactcactcactaccttgtctctaaaggtatcttgccctcttcatcttttccctatttaaaagtcaaaaatgccttcctgcttgtaagaaaggggctttagcagctatgcagaccaaattttctatggttctaatagtagtgaggggaatgggagagcaagacagtttgcacatctccacctgaagatgttacaaatttgtaccactaact

SEQ ID NO: 6650 - DNA, 2479 bp, Homo sapiens
cccttccaccagctggggagctagagggagcaggcccaagggcagagcagaggctgaggcacggggagccagccccactcggggaccagaagtggaaccaaaaacaagaaaaaactgtgagagattgtgtctgcccctgccctgcctgggacccacagggagactataatctccttatttttttactcctactccccagaggggccctagtgcctctgttcctgaattacataagaatgtaccatgccgggaagccagagacctgcaggggcctcggcccctcacatcgtgtatgtctctccttgatttgtgttgtgtccagtttggttttgtctttttttatttggcaagtggaggaggcttttatgtgacttttatgttgtggttggtgtcttaactctcctgggaaaaggaggctggcacacactgggatgccgcagcctggccggctgtggggtggtttgggaggatccatgtcggctctgcctgcagtgaccagtgctctgtggggcagaggagctgaccagggagggaggtacccatgagcagagggtagtgggagagtgtaaaggagggtttggtcctgtctgcttcctcaccttgagagtaaagtgctgccctctgcccccaacacacacacatatcaattcctggattccttagtcctgctggccttgggctggagcctaggaaagtggcccccaaatccttagtgagctaaagctgggtctgaaatttggtcagtggggaggggtagttttcttttcttttttctttttctttttttctttttttttttgagatggagtctcactcttgtcacctaggcaagagtgcaatggcacaatctcagctcactgcaacctccacctcctgggttcaagcgattctcctgcctcagcctcctgagtagctgggattacaggcacacaccaccacgcttggttaatttttgtatttttagtagagatgtttcaccatgttggccaggctagtcttgaattcctgacctcctgacctgcccacctcaacctcccaaagtgctgagattacaggcgtgagccaccacacccagctcagggaggcgtagttttctttaattttaaatttaaacccaagtttattggcagactcccttttgacctccctttgcctccccatctggtgctttcttgcatctacaccccagggccctgtggtggggctgcagggggaagctgtgcacctgagatgaggctggaacgggaattggcctctctgctcccttcttcagtaagcaaggagccccgcccctcaggcccagcctctggcaagaggtggtggaatccttgtgccgggtagtagaggaggataagggcaaaaccaggcccaggccagtgcctggcttggtctggatgggacactgtcagagtttggccacagcctgtcctttacttcatccacacctatgaagctattccctaaataaggcatttcccaagttagtcgctacctaatcagccttgagaagaatcctttcctcttctttgatagtgggtcgggggattcttcaggaatggtttggagctgggagtgggtagggggattttaaatgttccatatgggagccccaaaggaactggatgggctgcagtgaggtgggggcgggtgggcagggaatgggagaggggaagtcttggcagggaaatcccttttggccacacagtttacaaacccagtatcatgtctgtctgtgtgtctctcaaggtgagagtctgatttttataccaaagaggaaatgattttttttcatattttgtttgtctatattatataaatatatatatacagttatatatatatatattattttttggttctctctcgttttttagggagggaagaaagtaccaagttgcattgagctgtaattaaggaacattataatttatgacacatttctatacttgcaaaaattatatcattttatggatataagagaaaaatgcctttttataaaatttcaatttctgagaagtgtgtaatttgtctcttttctgatgtttaaccaagactggtggtgaaagtaaagacagaaactgtctcttaaatgtaattgagtgggtagatctgggatatcttggacaaattggaatctgactggtgtgggatagcacctcatccatttgcagacctcccgggatctgagtttcagctgaagatgaagacggggcagtgggtggtactgagcggcatatcgtatggactttggctgggtgcctaggaccttgagctgtttacctttctccaaacgcaggccaacctgtcatccctaacacacgccagatggatgtgtgtgtagggaaagtacctggtaaatattgtaaggttttgttttttaactctgcgcttttccgcatgcctcacatcttcctggcttctcaagtgagtatcaaggaagctaaagtcttatattaaagggagctttcctccagggaag

SEQ ID NO: 6651 - DNA, 1122 bp, Homo sapiens
gttttacccacatgtggtgttaccaaagccgggcagaaccatgctagcggaagatgtgaaatccagatagctcattattgccaagagctaggcagctttgatctccaaattgttattgctttcatttttattgtaatggaattgctttgttttgtttttttgtttttgtattgaagagggttgttttccctttatttttcataagctaatgtaaatgaagaaaaaatgtcttctctgggctgtaggcctggctcagcgtacacaggtatacatcctaagctctctatgttctctaatctgtggtgactgaacatgtgtctcaatgcacggggcatttctacctgtgtttctgcagcacccccactgccttgagtccccagcagtgctgttatttgcctaacacctgtagccatctgccacgcagccagacgtgaaacgctgagacagagaccatttaggttaaatacgacagcttatcctgctgggtggggaaagtaaaaaatatgctggttcaaggcctaaagtaaaatgatcaataatgtttgtagcattaatgaaatattttcaagaaatgtgtccaggggtagcactggctatgttgacgaggcctttggtaactcagagagctcttggccctgatggggacttgcccttacgctttctttatcaggctctgagttcacacggagcctctggcacttccctgctgtcttgggagaaaggaaactggttgccgcggcaggttgtggaatctgttgctggaaccaggctggaagcccacctggtagtgaacagggcccagtggggcaggctgggcatgttgtggtctatgggtttgtttcctggagaatgttcaggaatgtcttcccagctgctttggtgctgagctctattatctcacagcacgtccagaaggctaacccaggtggggaggatgctgacaccagctccaggtggagttggtggtcttaatttggagatgcaggggcaacctgtgaccctttgaggcaagagccctgcacccagctgtcccgtgcagccgtgggcaggggctgcacacggaggggcaggcgggccagttcagggtccgtgccaggccctcctcagtgccctgtgaaggcc

SEQ ID NO: 6652 - DNA, 1834 bp, Homo sapiens
atatctttagtgtaagattttaaaaggttttttcagcatccattcaacaaatatttattatctttatacaaattattcattgtgttaaacttatttttagtttaacattctagaaatgaaacgtttttacttaaccttattctacaaagggaatacagcagttattctaattttaataaatgctaaaagctttatacaatttttctttgtgcactaaatgatttttggcccatacccagcaactgtgatgaatgtataatgaaataacatcttgaaaacaggccagatacattaagtatttattgagcttctgtcatatgcccagtattatgcttcttctatactgtttctctgtgacaagtcatactatattctttatagaattaaaagtagaggagaggcagagtttacatattgtccagttgctttacagttgtacaggaggttataagaagaaatatagtaaattagtgggaagtcagaggtgggggcgttagtgagctattttcttcttgaggttgtgacacaagctgacaaaagccagggagttcacagctgtgtggtggcacaaagttccatatgttctaaaaacaattaggcccagcagggtgtccctaatggcttccttgttaaacctccatggccagctgatctgaagctctgtgacatgttctctgagctctgaatgctctggctttttgtcattttgtcttgagacaagtattttcctgtagtcctcattccttcgagttattccatctcccaggatattctctggtgagaagaatgtctttcagtgaatttgccttgaatttagcatccatagagctgtgtcagtgttcttcttgatcacaccttctttaaaaaaaatacttgcttgcgatgactggacaagttcagttggttagtttcaggcctataagaagagagagtaaaggaccttgctatttactttgataccatagttgtatctcaggatggcctgcaaaccactggccttgtgtgtatttaagctaggaataaaataatggagaagtgttaatatgtatacaaaaaggtaaatattgatatatctactctctgttgggggcagaagtgtcattttaagttattcaaagcactttcttaagcattttagaaagcctttattctttgctgttggaagtctccgtactttgcagaattggtatttgtgtactagcctctgccgcaggatggggaggtgggcaggtagctgataggggcagccaggagtttttgaggcaggtggtgggaaattgtcctaatttgttaattggattatgtaactctgttactagtctgttattggctgttgttactggatgcatcttgatattcagaagaataactgtgaggcattcttcagttgcgggttaagtggggttagtttctgttctgtcagatgccctttttcagtcaaaggttagccccttgtttctccctccttccagggtttagggagtgcagtgatgtcgatttcatttcccttccccgcaccccttgacactcagcaggattgcactgaaacccttcacagatctctcgttcactagttgtctcctatttttccataactagcactagtttggccttatgacctggttagaatcactcttctgtattctcatttccaatttttgtgccccactaacgtggactagagaaacttggcctgctgtgcagtgggccttctgttcaacttaccctccaccgctgaccctgtgtgaagagagatggtgcgttactgccatctaatgggaaaagagaaaactgcagttgggaaaagcagctgtgcatttaagggtagggcttt

SEQ ID NO: 6653 - DNA, 1104 bp, Homo sapiens
cagtggtccccgacccctggcgcctctgcgtgtctgggctgggcttcctcgctcgcctgctccacggccccgacgctcctgggccgagccggccggggccccctcatggcggccaagtggttcaaggagttccccctgaacctgaagaccgtgtcggagcgggccaagcccgggggcggcggcggcaaattgcgcaagaactcggaggcgggcggcgctgggccgggtcctggcaagggccgcaagaactcggcggccgagctggggagcggcagggccggcgtcggccccaaggacagccggctgtcccgcgacagcctgcagggtctgattcaggccgccgcgggcaagggccgcaaaaactcccgggccacggaggaggagccccaccggggtgcaaccaagagctcgggctgcagcacctacatcaacaggctcatcaaggtggacactcaggagaagaacgggaagagcaactaccccagcagcagtagctccagctccagctcctcttcctccgcgtcctcttccccttcctccctggggcccgagctggacaagggcaagattattaagcagcaagagacggtaagaatacagcctcccttggaccacctctcagtcgaaggggagccctgggcgcctgctaagccctaggcttctttagacctaagaggcagtgaggataggtttcctaaggtcctttctccctccaccatttgggaattcctgaccatttaaaattcttagactgttttttaattcttgaaaaactcttattttagaggtggggagttttgcagaaatgtactagccattgaattttgttagcagtttagaagagtcgttgaatgagatattcctgtttggttacatttgacccctttatagatgtggttcattttaattttgatattcaggggaattgcaaagctaggcttgtgtatgacttttatgcttcttgagcataaggaatggtaacctctcaagtgtgtagatatgcatttcaaagcttcaggaaatggtttaaccaacagtcttctccactgatttggaagttccatcattttctgcggttccaccgagtaaagggctcctcggagg

SEQ ID NO: 6654 - DNA, 1247 bp, Homo sapiens
tagcattttaaggggggttgttctatacacctgtgtccttaccccaggctcaggaactgccagggagggaagatgaggtggggagtctgtactgagatggaactgtcagtgctgtgttgtatgtacttgctgttgtaaaagtttgggcatgactttgcatctagcgggtgctgcctgcatctctttgtctgtaagcttgctctgggactcagcctcttaggacctacgatgccagcagctctcattaacagtgaaatgacagaggccaaagatggccaagtgaagacccaagtctcagaaaacccagacttgggacaactgcctgggaactaggatgctagagcagttctgtaatgctttgagacacagcaattttcacattggccattctttcccctcccctaccccttttcttttgagggacttttaatgtttgctgctttaggtggatggagagtccaccagtcccactcaatgctgctctaactctacccacacccacctaattaggggtgctaataaaacatgctgaggttgagataaagacgggacataaggggaaaattcattccatagagctgaaatctggttttcaaggcctctgtggctttcttctgaacttaccaccagccctggctggaatgtagattgtgtttttagtaatgtgtactgtgagctgtcttctgtataatgtattttgtaatgtatttttctcatctaccaaaggatgaaacaaataaaattatttaaatagtttggctctaataaaattatttgaagaaacagtggggttcctgttcacttgacatagagggaaatgcctgcccctgtgagttgcataacaccaactaactctaagagaatcctccatttttcttgccaaacccagcactcccttttatgaccttaagtttagggttctaataaagtacaaagtataaaaaagaaacaaggccatatcatcatgaaacaattttcttctctccacttagaaggcaaggagaaataatgaaactaactcttaggttgttcccctacacttcaaacatgtatctatatcccaggcagggtttgcatggcccagagcccacactggcaggctctaatctcactgcagcagttttagagggcacggcagggcagtggaagggtggctggaaagaagtatcaatcactccaaactcatgaaacatgccaacatttatttgctcattggttaaatattctctacctattctacatggaat

SEQ ID NO: 6655 - DNA, 1139 bp, Homo sapiens
gcagtgcgtgcctctgcatacctgattcatgccttgcatttgtagcgaggagaggagatgtaatgattcaggtttctcctttaggcttggggccctgagaactcccgggtgcaatagtcacctggtgaaacatgagctttgagtcacagggtcaggcccaagtcatttctgctaggaattagggaagagtttctgctgccaagggagttttaggaacagttggagcagggtcagtccaggaaacaagagggctaagtccctgcctcgatctcagctgcagctctgctcgtttccgaagtccttgctgtagcttgagagctgaagatttagactgtggagggaatggggctggaaattgttctaaaaatggaaagcacgttgcgtttataagactgctagatggactgcttcactttaacttttggctcttcgccaaatgggactgggaaggtgatggtcattctctaacctgtgtcggtttttttccttttcttttcactcccaccccacacctcctccaggacacagaagacttagatcactatgaaatgaaagaggaagagccagctgagggcaagaaatctgaagatgatggcattggaaaagaaaacttggccatcctagagaaaattaaaaagaaccagaggcaagattacttaaatgtacgtgccttctagagagaggctggtgaaggggttggtgggaaatggctgggaagtagtaggccatcgcatctcagtatggagagcagactccttttttgtgcctaatcctttcttaaatcctgggcaagctgccagactgcccctaaggtctaacgtgtgtttataaaccacacgaccaaggaatgttcctgtcatccgtccctcacagggtgcagtgtctggctcggtgcaggccactgaccggctgatgaaggagctcagggatatataccgatcacagagtttcaaaggcggtgagtttgccccagagaggggcctgcacaagagtcacccataaagaagggtatggtggcaaggggcccaagaggttctggggtccaggagtgcttatgaacttttcaggccaagaatggagctcctcaagccagtggcttggttgcatgtccatctgtggtgaacctagagctgttgatc

SEQ ID NO: 6656 - DNA, 1193 bp, Homo sapiens
cctcgcgtgcgcctctgtgggggccccttgtcagggacccaggatcactccatccagctttttgctctcgaaggacctgggaggccgaagcccctctcagggctcagttctttctctccaggttacatttgtttctgctgcttgaggttatgcagtgcacccagaatctctaccattgaccccaatagcaagggacaccccgacatatggcgcctagactacccgtttccacgaacccacccacatcccaaggttcatgattttggctctttttggctactcctccacaactttaccttgccacctaggaatgcgtctttcttccccttactcttatttcaaggttttaggcctcggcactgaccctaactgcaaagacctggcctgaaactcactgcacatttcagcgatgcccccttctcagtagtacctctgacttaggaggttgccacctgtgggatccccgcctaggcatccctcatgcagaccctcttgctctctcaacttcaccaagtgatagtttgcaattcattgactcctcttccttctctcctttggattctttttctggtgtaacctctaactctcctctttttgcctcagctggtagcagttctgccactcccctgcctgttccctatggatatgtccatttgccctgggttgttgcttttcctggtaatgatagtgatgtgatgtgcgagggctacccccatttattctaagcagtaacagttgcatttctcccctgtgagcgtcattccatcctaggcatacaccttacatgtctcctgcctggtctaccctcagacatcccttgaacagagaattggcttctgctaatttgggaatgtctggtactgcatgctatagcacttatattggttgatgttacctgctgtgatggtattctctctaccggagcagtagctgaaatgctagcagacagtactttatccaggcaggcagacctaatcggagtagcctggggaaaggcagagttgtgaattctctgctacttgggggcctgaattcaacttactggtgttttctgtccgttttctcaatcaaaccaagttaagatttggtgaggtaaagcctcagtttggattgattggtgccccaccaaaactcatatgtcccatttctcttttcatttcctttcttttttcctgctagaaagttaaaattga

SEQ ID NO: 6657 - DNA, 1680 bp, Homo sapiens
tggtccttgtttccactggctttccatccccatggggcagaaacagtggctcctgggagcagaaaaggaattgaggtgggcaggcagaagagcctggattgctcactgttttgggaaacttacatgttgagatctacagagatccaggaaaccaaagccctgctgagcagagccattttgtggctatttctggaggcccaggagtgtggctgcaagagaaaaggggctggaggaagatccggagggcaggggtgttccctctgctgatgatggatgcccctaacacctgtgcctaacacccctactgaaccccacagctccagccttagtttttggagtcaagtgttaaaggtttctggccagaggaattggggtcttgccatccctgcaatagcccttttatgggctctgggagacagctttagggaataaatggggattttcccctttttctacccactcctttgcttcctccaagacttacccaactccttccccctcagagaaccaaatagcctgaggaagcaggagagttcctggttatggcagtttcttggtgatttggggcttcaagacagtaggtgagagatgctgtcaggacgtatcttcttcataccaaagtcactggtcctttctcagcctctctcgtgcttttctcctaatgaccatatttttgccaaaaattgggatatgttatctgacagaccagaatatttgaagtttgggctgtcctgaaagtctggactttggtggtaccctcctcccccagcccatctgttgcacattatactccgtgtgttcttcaactttcggcgcccttattcccctgccttcctggcttgattgaaggaaagcttgaaaaggcgcagagccctatacctcatttcctccatgataaaaggatccaagtgaggccctgtcacagcctgtgggtaggggatgcggcgggatcctcattgccatggtactcaaaggtagaagagcctggagtttgttgcttctctttgctattctttcatatcctcttgggcctggtgattaattagcaattctcattcctctcagccaaaggcctgcactgggctttatttgtctttttttattttttaagcactgcctgccagagatgggcctggggcctgatgaggaccttagcgctgctcgttctccttttctgttcatgcacacattcctccatggggtggggaaggcaggcatggggtgtggccctcggagaagttaggagtcccccagctcaagatacagtggcaaagacctagtggtcccctacccccacttctctcagttcctggcatgaggagagaagaccctgctctggtggagctgacaacctttgaggctgggaggagagcagcctctgggcatcgttcccagtgtccctcacactaaaacggcgtagatggcaaccccccacccccaccccgctgctcaactcttgtgtttgttgttctgtttgccccatttatctgttgctgtttttgtgttgtcttcccctgctccgcattttgtaaaatggcccctgggggagtgtttttgctggatctgctccctctcgctctctcactccactactttttggaacaaagtgatggcagaatgcggtggtggtgggggtcttttgtactgttggattaataaaatgattttaaaatcccagac

SEQ ID NO: 6658 - DNA, 1242 bp, Homo sapiens
ctacgccaaagtgcagcccttcctcctgaagcctctgccctgcctccctttctgggagggcggggtgggggtgactgaatttgggcctcttgtacagttaactctcccaggtggattttgtggaggtgagaaaaggggcattgagactataaagcagtagacaatccccacataccatctgtagagttggaactgcattcttttaaagttttatatgcatatattttagggctgtagacttactttcctattttcttttccattgcttattcttgagcacaaaatgataatcaattattacatttatacatcacctttttgacttttccaagcccttttacagctcttggcattttcctcgcctaggcctgtgaggtaactgggatcgcaccttttataccagagacctgaggcagatgaaatttatttccatctaggactagaaaaacttgggtctcttaccgcgagactgagaggcagaagtcagcccgaatgcctgtcagtttcatggaggggaaacgcaaaacctgcagttcctgagtaccttctacaggcccggcccagcctaggcccggggtggccacaccacagcaagccggccccccctcttttggccttgtggataagggagagttgaccgttttcatcctggcctccttttgctgtttggatgtttccacgggtctcacttataccaaagggaaaactcttcattaaagtccgtatttcttctacctctgcctcttaacccttctgggaagcctattgtgtacgccgcgggccctcagcggcagacggggaggcgggaggtcgcggccgcccagggaagctgggggtctgcagagtttgggtgcggcagagtggggcgtttcgcgccaccgtccccatggggatgtcgtgtccgcagagggggctggctccgggtgggtcgaggcgggagccgggcctgcccggcgccccagcaccggcccccgggctacctgggcctcccgggtgcgccttcggctcgcgcgcgcccctccgcggcggctccaccgcccgggatggtacggtccggcagccgggccgcgcgctgccgcccctcggtgagctggtgtgggccgccgctagcggagacgaccctttccactcgcgtggtgccgtggtaagcctcgtccctcgcccgccgcctgttttcaggcgtagcgtctcgtccggtccttgctccccctccccgcagcgctcagtggtggtggccgcgac

SEQ ID NO: 6659 - DNA, 1199 bp, Homo sapiens
tgtataaacatagcaaaagaactgatattaacaattctgtacttggcagacagtccagacttctgggtctgcttctaaggccatatgcttaagtctttatttagttataaagatctgagtgggtgatagctggggaggtggtagtggaatacactataggttgtacatagaatggtgtgagcttgtctcttagatttccctcactctttcagaacctcacatcttgctgttccggcgcccactacccaagaaaccaaagaaatgaagctggcaagctacttttcagcctcaagctttacacagctgtccttacttcctaacatctttctgataacattattatgttgccttcttgtttctcactttgatatttaaaagatgttcaatacactgtttgaatgtgctggtaactgctttgcttcttgagtagagccaccaccaccatagcccagccagatgagtgctctgtggacccacagcctaagctgagtgtgaccccagaagccacgatgtgctctgtatccagaacacacttggcagatggaggaagcatctgagtttgagaccatggctgttacagggatcatgtaaacttgctgtttttgttttttcctgccgggtgttgtatgtgtggtgacttgcggatttatgtttcagtgtactggaaactttccattttattcaagaaatctgttcatgttaaaagccttgattaaagaggaagtttttataatctagtgctgtaattgtacgggttttttccccctcactcagggtgagcatcatcaatatcatggttctaattatatgcccttcagtttgataatgaagctcagctctttgctgataatgaggtttaacattgagataactggtttttaatctactttaagcagacttgctgtcaaacatctactgaaatatatttcactctaactactagcctgaggtagaggttatatagggacaacttcatctcatccaaacaaatgaactgcttcctacagtcggggtgctgcctttaacatagtcccaatatttgaatggcacacatggataaaaggatgctgtcagtcaggggctgcttgtgtgtcccaattcctaataggaataataggcatatctatgacctattcactgtgccccttggttggggaaggttttcagctgttcttaacttggcttgggcgttggaatca

SEQ ID NO: 6660 - DNA, 1137 bp, Homo sapiens
gcacagggtgggagggcttccagcggaccctgaaggaagtcgcctacatcctcctctgctgctggtgtatcaaggaactgctggattaatggtagcagggaactgcctcctctccccaccagcaccatggctggcatcgctcaggtgggcagggtagagtaaacaggaggcatagctgcagcttctgtggcagagcttgccttagcttctcattctcttctttagcccccagcccaattgccatcaagactcctgaagccagctgtgcttgaccaaggatgggccataaacaatgagtaaacagtaaagtgtggatcctgctttgagctgtgtcatctagcagacctgcctcatctctgagcctccttcattcccaacccctgcctctggtggacctctggtgggcaggagcttggactgctctggctaggaccccagtaagattgtggcaagacctggcactcctccaagcttggcacagtgagcccaccagctcagatggttgatcttaccataccctcatagtaccaagaatggactgccccctaagaaacctgtttgagaatcactgaattataaatataatccataggccttgaggcccaagattataagtgtctaaaggggaatcagaaaaagtcagcactagaacggtctgggagcaagggtgcagaccagggagggaaggagcttgtcctgaatagaaccaagattgaaagccaggttttctgactcactggttcctgagtggggagggtggaagacagttcaggttcctctcaatctgtgggtaaggaggggacccagcttgagtagggtcttcatctgtgaggccaagggtgtgtggaaacccagaggacccagccctttcccaaatagaagacctggtccaggcagcttcctgcctctgaggatcttggggaaagcactgcgctgaggctagtccccagctcatcaaggaagtaggaccccatgagctacaagagctcccagctcacatacaaagttaccagagaaagacacctgtgtggccacacaggtccctcaggcttatcatgacacagccctatcaggacataaacagctagattgagcagaattggctctttacttcctcttggtagccacagctggtat

SEQ ID NO: 6661 - DNA, 1101 bp, Homo sapiens
tgactgaggccagctgccagtaccacccccggtccttcagccaattctttatgaagcctgaaccgggacccaggcatcctatctcccagtccactgctccttccaaagagatggggaatggggcaggtgacatagatggacctccatgaaagggccagaaaggcagggctcctgctgccacagaggcagagtagaatagtatagtggttaggaacaaggaccgggcccactccctgagtttgaacactgttctgcacttaacttggaaaatcacttcacctgtctgaacctcagtttccttgtctgtgaaacagatgatgatcatacttcagagggttctggaagatgaaatgagtgtaaagtactcagaagggtgactggcatgcagtcatccctcaataagtattggctaaagttggtcctctttccccagacccctgtgggctgagcgctcttaatctcccctctacttgactctgcaggagaagatggggagccccgaggatgacctgattgggattccattcccggaccacagcagtgagctcctgagctgcctcaatgagcagcgccagctgggccacctatgtgacctcaccatccggacgcagggccttgaataccgcacccacagggctgtgctagctgcctgtagccactacttcaagaagcttttcactgagggcggtggcggagctgtcatgggggccgggggtagcgggacggccactgggggagcaggggccggtgtgtgtgagctggactttgtagggccagaggcactaggcgccctccttgaatttgcctatacagccacactgaccaccagcagcgccaacatgccagctgtgctccaggctgcccgcctgctggagatcccgtgtgtcatcgctgcttgcatggagattctgcagggcagtgggctagaagctcccagcccggacgaggatgactgtgagcgagcccgccagtatctggaggcctttgccacagccacggcctctggagttcccaatggtgaagacagtcctccacaggtgcccctcccaccacctccgccaccgccacctcggcctgttgcccgccgcagccgcaagcccc

SEQ ID NO: 6662 - DNA, 1715 bp, Homo sapiens
ggggtggcctgattggctcgcctgcccctgggggcagtagaggggccccgcccagctaggggagccgctccgttccactcccctccctagccctccctccccacggccctgggcagggaatgtcttgttcccgccgctccctccccggggccagagggcagggcgggccgggcggcgtcctaccctcttctcctcctccccatctcctccccgcccaggtgcgagccggagccgccgccaccgctgccgcccctgactcacgccgcccccgggctggcgcagcgaagggtgtgggacagggtaaggggttggaagagccttgtggagagcgggcgagccggcgccatctggcggccatgctctgagtgggcgagcgccccccgcggccactggagcgagctgtcttcacgctcctcatccaccccagctggtgagcggcgcccccttgccaaggcagtgggcacagaacttctcgcttggccgcaggggaaggggctgcggacctgtgggaaagtgatccccttcccagatccttgccagccgggcttcctgtcaggcaggggagaataatccccactctgctcttaggattgaatccacccccattctgtacatagcctcttctgttggtcttgttgaaatctagtttcagatttttaactacccaattctgctgggggtgggggacacccccccttcctcgctgggtgctggaccccttttgcagcctgggctctgccttgcactatttccccttcctggcctgacggctcctccccctccttaaaaggggcaggttcaggggcccggtgctcttcctcccttccatgcacccccatgcccatttgcacagctgcccaggtacccctaacagtggggaggggtcacagggagggggtagcgggaccagtccctgttatctatttaaaaagtgatgatgtaatatattggggtggcggggagatcgggttgtcctgggcctcatcttagcatttcaggtgatggggggagcccagggctggggagacctggggcccagccccagaaagtggggacaatgtggcctcccttctccctactttcggctttcccagtcagtgccttagggggagaggcactccccccctcctattcccttccccccaccccaactcccccacctcgggtgtaagcgacaggaagaaataataataatttaagattcacacttgtgtccacttttggtttatttggggggtgggtgggaaggatcaggaagagagggaggtgagagagggactgagggttctgaagctggagtgggggctcctttagtggcggaggatgtctcaggtggtctgtggggctcagggctggtgagaatgctgacaggctgatgggcttcaggtaagggctgctgcccgtgcttcctctgctgaggccccttctcctcatccaggtcactagtgaggagaggaagggggtggccggatcacccaccttctgtcttcacaggtgcatccctgccccctgccctgccccatctgttcagatccagctcctgttctttctgagcaactcctgctctctcaggcccacgaggcgtaccagcccatggctgtagatattttctgattttaggctgatgctggggggtgggcagtgacttgcctgaggccacatggctaggaagggcagaatcactagtgacctcagtagtcacacctgctcaaggc

SEQ ID NO: 6663 - DNA, 1109 bp, Homo sapiens
agtgtaggttgaaggctgaatggggagggcgagagatggggagtgggtctcaaatatagagggggtagcaaggtggaaggggcccttccaccttttgtgggcactcaagttcggacctctgggatcggcgattcccctctggccagggctggttttaatgctctccgtgggcgggcttcggttgagtttggtccgcttttcctttctgctcctcaggggagcattgcttccttctctcgcagtgaccatgacgaaattagcgcagtggctttggggactagcgatcctgggctccacctgggtggccctgaccacgggagccttgggcctggagctgcccttgtcctgccaggaagtcctgtggccactgcccgcctacttgctggtgtccgccggctgctatgccctgggcactgtgggctatcgtgtggccacttttcatgactgcgaggacgccgcacgcgagctgcagagccagatacaggaggcccgagccgacttagcccgcagggggctgcgcttctgacagcctaaccccattcctgtgcggacagcccttcctcccatttcccattaaagagccagtttattttctaacttcgtttagtttgagtatggaaaacgggtattggggattctatgtactaacggtcgagaagtgaatgtgaaagaaccaccttcttgaggccatctcagcctttatctttgcatcttgctggtgttcccatttttgctcccaaggaggcaaagaccccttctcaatatttctcaggatggaaatgacatttcactttcctggtcctttcaaccctgtaggaagtacttctttttttttttttttgagacggagccttgctctgtcgtccaggctggagtgcagtggcgtgatctcggctcactgcaagctccgcctcccgggttcacgccattctcctgcctcagcctcctgagtagctgggactacaggcgcctgccaccacgcctggctaattttttgtatttttagtagagtcggggtttcaccgtgttggccaggatggtctgatctcctgacctcgtaatccgcccgcctcggcctcccaaagtgctgggattacaggtgtgagtca

SEQ ID NO: 6664 - DNA, 1182 bp, Homo sapiens
ctcgacgcattatttcctccctgtcgcaagagggcgctgcgtccaggcactgagaggaagaaagaggagaacgcgaggagtagcaagtccgcggtaagcgctgacgcatgcgcatagctaaccgcacccggttcagctcgcctttcttggccagaggcgccggttggactcacgggcggggcatgatgggtaacaggaccggtggggtccccaggaagtcctagagggggtcggggtttgggtggacaagctttcctcgtcctctcccgacagagctgacgtgtcctgggttccaccgggagcgggcatttccaccggacgggagggttcggggtgtccggggctggggaatacgtaggggttgccgcgcggtgtggggagttggggcgtgtggctgcagtcccgggagttcttggagggggtcggcccaccgagcttccggaccggctgatctgcccgtagcttgccggagggagggcggagcctgactctccgtcccttctcccatcccctccagtggtgggtacgggcacctcgctggcgctctcctccctcctgtccctgctgctctttgctgggatgcagatgtacagccgtcagctggcctccaccgagtggctcaccatccagggcggcctgcttggttcgggtctcttcgtgttctcgctcactgtatcctccctgcagttggagggggcgggccacgtaggcatgtgcccttccccttccccacacagctctgtccccgttgcacaccctactccttaactccctcaaccaggccttcaataatctggagaatcttgtctttggcaaaggattccaagcaaagatcttccctgagagtaagtgaatattggagcttgagtatttgaactttctcctctttaacctcctgaaacatgatattgaatttccagatgcttaggtgaaaggttgttaaggagaaatatatttactgaagctgtctgaagacagatgacgcttttcgattctgcaccttgtatagctcctggagttggagctggaagagaaggcctttgaaagcaagaaactttggtaccttctggccagctcccagggaaggtttgaggggaacaggcaaatttgggctgatgttttgcatctattcgctgggaggcggtccttgttcccaccagaagaagcagcaggaccaagttc

SEQ ID NO: 6665 - DNA, 1135 bp, Homo sapiens
gcagtgatatcggctcactgcgacctccacctccagggttcaagcgattttcctgcctcagcctcccgagtagctgggattacaggcgcgtgctaccaagctcagctaatttttgtgtttttagtagagacagggtttcatcgtgttggccaggctggtctcgaactcctgacctcaggtgatctgcccgccttggcctcccaaagtactgggaatacaggcatgagccactgtgcccaggccatagtatattctaaattccttctatgatttagccttaattctctattgctattcagcaggaatttattcttacagtcatccctccattcctactgccagaccttcacctcacctggctgactgccaggggtctgattgtatggagagcaggctccagagactcccaggcagaagcgaagggaaggacaaggagtacctttaaatcctttatttggtacctgttcttctgattagcgatggggatgggcatcaggacaccaaggacaactgcccacagctgccaaatagctcccagctggactctgataacgatggacttggagatgagtgtgatggggatgatgacaatgatggcatcccagattatgtgcctcctggtcccgataactgccgcctggtacccaatcccaatcagaaggactcagatggtaagcctgcggacccagagcacgttagactggtgttgcctttgcccaggtggaggcagcaagccctgttgggaagtgaggaagggcaaggtggggaaagatgtcaggaatgcaggcccaacagatggtattgttgcctaatggcagtggccagggccttcctgagcacccagcctcactctgcccaggcaatggcgttggtgatgtgtgtgaggatgactttgacaatgatgctgtggtcgaccccctggatgtgtgtcctgaaagtgcagaggtaacgcttacggattttcgggcctatcagaccgtcgtcctggatcctgagggtgatgctcagattgacccaaactgggttgtgctcaaccaggtaactcggggcagtgggctgggcaggtgctatcagacagggctactgggacggggggcctgggagggatagcacacctgcatcacagctttttctt

SEQ ID NO: 6666 - DNA, 1174 bp, Homo sapiens
gtcctgtctggtacccccctcactggcctctgagtgcagtggaggtacagcaaggaacttttcctgccaaggcccccttgcctgggcccagccagtagcctgttgctgttggcgaaaagcctgggccttggagcctcctggccgtgaaggtccagcgcccaatgcagggaaggaaggaaggctccgccgcaaactaggagcagctcccagaatttccatggaaagctggaacaacgcccgctgacggcaactttctaacagtaacttccccgacccagacaccacaaagctagcacaacggagctcagatgcaggctaggactcggtccatgcctcaggaaccagagaaagccatcctcacactccctggatccagggaacccacgcccagggccccccagcttgttccctcagtgcccagctcttggctatttctttcacttcattccatcgctcagacaccattaccacatacacattccacccatacccccaggtctcagcctgccctaccttcccaggctccagtccctgttcctcagcatccccctccacatcctgagtaagctttgtccccagataacctcttcagcatgatccttaaatctccctaagcctcagtttctcccctgtggaatgggggtaagaatctctttctctgaatgcccctgtgttaggaaataatttagaatactttggaaactggaaaagctctgttcacacctaagcaatcagggcagtggcctcggctctgccaggaactttggcttttatctggatcctctctttccaggcctctcaattaattccccaggtcctcaacctttgggaagttagaaatgaggaagagtgtcctacttctgacactgttccctcttggaacctgaccgtcaatgctagaagaacccttggaaaacatgctggcccagccctctagttttacaaataagggagtgcacagccctgagaggttacatggcctgcccgagatcacatagtcaatggcagagtaaagagcatagcctaggcctccccactcctctagtaatgctctttcatcttctccaacctggctctaagccttgtccatcctgagccccatatctagcccaacctagtccctgaaaacaggaagtggcccttagaaatctctctccagtcccaccatcagagg

SEQ ID NO: 6667 - DNA, 1148 bp, Homo sapiens
tgagagagcagggtcagacactcccgagcctctcggtacagctgtaggggcgacacaggtaggcttgcagctgcgggaacagtgccacctccgcacctaagcactcccattcctggccagcatccttggggctcatctcatacaatagcccccggtctcagagctacctccttctccagctcttcctcgtcctcaggcctgtgctccccagtcagcagctgtagccgttccatgtactgccgctgcatgcggccaggcaggaagaagttgaggggaaagggcatagcctctgcataccacttccgggtcacttctacgtagttcttggtgtctatccaaaaagtatgtacctggattgggtgggcaggaagaaacaggcaggtctgagccagtgcacctgtctgattcaaggtgggcttctgacctccatgctctcctgagtctctgtgtgggtctgtgtgttcccgtcccctccccggctggccatggatgctgggaggtctgggcacactcaccagcaccgggatcaacttctcctccaggagagacatgaaggccagggtgtctgccccttgctgagctgacagatcataatcagcattgtacttctgtggaggaaatatccatggcgtggacgctggggagctgcaagggcacttcaccagggaggaaggagtcctgtctggtacccccctcactggcctctgagtgcagtggaggtacagcaaggaacttttcctgccaaggcccccttgcctgggcccagccagtagcctgttgctgttggcaaaaagcctgggccttggagcccgctggccgtcaaggtcctgggcccattgagaagaaggaagaaaggttgggccgcaaactaggagcagctcccagaatttccatggaaagctggaacaatgcctgctgacagcaactttctaacagtaactttcccgacccagacaccacaaagctagcacaacggagctcagatgcaggctaggactcggtccatgcctcaggaaccagggaaagccatcctcacactccctggatccagggaacccacgcccagggccccccagcttgttccctcagtgcccagctcttggctatttctttcacttcattccatcgcccagacaccattaccacat

SEQ ID NO: 6668 - DNA, 1202 bp, Homo sapiens
tgctacgtgcccggtcagccgagaaacggcgccctgtgcccaccttccaaaaagttcccctgccctcgggccctgcacctgcccactccctgggggacctaaagggcagctggccaggtcggggcctggtcactcgtttcctccagatatccaggaaagccccagaccccagtgggactggagctcatggacataagcaggtaggaattcggggagccaggaaagatgtttgggaaagcgtggagcttcagattgagccttattgatgatgccctttcttgtgtccctgtccaggtgccccggagcctgtggggccggcctggccgagagagcctccaccttcgcagctgcggagatctgagctctagctcttccctgcggcgtctcctgtctggccgcaggctggagcgtggtacccgcccccacagcctcagcctcaacgggggcagccgggagactgggctctgacctaggcttcttgtcacactgaacacatccagccacaggcaccagctggttgggaccagcagcccccagcatcctcttgcactggctggcacaaaaagaaacctgctgtataccccccaaagtgtccctttccctcctacctctggggtctcttgctgcttgcctctgctgctctggactgggagagcttctgtcctgtgctgcatgggtatttagactgtgggggagatgccccttcttatagcactggaggaggaaaacaaattcttgtccccctcagaatgagagtggctctttctgatttgcaagggcactatggtcagggcaaaggcatggcccaggtgtttaagtacagggtgacgtgtgcctatgcaatggggtggtaaggcaggcacgaagagtccaaaaaatctaggtggcctctcagctctgccacctctagctgcatgaccttgggcaagctatgtaaccccaattgcctgctccattaaagactgtgaaggtagaatgtttgtaaagctcttaacagtatgtaagccttcaataaatttcagttttccccttgttttcttgatcattctctgtcaccagtgaaatttgttctagtgtctctcatatttaagaaaactctttcaggactgggtatggtggctcacacctataatcctagcactttgggaggccgaagcaagaggatcgcctgagcctaggaattcaagaccagcctgggcaac

SEQ ID NO: 6669 - DNA, 1117 bp, Homo sapiens
ccctcttccaggtaagtgatgggatgtcttacttgactgcctggcattcttctacctggttcctttgttttctgctgaggacctgcctactcagttctccacattgcctgccttcctggcagctgatccttagcatgcccttttcagtcccatgctcagttctgtttttgtttcccagacccatgacaacagagagcatctagccatgatggaaaggatcttgggtcctatcccttcccggatgatccgaaagacaaggtgaaccttgagggggcactagttaactcttttccttttctctccacagaattggtctatttcacatcattttcttttttctttgatacctcctctccccccagttactttcagatggggaaataagggaattgtaacaagggtgaccttctgattcctcaacctccccttcccctctagaaagcagaaatatttttaccggggtcgcctggattgggatgagaacacatcagctgggcgctatgttcgtgagaactgcaaaccgctgcgggtgagctgggctcgggataaatagtgcccaccgtccagaagtcacttccttcttagggtggtttgccccctggaatgctcttcacaagcagagggttaggaaaggaggggaggaaagctgaaagaagacatctttggtcaacagaggaaacataagagggagtggttttgtggagggaaggaggttagacagcctaaccttgagacaaccagagatcaaagcaatgtcctggattctttaggtcagacagaaaagaataaactacctttgaagagcttacattttaatgaggaactaaagaagattcatgaagttgacaaggatatacaagtagaaagaactttcaaagattatggagtaattgtgctagtgggaaggtaggttgagctataatatcagaaacgttggtcctggtgtggtcgtggttaggtagccttcaaattggttgcaagcagagccttggttctccaagaatgaaaggtagggtcttgaagaaggcagggtttgtaaggcatcctgcctcacctttttcctgccctcctccaccagcggtatctgacctcagaggcagaggaacaccaccagctc

SEQ ID NO: 6670 - DNA, 1152 bp, Homo sapiens
ccttttctcagtggtgttgtttatctgggtggtttgagttgctgttgagaattgacctctgttgtccactcccagctctcacggcccctgggttaaaggtggtgggaatcacgcaggggttttcttcccctgtgaccatctgtatctgttccccttccttcatctccaccccaggttgctgtccccttttttcttccaactcagctcattccccaccttctctccctccctctccccgaccctgctctctttcatttcagatgaaatcgttagcaccttaggagaggggaccttcggccgagttgtacaatgtgttgaccatcgcaggtaactgtcagtccctccctactatgtggggctaaagagatggttggggttatatggggcttttttgctaattaacctgaggtagaatttcttagtccccctacagccctgttcattttgagacattcttgagaacccagcaaaagcctctcctgccaacttacaggggtggggctcgagttgccctgaagatcattaagaatgtggagaagtacaaggaagcagctcgacttgagatcaacgtgctagagaaaatcaatgagaaagaccctgacaacaagaagtaagcaagcaaggaagtatgtagggaggctgagagccccaacccctacacgggagagacttctagacctggtttaggcagacaggggagtcctagaccttctcatccattcatcttttgttcatcatcttagagtagtagaacatcagggtaggaaagggggggggcccatgacattccttaatccactccccttgttttcagggaagttagattgctctgtcgtttgaccccagcctagaatggcttctgtagagatataccctggacatagccctaggactgagcatcaacctcatcgaacaatgaattaagcttttataagtagaactatgctgataaggccacagacatttatgcagtaatattttgttcacatacattcacagtccaaaaatagaataaggactttaagccaagatatgaggccagtaggtataaataggagcccagtggtagctagtggtgaatgaatatcaggagttgggctggggttgggatttaggatggacagtttgatgattcaggatctatactgtttg

SEQ ID NO: 6671 - DNA, 1099 bp, Homo sapiens
tcttcccggcgtcagtaccaggagaaggtcagcagggacaggagagggaggtgtggcatggaggggtgttggagactgggtagcctgacttgaggcccattctgatgtgtgcccctgttgcgtctctgtttcctttcctgccctgtgtccatttgttccctgcccctgcatgtaccttttccttgtttgaacctatgcctgtgcttggcccctctgctgtccacgcctgggttttcctatgactgtgctctgtgtcttcccggtatccatcattatccgtattcctctgtggccctgtgtatccatgtctggttccacgtttcacccctttgagtttgacctgtgtctctgaccttccgcacacacaccccactgtgccggccccaaatctctccctctgtcctcttgcccctggcaatgggctggccctccagtacaagcaggtggagcagtacatgtccttccacaagctgccagcagacacgcggcagcgcatccacgagtactatgagcaccgctaccagggcaagatgttcgatgaggaaagcatcctgggcgagctgagcgagccgcttcgcgaggtggggctgggttgggcctggaaggggggctcttcagggacctggagtgctgtctggtggtaggggctattggtcagcaggtgctcctatagggaatgaggcctgcagagggccccgtgggaggccaggtatttgggctttcaggggctagggtctttcttgaaggccctttgagggtgaaggatacatgaggagggactatagggatctctgtttttgggggatggtcctgcaagggctcatgggaaagatctgaaggcaggagcttagggatggtcccaggcccactgatgcctccccatcctttggcagaacatgaccccaggggtggggtttctggaagcggatgagctcggtgggatcatctcaggtcaggggcacagcctgcctgacaggcccctcccctgtccaggagatcattaacttcacctgtcggggcctggtggcccacatgccgctgtttgcccatgccgaccccagcttcgtcactgcagttctcaccaagctgcgctttgagg

SEQ ID NO: 6672 - DNA, 1177 bp, Homo sapiens
catgccacacaaggtgagagctgttggtccttaggagtccttgtcagatttttgtttcatgtccttttccccctaatttctcgggcattctaatgatgttgttccctccccaccccttaaaaaggataaaaagaagggctttgaatatcttgatccagctgatggcctgataacataaaaattcttaagtttcttgggctaggcatggtggctgacgcctgtaatcccagcactttgggaggctgaggtgggcagatcacctgaggccaggaattcgagaccagcctgaccaacatggtgaaccccatctctactaaaaacataaaattagccaggcatggtggcacatgcctgcaatcccagctacttgggaggatgaggcagaagaattgtttgaacctgggaggtggaggttgcagtgagccgagatcacaccattgcactccagtctgggcaacaagagcaaaactctgtctcaaaaagaaaaagaattcttagtttgttattcatgctgccacagactaatggtggttttggctttgttatggcagccagctcaccccagggacacctccaccctctgcccttcatgcatgtaccactggggaagaaatcttggctcagtatttacaacagcagcagcctggagtcatgaggtcagtgtaacggttgctcctgcccttcttgccaaccgcaaccctcccttgacttcttacgcacttaatggctgttctctgcccccacagttcttcccatctgctgctgactccctgcagggtggctcctccttacccccacctcttctcaagctgcagtccaccgggtatggttctggatggttcccccaagggagcaggtatgtaggaggtgaagaaaactgagatttcaagtatgggagaggttttactatctccattcctggattaaaagtgctgaaaaagtccacagttaaacattcctttattcaccctatggctcccaagaaaagcattcttcctctggagtactggtgtactaaggggacaatacaccaaatttgttgagtttacaatcaagtctactaaggttggacttccttatcagtttggcgagtcccagggcagaataatcatccatctacaggtctctgtttcctctccctccacagcagtggagagcatcccagtgtttggggcac

SEQ ID NO: 6673 - DNA, 1692 bp, Homo sapiens
agttgtgtgactttgggcaaaacatttagcctcttgagtttccttatctataatgacatagctctcccaaccttgctgtgaggaataaacaagagatttttcaaatcagtatattgtgcttcataaatgttaacattgttacaaagcatcagtgaggctgggcgcagtggttcattcctgtaatcccaacactttgggaggccgaggtgggtggatcacctgaggtcaggaatttgagaccagcctggccaacatggtgaaaccccatctctactaaaaatataaaaactagtcaggtgtggtggtgggcacctgtaatcccagctactctgaaggctgaggcaggagaattgcttgaacccaggagacggaggttgcagtaagctgacacagtgccactgcactccagtctcagcaacagagagagactccgtctcaaaaacaaaaaaaaaagaccagtgaatacagccctcctcctttcttaggtttcccaccgttttcgagaactcatgcagctcttccacactgcctgtgaagccagctctgaggatgaggatgatgcaaccagtaccagcaatgcagaccagctgtctgaccatggggaccttctgtctgaagaggagctggatgaatgagactctgggaatcatctacacaggaccaaacccaacaggcgccctggcaccggggagggggtagttgtactctgcttgtacagtccttgagcccagtttacagatctggagagcaggaggccaggacaaggacaaaggctggaggatggagtaggacccaggggctctgccatcctaggcatcattcaaggtcttttatgaagactttacagatgtcctctgtaaatagcatcgagagtggagttcagctcctttctctacttttttttggtctgatggcacatatttattgttctgtggtctaatcacagtgtttctaaatgtaaaaagtgcatatgttggtgtagctagtcccgcgacattgagctcctctgcatgaagacactgggctcctgcatccagctgtttttattgcaaactagctcctttctcccacactgggaactttagtccacgaggctgtcaccaccctggtagcactgggccaggctttgtagctcctgcagcagctctgctacgtcatcgtgctccactccagcatccatgaagctggcccagcgccgcaagtcgagtttggtgaggtctctggccaaggcttccagggtctggtgcagggacgaagaggaacacagtgccccaaacactgggatgctctccactgctgtggagggagaggaaacagagacctgtagatggatgattattctgccctgggactcgccaaactgataaggaagtccaaccttagtagacttgattgtaaactcaacaaatttggtgtattgtccccttagtacaccagtactccagaggaagaatgcttttcttgggagccatagggtgaataaaggaatgtttaactgtggactttttcagcacttttaatccaggaatggagatagtaaaacctctcccatacttgaaatctcagttttcttcacctcctacatacctgctcccttgggggaaccatccagaaccatacccggtggactgcagcttgagaagaggtgggggtaaggaggagccaccctgcagggagtcagcagcagatggg

SEQ ID NO: 6674 - DNA, 1165 bp, Homo sapiens
tccatacctttttgcctctggaggctcatgggcttcctggaggagatgaaaaaggcaaggacttttcaggctcacccaaagcataaagcactgggatagggagggattgctacctgaaaccggagcctgtctgatcttcacaggctcaggaatgccatggatgtgctggaagggatgttcagcgaaggaggttctgggacctgggaggggccttacctccttgctctgcttggaatagtgccctagctggagatcagtagggtggagtggagagtggaatcattaggaatcaaatccagtattagtacccttcccctataggcagctaaggaggaagagaaagttttagtattctttgttaccaggcagagtctctgtgtgtttcccagttgactgggaaagcagaacatggaagtatgtgggattgattgggaagggcagcctagagaggctctggagacttcctctttccctctgtgactctcctcagctcaagacacagatgtggcagctcctcaagggccacgaccacctgcaggatgagttttctatcttctttgaccacttgcgcccagcagctagccggatgggtgactttgaagagatcaattggactgaggaaaaggagtatgaggtataggacctaaggctgctgtagccttatgaagggggaaggccacacgtgggagggatattggcctggtgtctgtgctcagcagcaccaactccttctcagtttgatggctttgaagaagtggccctgcctgatgtggaagaagaggaggagcctcccaagatacccacagcctcaaagaacaagaggaaaaaagagatcggggtccaaaatcatgataaggtattttctttgtttatttgtttgtttttgagacagaatctcgctctgtcacccaaactagagtgcagtggcgtaatcttggctcactgcaacctccacctcccagattcaagcgattctcccacctcagcctctcaagtagctggaattacagacaggcgccagccaccacgcccagcaaatttttgtatttttagtagagatggattttcactatgttggccaggctggtctcgaactccttacctcaagtgatccacccgcctcggcctcccaaagtgctgggattacaagtgtgagccactacgc

SEQ ID NO: 6675 - DNA, 1955 bp, Homo sapiens
taggaaatatgactggaaccactgagatcaactcagatcgaagcctagaaaaagacaatttggagttggggagtgaatctcggtacccactgctattgcctaagggtgtagtcctgaaactgaagccagttgccacccgtttccccaggaaggcttggagacagaagcgttcatcagtcctgaagcccctccttatccaacccagcccctctctccagcccagcttcaaccctgggaaaacaccagcccgatcaactcattcagaagcccctccgagcaaaatggtgctccggattcctcacccaatacagccagccactgttttacagacagttccaggtgtccctccactgggggtcagtggaggtgagagttttgagtctcctgcagcactgcctgctgtgccccctgaggccaggacaagcttccctctgtctgagtcccagactttgctctcttctgcccctgtgcccaaggtaatgctgccctcccttgccccttctaagtttcgaaagccatatgtgagacggagaccctcaaagagaagaggagtcaaggcctctccctgtatgaaacctgcccctgttatccaccaccctgcatctgttatcttcactgttcctgctaccactgtgaagattgtgagccttggcggtggctgtaacatgatccagcctgtcaatgcggctgtggcccagagtccccagactattcccatcactaccctcttggttaaccctacttccttcccctgtccattgaaccagtcccttgtggcctcctctgtctcacccttaattgtttctggcaattctgtgaatcttcctataccatccacccctgaagataaggcccacgtgaatgtggacattgcttgtgctgtggctgatggggaaaatgcctttcagggcctagaacccaaattagagccccaggaactatctcctctctctgctactgttttcccgaaagtggaacatagcccagggcctccactagcagatgcagagtgccaagaaggattgtcagagaatagtgcctgtcgctggaccgttgtgaaaacagaggaggggaggcaagctctggagccgctccctcagggcatccaggagtctctaaacaaccctacccctggggatttagaggaaattgtcaagatggaacctgaagaagctagagaggaaatcagtggatcccctgagcgtgatatttgtgatgacatcaaagtggaacatgctgtggaattggacactggtgccccaagcgaggagttgagcagtgctggagaagtaacgaaacagacagtcttacagaaggaagaggagaggagtcagccaactaaaaccccttcatcttctcaagagccccctgatgaaggaacctcagggacagatgtgaacaaaggatcatcaaagaatgctttgtcctcaatggatcctgaagtgaggcttagtagccccccagggaagccagaagattcatccagtgttgatggtcagtcagtggggactccagttgggccagaaactggaggagagaagaatgggccagaagaagaggaagaagaggactttgatgacctcacccaagatgaggaagatgaaatgtcatcagcttctgaggaatctgtgctttctgtcccagaactccaggtgagagctggagaatattctcaagtatttcgtggactcagtaatatgtatcacttattgatatgccacctgcttgcttgctgcactatggatagtcctaaaatcatttgtatttgatttgtgaatgcattatgggacatgattgtggagttgaggtgaaatgagatggaaaggatgaaattttacttattatattaaactcgtttacacattaaattgaatcacctgaccatactttaaatgccttaaaaaatagtaataggctgggcttggtggctcactcctgtagtcccagcactttgg

SEQ ID NO: 6676 - DNA, 1153 bp, Homo sapiens
agaggctgaggcaggaggatcgcttgaggccaggagtttaagattagcccaggcaacatagtgagaactggtctctacaaataatggaagaaaaaaattagcccggcatggtggtgaacgtctgtggtcacagatacttgggaggatgaagtacgggaatcgcttgagcccaggcattcaaggctgcagtgcgctgtaatcatgccacccgctctccaacccgggcaacagagcaagaccctgtctgaaaaaaaatgaaaaggtagattgggccacacaccatggctcatgcctgtaatcccagcactttgggaggctgagactggagaattgcttcagcctaggaagtagaggttgcagtgagctgcgatggtgccactgcactccagcctgggtgacagcgtgagaccttgtctcaagaaaaaaatgaaagagtagattgtaaaatgtgttagtctggggagaccctttagaaggaaggactgtgaagtgagatttagtgttattctcctttctcagtttgttagctttaggactgaagcattttgaaggaactgagtttcctaatcctctaatcagcaagtaccttctaacctgcaaaactgcccaccaactgacagtgagaatcaagaacctcaacatgaacagagctcctgacaacatcattaaagtgagtgtttcctgcatgcgccatccgggcacctcaccaatatgtacccattcttttatcttgttattctcaaagaaaagaggaaccttcttttatctaaagctaatttctcccactttacactagattaattcccctattgccttttgggcaatattccgctggcagtattccacttatttgctttttgttgttgttgttgttagacagactcttgctctgtcactcaggcttgagtagagtggcgcaatcttggctcactgcagtctttacctcccaggttcaagcgattctcctgcctcggtgtctcctgcctcagcgtcccaagtagcttggattacaggcatgcaccaccacacctggctaatttttgtattttcagtagagatgaggtttcaccatgttggccaggctggtcttgaacctctgacctcaagtgatccacccgccttggcctcccaaggtgctgggattacaggcatg

SEQ ID NO: 6677 - DNA, 1092 bp, Homo sapiens
gaatctgggagaacttaagtaagaatcaaataaaagtaaaatttggaataccagatttgtgagggagattaaagaagttggaatcttattctggaagaaagaaagcattgttgaaggtctcttatccttcaagtatttaaggggggaaggaggtaaaacatttttgagcatacgctattgttagcaccttattttactaggtgctttttaagtgtttgttttacttagtgaataaagtgttccacataagaaagaatgagtcaacttttattgccattgaatgggactccctttagatataatgttagcttaagaaagactggaaacttttggggggatggtgggcagatgggagggaatcaagttaggtaaggatagctcctacctaaatgcaaaaatgcattcacaggcttttatgaagccctcttttgtcctagaagttgatttatccgagatttattttcttatagcgaatgaatttccctgtttgccaaagcaagtggcttggattctggccacaagcaaggttttcatgtatccagagttacttccagtgtgttccctgaaggcaaagaatccccaggataagatcgtcttcaccaaggctgaggacaagtaagtgtttactctgggggatcaaaacagcagaacatcccaaggagaagatgtagttcctttgaggagtttaggggaagtaagacttgtataataagacacggacacaaaagacaaaaggaaaagcaatatagatgagcagagccctctaggacgtgcttgttctagcagtgccaaatactgctttttgggagatgtcacacacatttttaaagcattttagaccggacatggtggctcacacctgtaatcccagcactttgaaaggccaaggcaggaggttcgcttttattttattttatgttatttatttatttatttagaggcagaatcttactgtgtcacccaggcagtcacagctcactgcagccttgaactcctgacatcaagcgatccttgcacctcagcctccacggagcagctgagaccacaggcgtgtgccaccatacatggctaaatttttttttttttttttgt

SEQ ID NO: 6678 - DNA, 1198 bp, Homo sapiens
gagattacaggcatgagccaccgctcccggcctcaataaatgtttttgaataaatgaatgaaggatagccagtcatggtggctcacacctgtaatcccaccattttgggaggccgagttgggctgatcacttgagctcaggagttcgagaccagcctggtgaaccctcatctctacaaaatatacaaaaattagccaggcatggtggcatgcgtctgtggtcccagctacttggggagctgaggtgggaggagcgattggaccagggaggggatgcggaggttgcagtgagctgagatcgtgccactgcgctccagcctgagtgacatagtgagacccatctcaaaaaaagaaggatagatatgaagaatttgtcatgccttgttgaaaacattatacattgtcttcatggaattcctccttattgtaaaatctaatttataccaacaatatactgtctggctttcttgcagaaaaggaagtaaatgagctgatggaagagctgtttgaaactgtgagtaatgatcctcgagtgagaacacgggattttaagtcagttctccagcaagatgtgtcatttggtctctgtgatgctccctctaggagagggggtctgactgaaccaattctccttttagtctacctgggaaagaatataatgacaagggaattttgctaactactagactcttgattatatacatgtatgttgttcttattaacattttccttgaaacttctttttgtttgagggggttcttgctccatcacccaagccagagtgcagtggtgaaattacagctcacagcagccttgaccttctaggctcaagcagtccttcgtctaagcctcctgagtagctgggacataccaacacacccagctaattattttatttgtagagacagggtcttaccacattgctcaggttgttctggaacttctgggctcaagcaattttcctgccttgggcctcccagtgctggaattataggtgtgagccagcatgcctggcccctggaaaacttttgatgacttcccctactgtcatttggtgtgtccttaaagattgtcaactagttttaaactactttgtgtacaaataattacctttttcataaatttgtttcaaaagatttttcattttaagagattgatcattttgaggctgggtgcagtggctcacgcttgtaatccca

SEQ ID NO: 6679 - DNA, 1116 bp, Homo sapiens
tccgcccgcctccgtctcccaaggtgccgggattacaggcgtgagccaccgcgcctggcccccaaattagctgttaatctaaaccactgaatcttaacctcagttttgagtaggataactccatgggcagagaaagctaagtagtgcctttaaatttttttgccaataactgacgcactaacgttgtggcttcactctgccctaaaatgggatggcgcatagtgttaggcgcatgctccttgatgcactgcggcgcggcgctccgaggctcggggacgcgcacgcaattcgctgttgttggctgacttccggtggtgccaaagccgtttccgtggaatcaggccggctggtgagggtacaggtttgtgtgtggtggggtgggaagaggcaggtgggagctgggacacctggacgaacgatgtccaggttgagaaggtcgggtctgagggtgggcgctgggtgcgtggcggaagttaagggcgtgaagtccagtgtctagttgggaatggggactggagccagccctgggcaccgaggtggaagcgcggttaggaccccttttgaaaatgttttcctaggagagggccgtgccggggctgcctccacattggcattcattcaccctgctggtccgacttgggttcccaaaaaagtggattctgtcgagctactgctgtgtttgaggtgcctggagctgaagtagctgtctttctttccttctttttctttctttctttttctttttttcccctttttttgatctcagtaattatctgtgaaataaaagagctgccctggctactcccattctatttcttataaggtcaccaccatctctcacaggaatcaacgaaatcttcatgttttattgagctttagttactgagttttaattacatcagttgattgaggggatggagaatctcccctaatgtcttggagaaacagaagggaggtttaaaactaactgtaggtcgggcgcggtggctcacgcctctaatcctagcactttgggaggctggggcgggaggatcgcttgaggccaggagtttgagaccagcctgggtaacaaatcgagaccccgtctctacaaaaaaaaaaaaagaaaaaaagtcg

SEQ ID NO: 6680 - DNA, 1620 bp, Homo sapiens
tgtaaatactgtatcataagtagaagaaaataatttttgttttctaaaaatgcattttgagatagtttaatgtaaatctgacaggagcattctgaagccccattaggaaaaaatttaaatggttcctcttcatcgccttaatgtctaaagatcagaaatcgctgagcaaacccgcttttgtttccttcccagaaacaatgcaaaacaacaggtggagatagtctggtctttgccctgctgtgtgtgcctctgtagctcctcctgacaaacgtctgggaaaacagcctcaccccactctcctctctcttccccatttccttgtagctttattccttgcatctttgggtctactgagcagtgggtgctgaggtgacaggggaggaaccagttgttctgtagcctaggaactgcctcagtgtctttgccagaaaaaggcaaagaggcggacagtgcagggctcctccctcctacctcaggcctgatccatcgtgcccttgactttgccgtctcaaagtttcttagctgactttggctttcacatttgttctttccagagctaactgataagagtggaggaggaatgccttctcctaagagtcagttgaaagaaagacaagagagtcacatcttagcttttgcacaaggcattcgtggtcaggaataggttagggaatggtcacttctgattttccaacagttgctccttctctgaagagatcttgattcctttgggaagacaagaatttttcttaataacaaaggtccctttatgagttattccttctttcagttcatctcactggagcacagccaagatggacatgtttatggacagtgctctagatgtgaaaacagatagaactggtttgtgggacaggggcagcttgctcaggagagggaataacgcaggtcccttttcttggaaggcttgtactatggccatgacagtgacattgccctcaccatgatccctctccaaagtggttgtctttctttaccttgtgtcttctcttgtaaaaatgaaactcaaaaataaaataaatgtgtcaaattttgaaaaaaaaagaaaactgaaaaagctaacatgaattgtgtgaaattgcataatgctgtaatgctaatctacaatatgtaatgctatcttgtatgttgaatttgttaatgcaccacacaagtgcaaaataaagactgattcacattacataggcacagtgatgtcagcctgattctctggaaagctggaggactctcagtgaggttaacactcagactccaaaaggatgttctagggtgtgttttccaaactgtggtccccagaccacttgattcagaatcatctgaggcacttgtttaaaaatgcagattccaggctcccatcctagatactctcatttgacaagtgagttggtttgctgcttgctgtagttaggacttctggtctttctgttttcctcttgaaatgtaatttctgagaccatcactaccagagggagagatgatggttcgtagtgctgagaatcaatctgcccctttaattggaaatatttatcccaaaaagcaatcctgagacaggccaattctgttccctcattcattcatttacttttttttttttttttt

SEQ ID NO: 6681 - DNA, 1132 bp, Homo sapiens
cggggatggggttggggttgttttttctctattctagattatccagccaagaagatgaaaactacagagaagggatttggcttggtggcttatgctgcagattcatctgatgaagaggaggaacatggaggtcataaaaatgcaagtagttttccacagggctggagtttgggataccaatatccttcatcacaaccacgagctaaacaacagatgccattctggatggctccctaggaaacagtggaacagagttttgaccctcagtgactcttcttagcaataatgcatgcatttgatttaacaagactctggggcctgtgctgggaaccatctggacctttgcagaagttagagattcagtgcccccctttcttaaaggggttccttaacaaccacaaaaatccttatttctgcagtggcatagaatctgttaaaatttaattagaatcacaaatttatctcagaagctttttaacagttggtgaaatgtgcttgtccaacaaagcatcctaacagggtcgttcccatacacatttgacctggtcagccttttccaggtgaatagccccagttctgacataaagaaagttttatttgtattttactactgtttggtcaattttgatatataactggttacaaacagagccttactatttattagtggggaaatgattttaagaccgtccttttcagtatttaattctgacagatctgcatccctgttttgttttggattatttctgttttggaaaatgctgtctcatttaaaactgttggatatagctggatcctggataggaaaatgaaattattttttcattgtgttttttaattggggtgatccaaagctggcaccttcaggcacattggtctcatagccattactgtttttattgcccttctaagatcctgtcttcagctgggtcagagaaaacttcttgactaaaactggtcagaactcatcacagaaatgaaatacagtggtctctctctcccagaactggttgcagctaaaacagagagatctgactgctggctataggattttggacttaatgactgaaattgcaaattgtcctttttcttggcattacagattttgccaaaataactttttgtatcaaat

SEQ ID NO: 6682 - DNA, 1215 bp, Homo sapiens
ccgcaactttaggaaaatttatttatttattgtttattagttatggggggagaggggagatttaaaggaccagggacatgggaaccaagccatagggatcagagggccttgtccttgaacactactggggtatattcaggctcatccacgcagctgctgggttcttgccctaacggccctcccctgcaacatccgtcttggaggagaggctgcagccacagcaccctactgccctttaaataaaggagggctgtgggcagggccatgtccctttctcctctcccctcaacctcttactgctgttctccctttctccgtccttcatggaagccctgggagataacctggcttcctggagttgatggaataaaggttggggtggccataatggtttgttgggggtgagggaaaaaacccacagggaccagaatgttttgttgttcttttgttttcttttttgtaccaaagtcaactgcacgtgttttatatttttaagagatcgtaggcaattagagatcgaagcctcctatctccacatctctgaagaagttgaggggtgggggagagaatgacttctgccttcatctgcagtaacggggggacctatactgacctcttccccagccatttagaaacaagttctagggtgggttggaaaatctccaagagccctgacctcatcttccacctcagcaaccatgacctgaaacctcagcgtgaatttgggggatttttcagtggaacccttgcccccaaatgtcgaccagcccccaaatgtcgaagaattttcttcttgccaattttgttgtttaaaaaaaaaattcagggaaaattaaaaacctggaactccataaggtactgtcttccataatgtctgccaattctgaggaggatggtagtagagagccgggcagtgacctaagttcctctgaaaggggccttttcctctcaccgcaaggacagcctctgcctcactgaagagagggggcactaacaaaagtaaccactgcaaatcttttttttgtttttttaattcacaaatacaaggataaaaacaaaggggcacacaggttccaatgttgggaattccggtatcaggaaaagtgtgttcatcgtatttgtatgccatgctcagcaatcacctccacctattgcccccatccccagtgtcattcattgtcagatccatcccccactaggcccttgttgatctcc

SEQ ID NO: 6683 - DNA, 1511 bp, Homo sapiens
ggctcatgcctgtaatcccagcactttgggaggccgaggtgggcagatcataaggtcaggagttcaagaccagcctgaccaacatggtgaaacccagtctctactaaagatacaaaaattagccaggtgtggtggcatgcgcctgtaatcccagctactggggaggctgaggcaggaaaatcatttgaaccctggaggcggaggttgcagtgagctgagaatgtgccactgcataccagcctaggtgacagggcgagactccgtctcaaaaaaaaaaactaagactttgtatcaaaaataaataaatttgggctagactgctccctttctcattggactcatattttccctggcttctcctgtgccctaatccagacttctaagcaaggtctttgttttcctttacagctggactgggcagcctttggggtcatgacccttccctccatcggcatccccctgctattgtggtactccagcaagaggaaatatgacactcccaaaacgaagaagaactgattggggcttccacagccctcctctcccaagaaatccaggctcctctcccaagaaatccaggtgctttccagactccaaagggtatcttaaatgcaatctcttctctcttagcccttggccactttctcctggatcctgccctgctctcagccatagtgaaggaccagccctaggagtctgcgagagcctccttggttccatcgtgaagccataaacaggaatgcctttggcaatagccttgagcctagagggccctctgatgccccactgaggtgctgttggtttattgctggcaacgtgaattctctcaggggtctaggaggggcattttggagactgcctgacaccacccctatcccctgcctccccctctcagaagagggtggaagatgaaatgaaagctatgggactcttggaggatacccagtgtctattctgggttagagaagtgcttactaaggggttttctaataaaaacaaatgccacattgacttgtctgttttcttagcccccgggtgaacacaggtgattattggaactcagtctttgcccagacccctgggcaagcgagctgggttctggccttgctgcaggggttgtgggcgggtcctgttcccatggagatatctgcccttttgaatcttttgcttccatcccttattttcctctgattgttgttctcatcagtcaccacctattgccgtacaccttccttgccaggcagctcctcttcacagctggagaatgtaggatggggaaagatggtctgcagaggaacagctattgtcatccccttagatctcatctgatttattgactcagtatttgttttttttgtgggttttttttttttttttgagatggaatctcgctctgtcacctagtggtgaacaccggtgcctggcacctgagtgttcttgaaaagctatctctcatgcctgacttctagccctttctcgttaagaactagctttttggccaggtgcggtgg

SEQ ID NO: 6684 - DNA, 1180 bp, Homo sapiens
ccatgcctggctaatttttgtatttttagagacaggattttttgtattttagagacggagtttcaccatgttggccaggctggtcttgaactcctgacctcaagagatcagccagcctcagcctcccaaagtgctaggattataggtgtgaaccactgcgcccggactattgctttaatttttttgtttgtttgagacagagtctcgctctgtcccaggctggagtatagtggtgcgatcttggctcactgcaacctccgcctcccagggttcaagcagttctcctgcctcagcctcccgagtagctgggattacaggcgctcaccaccgcgcccagctaatttttgtatttttagtagagacagggtttcaccatgttggccaggctggtctcgaactcctgacctcaggtgatctgcccacctcggcctcccaaaagtgctgggattacaggcgtgagccacggcgcccggcctgctttaattttatatccattacttactaaccctttttgtttcatccattttctagtgctgcattagacgtggaactatctgatgattccttccctccagaagactttggcattgtgtctggaatgctcaatgtcaaatgggaccggattgccccgtatcctcttggcacttggtgatgaagggtcggggggcagggagagccttgcctgcaaagcagcaggggtacttcaaataggctggatatgtgtggctgtcctcctgtcatctctctggataagatggagcaagagaggttggtgtaaattgtgtgagcatgatttagagtagacatgaagaaggaggatactgaagttcagattataagaccctgaaacaagctgggcacggtggctcatgcctgtaatcccagcatttttgggaggccgaggtgggtggatcataaggtcaagagattgagaccatcctggccaacatggtgaaaccctgtctctattaaaaatacaaaaattagctgggcatgatggcgcgcacctatagtctagctacttgggaggctgaggcaggagaatcacttgaacccaggaggcggaggttgcagtgagccgagatcctgccactgcactgtagcctaggcaacagagtgagactctgtgtcaaaaaaaaaaaaaaaaaaaaaaaaaaaaacctgaaacatactatactgg

SEQ ID NO: 6685 - DNA, 1235 bp, Homo sapiens
ccaagaaagggatgtgacaggcgaggacgaatgggatctcaggggctggactggagagtggggtacagggatgtgaggaggaccccgcgagtccgcggtgggatcccaatagagctgtggccaaggaggaggggagcagcgggaaggctgtgggcactcctgtgtgagggaaagctacaggctcctgcaggtccgagatcggccgaaatcaggcaccccaaggaagccctgctctggccacatggtgtcccctcagaagactccaccagccggtgggcatcccggggcttctgacaggaagagggcagtagatatattggtgcttgtaccggtttttcgagggctgcagggtgaagatggtaggagagtctggagaacgggtctgctctggtggcttatggactactctgtggaaggggctgctgttctggtagcatcgaaggagctttctacgggagcgctgtcaagaggattttggtgaatttgacgtacttggtttgataactcactttgcttttttctctaaagatgaggctgctgtcatttgtggtgttggctctatttgctgtcactcaagcagaggaaggagccaggcttttggcttccaaatcactgctgaacagatacgccgtggagggacgagacctgaccttgcagtacaacatctacaatgttggctcaaggtaactcgaggccctagagttacagattaagcctatttctggattcttagttttcagatgggaatagggagcatattggtgggtagtggtttctctttgggacacttccagcatcagatatattgagtgaatgaatacacttcgggatctacttttggaaaggaggacattcttacctaagctacaagaaaccatctttcacgtttcgggttggaagaattttagagtagggaagtggcaagaattgtggaaaaactaggagggaaagataaagacacagaaaatacacaatcccttgttacctcaggggtttaaagtgtcatcttccagcctggcatggtagctcacgcctgtaatctcagcactttgggaggctgaggcgggcggattgctggaggtcaggagatcgagaccagcctggccaacatggcaaaaccctgtcactactaaaaatacaaaaattagccaggcgtggtggcggacgcctgtagtcccagctactcgggaggctgaggcaaaagaatcgcttgaacccgggaggcggaagttgca

SEQ ID NO: 6686 - DNA, 2472 bp, Homo sapiens
ttacacagttatttaggacttgggacctaggctcctgggcccccatttgcagctcatcttccctgccctcctgattgactctgaggatattagagaagacctgctggtcttagaaacccttaattcaaatagggcccccaagattggtcctgtgcccacttcacaaggcctgtcccctccaggtgcagacgccagaagtgagatttcagcagcagctggagcagctcaactccatgggcttcatcaatcgtgaggctaacctgcaggccctgattgccacaggaggggacatcaacgcagctatcgagagactgctgggctcccagctctcctaatccctcggcccatgcctcctgcctctcccctccctcgatgtcagcattcggttcttctgtcaatccttaccctctgcagcttgtcctcccttccgtcttctccctcatcctttccaaacagcagggtgactttagaggcatgggctccaaccccttagctctgtctgagaattatggttttactgctacgtctctaacagactcttctctcctggtctccttgagcagtgctacttaaacagttttcacagtttcattgattgactctacctccttgccccacaccacttttgcaatctttaaactttcagtggctgtgcagagtcgagggaggaaccagctctctggtttactggaacatagtcttccatctataccactagggttttgtcttatgtttacttttggtaactctcttccttctttttctccctaccccccaacccctagcccaaccaatgctagaatttcttgctctgaaggaggagcaggtgaaacaggtggtaattttccttctcggcccctattctggttcattcagcactttttggtgggaactgttggaaattccagggtaaggaggaagatgcctgttctccctgtctgaagagggagatgagacagctctctggacaggaattaacaaacgctggagcagcccagaggaaattcgtgtgaaagaggagggaatgagattattcggaggaagggaatgggggagacagcctgagtaaaaggcttggaagttggaattaacagtggggagcagaagcactcatagctcttttaggcagaagaatccaggcccgagctggcagaagagacttagagatgctaatggaatttaaactgaaaaaaggagcccaatgaagctaagcgccacgccccacaaggggtcatattggctttagttcctcaagcatatgtgcttatatgcacacacacacacatttccatggacccaggtcttgcttgtgtccccaggcaccagtagtttgagcccccctcaaaagacatgaagggggttggggtctgtgtgagtagtggggaggtgcatgtgtatccacatgtgtgcatacactcttaagttgggtgggaagtggattccttgttggtttctggttcagagtgctctcccaccaccagagacaagtgggtaaaaaggtcagtccattgcaggaatatatatccgggagagctaggtcccttggggctctggatgctgggtaacccagaggtaatgtgggtaccctttctgaagctgtcagggctgtgactagcacccttatcacccctcactgccttgtgggaatagtagagggtttttttcctccagagcccctggcctttcagttcttaactatttccctccaggccagaaagttttctttgaggaaggagaggagagggtggcaatgatgcctttgatctggaattggacatttctctgtcagagcacagaggaggctcatatcacctcttccctctcctacttggcccagctgcttggaggaccgaccccatggctgagaatatgacggcaagaggaacagagtttgctccaagtgggaaagggtcccaagcagtccagagaagatgtctgtgtggctttccctccctgcctcccccagctcccacactggcctttgtaaataaatggcgtggtctttgttgtgagagtgtgttggcgtttgtttttttgaggaagaagctggctgaaaacaacttcttggttttccagggcaagagttgtgatctagaggaatttgaagtttggttcagttactacagatgttaagaaatattaaaagtggctgagatcatgccattgcactacagcctgggcaacaagagcgaaactgcatctcaaaaaaacaagaaatattaaaaggttttagcctggcaacatagggagaccttgtctctacgaaaaatttaaaaattagccaggcatggtggtgtgggcctgtagtcccagctacatgggaggctgaggcaggaggaccacttgagcccaagaagtcaaggctccagtgagctgtgattgcgccgctgcactccagcctgggagacaaagtgaaaccctgtctcaaaagaaaaaaaaattatatatatatatatatatatatatatatat

SEQ ID NO: 6687 - DNA, 1219 bp, Homo sapiens
gaagcccaatgggtggaaatgaagttggggcagagcttgactctggactcctagttgaggttgtctcctctttcctgccacctcttgatgcctttctctgcttatttcccaccagatgcagaacccagagtcactctccatccttaccaatccccgagccatgcaggcattgctgcagatccagcagggactacagaccttgcagaccgaggcccctgggctggtacccaggtgagggtaggggggcaggagggcagcaaggttctagcaacttctccccttcaactcttctctctgccactctctcagcatcctttgtgtctctgagggtctgttttcctgtttcttccaactgcttttccttctggatctcacattctcatccctttcttggatgccatctcctacctcttggtctctcttgcctacagccttggctcctttgggatatcccggaccccagcaccctcagcaggcagcaacgcagggtctacgcccgaggcccccacttcctcaccagccacgccagccacatcttctccaacaggggcttccagcgcccagcagcaactcatgcagcagatgatccagcttttggctggaagtggaaactcacaggtacatgaggcagtgggggcaggtgctgggagcaccactttgatcctgggaggtttcaagggaagcaatagaatagaggcagtagggcaagcttgggagtcaggtcctgttctgccacttgctagccttgggcaggttactgatgctccctgagttcagtttgtgcagatgtgaaatagagatgagaagagtaatggtacttacccgtgcactacatactgttctaaatgctttagattttggagctcatttacgactcatttaccacattcctcacaatagcctcatgagaaagctattattattatttctgtgttaaagatggggaaaactgaggcccggaaaggttaagtggcttactcacttacatagctagtagataatgaagccaagactcaaacccaggcattccacctccagaatttacactataccatttctgcttatatcaaaggatccttttgataattaaagcagcccccatctctgagactctggggagggggattctgcgaggtaaccaaagccctgggaaagtcaaggccaggggctggcaggaggggcagggatgacctacctcgagtgagcctcttaacctttc

SEQ ID NO: 6688 - DNA, 1125 bp, Homo sapiens
ggggggtgggaagaagggatgtctgtctgtcgtccccctccccctctccactctttacccacaaaggcagaagactgttacactagggggctcagcaaattcaatcccacccttaccaattgagccaaacctagaaacaaacacaaaacacgaatagtgagagacaaaatagaggagagaaagagagcatgagagggagcgagacaggcgaccaacacagaggagagaaaacaaaaatagcaaaaaaaaaaaaaaaaagcagttctttataatttaatattctattttaataaaggcgtttattaccatataaatgtagcaaagaacctgggctaatatgaaaaaaaaagactttttattaggtaatttattatatgaaaaggatattttattttatgataaagtgatccttaaaaaaataaaaaaactttagaaggtttagaatatatgtagggagagaagaagaaaaaaatacatttgtattcagagttaaatcttaaaaaaaaaaagtgtttttaatatatgtttgggtttacgttgcttttttcccccactttttttttggggaggaatgtcatttgcttttcttgggggagcatcccgggggtgaatggtggagagaggagctgggggaacccggtccctcctgggacccttccagtagattggatttcactccatggactcctcctcccctctccccctccccctcaggggagccggcagagccaaacaaagaaagggattaacaagaaaggaagaagctgtaggactaaggactgaggatcctggggtgtcccccaccactttcccctgccctgtcgcaggggcaagtgaggagggggaatccagaattaaggcctagcaggcctataggaaccctcagagatgtgtgagatttaagagatctagatttttttttaaccaaaaacaagagagaaagagaagaaaaagagaaaccgaggggtttaaaagaaaagaatactacaaaataataattattaataataataattcaaatttatttcatataatcctagagagagaaagaaacaattactagttacttagtagacaatattaagatagcttaaagtttagtagcattgagggcccctgggtcca

SEQ ID NO: 6689 - DNA, 1127 bp, Homo sapiens
gcctctggtcaccctgtcctggaaagattgggagggggccagactgaaaattttactagagttacaactctgatacctcaacacacccttaaatctggaagcagctaagagaaacttttgttttgccagaggtggccactaaggcattctgacgccctctgcccacctcccccgctgtgtgtcactccaccccttcttccgaggagggggtgggtaaaagggagagggagaattaccacctgtatctagaggtgctctttgcaatccctaagccctctggtcctgacctccgacctcctaacatgaccctttacctcccaccccacccccatatcctgtttgggaaactgtcaccagtttccagcagtgtaagggagttggagtcctatcagaagttgcatagatcttctaggggttggggagagaagcatgtcaatcgtttctgtggctgaaaggctcagaagccatctgtccccacaaagctgggctagaggaatctggagaggagtcctcctctctgcccctgtcccctgcagtgtttcccttcactctctccgcctatcttcccttcctttgggatcttccctttcctcaactctttcctttccctccagctctttgctttgctttcttttggtggctgtcactcccagctctgtcttgttccttgtctttgtctttcttcccttccccctgcccctgcccctaccagcccagctttggggacaccatccttctggggagaagtagggggaggaatatttggatggtccctccattcctcttcaggcatctggaggccctctcccccactcctccaaagaaacatctcaaattattgatggaatgtatccccattctcagtgaaaatgtgaggaggggactaatactggggtaaagggtcaaacccccaccttcatcactatgggcattatatttagggagtagttcttgggctggattttctggttgtggaagtgggggcgccagagtagtgtgtctgctatttaaaggagcaggaaagggcgtgaggcaggaggagagactggtggagggaagagctgctcctcccatgcagtgcccgactccctgcacccctctcaacctgacctgaacctttattgaat

SEQ ID NO: 6690 - DNA, 1173 bp, Homo sapiens
aaaccttgctgtgtgcgtttctttgtctctctccttccccgccctatcccaggctgcaagattaaggccttgagggccaagaccaacacctacatcaagacaccggtgaggggcgaggaaccagtgttcatggtgacagggcgacgggaggacgtggccacagcccggcgggaaatcatctcagcagcggagcacttctccatgatccgtgcctcccgcaacaagtcaggcgccgcctttggtgtggctcctgctctgcccggccaggtgaccatccgtgtgcgggtgccctaccgcgtggtggggctggtggtgggccccaaaggggcaaccatcaagcgcatccagcagcaaaccaacacatacattatcacaccaagccgtgaccgcgaccccgtgttcgagatcacgggtgccccaggcaacgtggagcgtgcgcgcgaggagatcgagacgcacatcgcggtgcgcactggcaagatcctcgagtacaacaatgaaaacgacttcctggcggggagccccgacgcagcaatcgatagccgctactccgacgcctggcgggtgcaccagcccggctgcaagcccctctccaccttccggcagaacagcctgggctgcatcggcgagtgcggagtggactctggctttgaggccccacgcctgggtgagcagggcggggactttggctacggcgggtacctctttccgggctatggcgtgggcaagcaggatgtgtactacggcgtggccgagactagccccccgctgtgggcgggccaggagaacgccacgcccacctccgtgctcttctcctctgcctcctcctcctcctcctcttccgccaaggcccgcgctgggcccccgggcgcacaccgctcccctgccacttccgcgggacccgagctggccggactcccgaggcgccccccgggagagccgctccagggcttctctaaacttggtgggggcggcctgcggagccccggcggcgggcgggattgcatggtctgctttgagagcgaagtgactgccgcccttgtgccctgcggacacaacctgttctgcatggagtgtgcagtacgcatctgcgagaggacggacccagagtgtcccgtctgccacatcacagccacgcaagccatccgaatattctcctaagccccgtgcccc

SEQ ID NO: 6691 - DNA, 1233 bp, Homo sapiens
atcaagaatgttctggacttctacaagcagtggaaggaaattggttgatactgacccccaggccctgcagtggggctgactccagatctctcctgccctccctggcagccaggaccagcacctgtagtcaccccaccacacgcagactcatgcacgcacacaggagggaggcctagctgctcagaggctgcagggagggcccaggagccggctgggagggtggggtccctttgttgccaagacgttaggaaagcgaggaaagtgcttggattaggagagtcttgtgggcccctggccagccttcctgcctcagctcccctgctgtctccaggggcaggtggtaggcatgggtacctgcatttcactggaatgggttcttggatctctgaggggaaggaacagcaaaagaggcccttcttcctcacccaagatgcagggtggttggggccaggagtttggaccctctaggtcttgggggaagagctgggtaatacctggtgtctgagtgattctctgcagacccttcccctcctcaaggatcacccatcctcctttcagccccctttatggggaccaggcagctctggagccagccacaggggctgttagagaagcaaggcctggagtggcctgcaccgagtagcagggtcagggttcgtgtgctcctcctcctgctgcaggggctgcacatcccattgccccacttctgctttgtgtctccctctgtctagcttccagggcagggagcaggccccacctagggctgcaggcagtctggcctgtgccagcacggtctcctgtgcccaccagccccacaggtgctgtgctttgtgctcttggctgctgtgctgggacagaatgggatgccaggaagagaagaaagggggtgcagtctgaggccaccaccccccttcctatctaagggagggctgaagacaaggggccggcattcagtgggcagcagaaaggagaggctccttgaagctgctcagtcagaggcccccgtccctccttttgccttccgcaggactgaagacctgaaggggctggcttttggagtgttgaggtgaatatctgggagcagagatcatgaatagctcagggcagtgaatggcgcaccaagagcagggctgtgtgtgggaggctgcagccaggattgcctcagctcctccccctcaggctgggaggatagcacaggctaggggctcggggtggagggtctcagctctgctg

SEQ ID NO: 6692 - DNA, 1988 bp, Homo sapiens
tggctatttttttttttttttttttttttgagaaggagtttcattcttgttgcccaggctggagtgcaatggcacagtctcagctcactgcagcctccgcctcctgggttcaagcgattctcctgcctcagcctcccgagtagctgggattataggcacctgccaccatgcctggctaatttttttgtatttttagtagggatggggtttcaccatgttggccaagctggtctccaactcctgacctcaggtgatccgcctaccttggccttccaaagtgctgggattataggcatgaaccaccgtgcccagccagcccagctaatttttgtgttttttgtagagacaaggttttgccttgttgtccaggcttcttttgttaattttaaaatcaaacccccacaggcctctgaacataggccagatccctcagggtggtgctttccttgctcactgctgttctccaccactgtctctagctgaaggcctcctctcccttctctctccccagagctctcaaagtctgtggaaccgcctgtctgtgttgctgaatctgttgcctgctgctggtgaactccaggagtctggtgagtgggtccctggcactaccctcctttctttgctctctcattgtccccactaagcccatctcccctccccataacccagcccttggggtaaggaggttaatgggattcactgccagcctccctagcacacagcagtcattgtgtggtctaggcctctccggtttcccaccacaacactgctgtattgtgggcaggtggcctggtcagcaagggagtgtgctccctagggaatgcaagggcagagtgagagggccctgggagccagacctagctgctgctgttgcactgatgcctgtggtcattgagaattgactttgacctaccaagtttgtttgtctggctcatctcctaccaccttccagctggaaaactccacctgctcctacctgctaagacttgccaagggctattcattcatcctgagcgcctcctctcatttccatcccaatgtaattgtccctgctgtcaggaagccttcctgacctgagccatccttgttcttcctgagcccctctgctctgcctgactggctcttatgtgtccatctctctttacttcactccctccatctctccgcactgtcctagggtatgtcctgcctcatcatctcatcagcctgataattcccaaagggaagggttatgtctctctgactgggagttcccacaggacagatggtcttatgtgtccttcttctgcccaggcctggccttgtgtcctgaggtccaagatcttcttgaaggttgtgaactgcctgacctcccctctagccttctgctcccagaggacatggctcttcgtaacctgcccccgctccgagctgcccacagacgctttaactttgacacggatcggcccctgctcagcaccttagaggaggtaaggatagcatttcttatgccacagctctgtttgtcagtcacaaacagcagcaaatgggttcagatctggggagggagggggcaggatgccctcttccactcagacagggacagtgtccttggggctacaggctgtgcttccttcttcattcagtgagccattttagcttttttcctgccttggcagtccttctaaaggtctgccattggtagtttctactattgtagaacaaccacccccttcctttctctgccttctgtaaagggcagaacaaatagttattagggcttcgaaatctttatcagtctcttttctaactctgggcccagcctgctccgagctgaacatcaaacaatcatagaaagttagagctggaagggaatgtgctgcccgcttagtccagcagctttcacccttaaatctccatcaccacatgggccatctgggggcagcagagggaagtcaagcagacaggccacccagtcctgacatacataaaccacctggctgctccct

SEQ ID NO: 6693 - DNA, 1425 bp, Homo sapiens
gttttaccatgttggccgggctggtctcgaactcctgaccttgtgatccacctgccttgaccaaccaaagtgctaggattacaggtgtgagccaccacacctggctgagaactgcattttacattcaggactgaaaaggccgggcatggtgggtcacgcctgtaatcccagcactttgggaggctaaggcaggtggatcacgtgaggtcaggagttcaagaccagcctgaccaacatgaggaaaccccatctctactaaaaatacaaaattagccaggcatggtggtgcaggcctgtaatcccagctgcttgggaggctgaggtagtagaatcgcttgaacccgggaggcggaggttgcagtgaaccgacatcatgctactgcactctagcctgggtgataagagggaaactgcgtctcaaaaaaaaataaaagactgaaaagatagatttcagacaaaatggcagttccatagtagcatctaggtgatagatctaaaggaaagaaaagtgtcctttccttctctgctgacctctttgcatctgtggtttttctcctagacggcagttctgctactgcgaattgatgacatcgtttcaggccacaaaaagaaaggcgatgaccagagccggcaaggcggggctcctgatgctggccaggagtgagtgctaggcaaggctacttcaatgcacagaaccagcagagtctccccttttcctgagccagagtgccaggaacactgtggacgtctttgttcagaagggatcaggttggggggcagcccccagtccctttctgtcccagctcagttttccaaaagacactgacatgtaattcttctctattgtaaggtttccatttagtttgcttccgatgattaaatctaagtcatttgagaaagttgttatgtgtttttcaaccttgggccatctctcttatctcctggcaaataggtggaggcagaaaaccttactggggagggaaaggagacctggaatgagggcatttagactcttttgccttcttgagggagtattcttcagacttctcagtaaattttggttggaaagacccttttggagttcaaaggataatactgtaaagcttacaaagcaccattttgcattcactgcccaaagaacaagaggaacctgtctaaagcatgggtgttccccatatgtggttgtatgtagaggaacacccagtacatcctagggctctggcatgtgtcctaaaggacatataactttttttttttttttggtgtagttttcagaattctccctttaccatgagttatttttctctgccctcttccaatgtttttacaattccagtcttcattttggcttgctgaccttttctcatgccagtatcctgtcacagtcagacctctctgcctttctgctagcagaaacaaaatatt

SEQ ID NO: 6694 - DNA, 2232 bp, Homo sapiens
gtgctgctgtaactgcaatgatggcttcagttttttttgttgttgttttttggggtttttgtgtttgtttttttttagatagggtcccactctgttatctaggctggagtgcagtggcatggtcacagctcactgcatccttgatatcatggtttcaagggatccctcacctcaccctcctgagtagctggagctacaggtatgcatcactgtgcccagctagttttttattttttgtagagacagagtcttgttatgttgcccgggctggtctcaaacttctgggctcaagcaatccttttgcctggcctcccaaagtactgggattacaagtgtgagccactgtgcctggccccctgaaaatctttttcaccggacaggcaagacctcttaagtgatgtttccaacaatccacttttgcccttatccctagctacagaccctagagactagggaaatgggtacaagtatctgaaatcatctgattctccccacctcttccgtccattagagcctgtggggcccggatagtcagccgaccagaggaactgagagaagatgatgttggaacaggagcaggcctgttggaaatcaagaaaattggagatgaatactttactttcatcactgactgcaaagaccccaaggcctgcaccattctcctccggggggctagcaaagagattctctcggtgagtcagccttggatgtatgaccagatgaagtagatcactgaacttcttgagagtttcccaaagggcctaaaataattctgtggtccatttatagctatttaatttggacctatagccacaaattccttttctgcttcctttttttaattaaataatttaaaattttaaaaattgtagtaagcataaaatttaccatcttaatcattttaattgtacagttcagtaatgttaagtatattcatgttattgtgcaagagatcttcagaactttttcatcttgcagaactgagactctgtacccatcaaacaagatatctcatctcctactccctagcaacaactgttttcttattttttacgttgaagttataaatattacttttttttcctcattgaggctaagtaactttcccaaaggcacatagctagtaagtaggagagtgtacaacaccatgcaacctcctaaaagatacaactaggaaggggtggaataggttatggctcttatctatcaagatacatgctgtttatttccatataactggcaagggatgaaataggttattgctcttaatctagcataatggacaaagacctaactttatggttgggtgacacccccaaaccctttgcagataccactccccgccatcctatattatagtcgtgtgttatatattctcaggtaaataatctgccctgcccagtaggggttccaaggaccttttctagttgccctccttggtggtttactaactttggcagttaggaagtccttttggtgcctccgattttatgagtcatcaagctttggcttcatactgtctgtttgcttctccaaggaagtagaacgcaacctccaggatgccatgcaagtgtgtcgcaatgttctcctggaccctcagctggtgccagggggtggggcctccgagatggctgtggcccatgccttgacagaaaaatccaaggccatgactggtgtggaacaatggccatacagggctgttgcccaggccctagaggtcattcctcgtaccctgatccagaactgtggggccagcaccatccgtctacttacctcccttcgggtgagttcctctccaagcttttctcttgatggagcagggaaagctgtgtttgccctgaggggaagattcttatctggctatccaaattctctttatagtctattccttgaaatctttctctccttttagtctttgacttgtttgctgtcattgccatttttccctgtcccttccatactggtccattgttttttacttcatttcttacctgatgtttcctgttaacttattttcccctttacttcttgcttcaattgcaggccaagcacacccaggagaactgtgagacctggggtgtaaatggtgagacgggtactttggtggacatgaaggaactgggcatatgggagccattggctgtgaagctgcagacttataagacagcagtggaggtaaggcaccctaagatatgtacacgctgttttaattaatttatttatttatctatt

SEQ ID NO: 6695 - DNA, 1111 bp, Homo sapiens
ctgttcaaatgaatgatttgataaaactcttaaagttggctagttatgggataaagtttcataaaaaaaaatgtgtcttgacctgagttgtaaaagttgaaaagtttacttggttgaagcagaagataaggaacaaattattttactataatctttgtatgtaagtgtaaagggttgctcagggaattaaggcaccgtctacagatgagttgtaatcttgctgaaaggcagaggaatggacaaaggttacctcctaatgtccttttagtttcctccaaaggaacaaatccccttgttctgcctcttggtccattattatagtcactgaggtatagataaggcacatctctacatatctaacatgccttcttcacatatcgtctggttttcttttctctagtatcccagtcgacatcagtgacagtgatatgatgctgaacatcatcaacagctctattactaccaaagccatcagtcggtggtcatctttggcttgcaacattgccctggatgctgtcaagatggtacagtttgaggagaatggtcggaaagagattgacataaaaaaatatgcaagagtggaaaaggtaaactttcaaagtgtatacattgggtcaaattatatgttagcatgagtcatctcacttgtgaggaaatagtctgtttttcatgccgttgttttgttttgtttttgagacagagtctcaccttgttgcctaggctggagtatagtggcacagtcacagcccactgcagcctcaaactcctggcctcaagcaaatcctctgatttgctaggactacaggcacatgccactgtgcccagcaaattttttttctttttgtagagatgagggtctcatgttgcccaggctggtcttgaactcctggcctcaagtgatcttcccacctcaggctctcaaagtgctgggattataggcataagccatcataccctacttgaatgaaatagttttaaatcagagcaaggtatgttttttgtttgtttgtttttttgagatggagtcttgctctgtcgcgcagaggctagagtgcagtggtgcgatctcggctcactgtagcctccacctcccgggttcgagtgatctcct

SEQ ID NO: 6696 - DNA, 1356 bp, Homo sapiens
cttcccttctcaggctattcccaccattagtctgcccacctttctaggctgggcttggccaccattaaacacggggtgggggtgagggcccctgcaattcacggtgcaatattcaccagttttgccctctgcctcataaaggcaaacctggcttttgattaccatgtgtggatgtttcagtgtcctttcttctctgtccctggggatggggtggtctgtgaatatgtgacatttctgcagttcagtatccgaaggtttctcttgggggtaggggctcctgggcggccagatgaatgggtccctgggaacccagacctcagatgaggacttaatgtcttcttcctctcaagccaaattcgcctccacccactccctctgaagaactgggcatttgccaaagtaaccactggagtcatctaatggccctccccctccccaggtttcccacagctttcagggacagtgggcaagaggacacccccccccaccacctcagtggaacacaccattctccccccctcaacagcacactcagtgcagcaagactgacccctgaccccctcccagccctccctaccttggacaggaaggaagtaatgcaccttctcttgctgattatttatttgtttggagagacagaaatgtaaaagtgtatctagaaatatctatatctctatatatttttaactgactctttggaatcccctggggtggggtgaggggtaagtttaggctttcgcggaggggaggagacatggagcctgggaactccttgttctcccctctgctgcctctccccaccccttaaagcagttggtagaaggaatggtatttgtatggggggagggaggctggaatggagaatctggattctctcctcttccccattctccagagggagggaggtggtgaggaagaggaagggaggggcaggatgggccatggaggtgccccacccccacacctgacaatcacccacactcctggggctcttcctgggtcctggggcagggcgagtccaagtgtgaggctgttgatttgttttcaatatttcttttcgtgctgtatggtgatgctttcttagtattctacacaataagaaaagacaaagtcctcgagattcttatgagttttgtttgaaaactctttcactatatttgttgtaaagaggtttactattaaaagaaaaagaatacacgtttctgatacttcggcgtgggttttggtttctttggtgccgcgaggatgggaaggaaggactggtgtggccccatcagggtgagaggcagtgcttcatctcagcagggaagaatggggggcggccttcagggcggggcacttccacatgtctcaggt

SEQ ID NO: 6697 - DNA, 1439 bp, Homo sapiens
gggggtgcatacccaaagcctgggccaccccctcacacccccttctccatctcctctcttcacagacattaaagtgacgattcccactcccctcctctcagcctccctgatgaagagttgacaatctcaccgcccgcccttccctgccccgggctcctcccgctcgacccccacttcctttcttgtgcttcgtgtcctgttgacggttacatttgtgtataattattatattattattattattattatattttttttaatttggattctcgctttggagagggggatgctctcatcccctctttctgtaccccccaccattttcactggctggggggctctctttttcgcgggaaggggggacactttgcacgttgtacacatatgctgcaggaagggggtggggggcccaataaggcctttgggaaaggacaggtgccgagccctgcatgtggagccctcccaccccacccccagatagagggaaataaccaaaaaactaccaaacaacagaaacccacactctagactgaaaccccaaagtgggcttgatgggtgggtttgtgtttcaaggggaaagtgaggcagaggttctgaaaagggtctctgtttttgtgttcatgtagccataggcacatggagcagaatacttaagcctggcccccaaatgcccctgcacacacacgtgccacacctgcgctgattcttgtgtgtgctgcacccccaaggtgtgtgggtgctggctgagctttgggccgggaaggcagcctgggaatctgaggctggagacaggggtttgaggtgggggcctctctggaagcacatttggagggaaagacaagagagccatgaggagagggctgaggagggcagaagggctaggcagggggcaaattgagcccctcccttccccagtttttctctaagatatacagtgcaatagctccccacccctcagttgacgccagccctgtaaagctggccacagtgtgcagggagaatggggagagggtcttcagtgaggtggctggggcgagagtcggcctggacttccctggggtgctccaggccagagctctttcattggggcgagtgtggtgaggggacgtccttggtcttgcacgcacactacctgggggagtcaacactgggatggtctgtggggtgggagggcctacggatgggtccgtagaggtcccacctccctcattcctccttggcccctctccctagcttctcctgttagctccttctgctcctgaccccacctccttgctcttggcgcccctattgtctctggctacctccttgtcccaccacctccaggctgcatcccaccttccctcttggctactgtaattgtaaatagcgacctttggaaaacgttagcggtgtaacagtccaggaaactgtttttttttgttgttgttgtattgata

SEQ ID NO: 6698 - DNA, 2076 bp, Homo sapiens
atacaaaaattagcctggcgtggtggcacctgcctgtaatcccagctactcaggaggctgaagcaggaaaatcgcttgaacctgggaggcggagattgcagcgatccgagatcgcgccactgcactgtagcctgggagaccgagtgagactccgtctcaaaaaaataaataaataaaataagaaaaacaatttcaagccctggttctgcttgagttgacatttgatcaagtcactgtacctctcttgcctcagtttcctcatttgtgaagtgggatttcaatgccctacttcagtggccagtgccactggtgactgcagaaggccccatgatgtgagtgttttgtacaccatctgactggaccacattcagaagcccttaaactcccctccctgcctcttccctcctaggatctcctgcagctccagtatgagggtgtggctgtcatgaaactcttcaacaaggccaaagtcaatgtcaaccttctcatcttcctcctcaacaagaagtttttgcggaagtgacagaggcaaagggtgctacccaagcccctcttacctctctggatgctttctttaacactaactcaccactgtgcttccctgcagacacctagagctcaggactgggcaaggcccagggattctcaccccttccccagctgggaggagcttgcctgcctggccacagacagtgtatcttctaattggctaaagtgggccttgcccagagtccagctgtgtggcttttatcatgcatgacaaacccctggctttcctgccagatggtaggacatggaccttgacctgggaaagccattactcttgtgtctgctactgccctcccacagtcaccccaatattacaagcactgccccagcggcttgatttcccctctgccttccttctctctgcactcccacaaagccagggccaggctccccatccctacctcccactgcatcagcagtgggtgttcctgcccttcctgagtctaggcagctctgctgctgtgatctgcacaccctccaacctgggcagggactggggggatgcagtgtgtgttagtgcccatgtggcattgtggcactgttgccccccatggcggcatgggcaagatgaccttccattagcttcaagtcttgttctcttgtctgtggtctgtttaatatgtgggtcactagggtatttattctttctcccatccttacactctggatcattgtgcagacttaatcagggttttaacgctttcatttttttttttttttttttttttttgagctcaaagagagttctcattttccctattcaaactaatacccatgccgtgttttttaccttggatttaaagtcaccttaggttggggcaacagattctcactcatgtttaagatcttgttatttcagcttcataagatcaaagaggagtctttcccttttctcttttaccctcaggattctcatcccttacagctgactcttccaggcaatttccatagatctgcagtcctgcctctgccacagtctctctgttgtccccacatctacccaacttcctgtactgttgcccttctgatgttaataaaagcagctgttactcccacatctgttgttaacccttatttcattttctgtagagccggcctttaagttctggaacacagctccctgagagaactggggaatccttcctgcagcctcccccagccctctgcctgcctccggtgtggtcctactctgcctgcctgagatcgtaaaagcttaatgagatgtggcatttattctctcttccttcccccgggggacagagaggaggaaggaatgcttaggtttctattctgtttttatcggccactctgaagactaaagctgagaagagaagccactctaatttctaccccacccgttttacacacagttcctgcaggttcttttcctgagccttgggtggtgatatcaaaggtgcttaagccataactccttaggtattgtagattctacactctgatcaaaatctcctttctgaagggaaagctccctcctttcctccttgctttcagaaagtagggagggaa

SEQ ID NO: 6699 - DNA, 1239 bp, Homo sapiens
atgtatggcctgtgtgggtgaaggggaagggcaggcagggtaccagagataggaaagtagcagggtagggccttcagtttgtaactgggtataaaggaatcagaacaggacctattgagagcaacacaggcaagacacttagtatggatggtgtaggctctttggtcctacttacagccagccatcagcaaccagttggctaaatcacagcaagtgaccgaccggttccttgtgtttaccatgccatctctttctgaccacttcccatgtccctttgtgcccctgtgccttagctcagcaggtatctgcttgctgcgcccttcctgtcctctctctccattgagtgacctgctactgcaatgtggccttctctgtgaagccttcctaatcccctcagacccccaacaccatcttatttaccttctgcagcactttccttgggctgatttatggtcatatttctttatgtgggttggggatgacttgagggcaggtgctgagtggtcttcatctctaggtccccatagtatccccttcaaacccatcgtgggcagagtgtcaaaatgaataggccccagtgccttccaatgccttccgttttttcctagtctcttcctcttccggctgggattggcccctcagatacatgatctatacgggaaagtgaaattcacaggtaagcccagctccttccctgaccaccacagcctgggcagggtcttgggggttctgggcctgatgaagggcacctgtggcatcattgcagctgaggaactcagcaacatggcgtccgaactggccaaatatggcctccagctgcctgccttcagcaagatcgggggcatcttggccaatgagctctcggtggatgaggctgcaggtaaggactaggctctgccctgccaggagtaggctcaatgcgtatgggagggctccaagcctcacagccattggatgggttctggccagctctcatccacagatagggccatcaggctacctggtttgtctggcccttgagggtgggaaaaaggatgacattagagtgggctgctactggttgcgctccaatctgggattcactctggcctcctgaccttgtttccatgccctctcccagtccatgcagctgttcttgccatcaatgaagcagtggagcgaggggtggtggaggacaccctggctgccttgcagaatcccagtgctcttctggagaatctccgagagcctctggcagcc

SEQ ID NO: 6700 - DNA, 1149 bp, Homo sapiens
ttcaagggcgatgttcgggaaccgttccacagcatcctgagtgtcctgaagggactcactgtgcccattgccagcatcgacattccctcaggtgctgggatccagaaggtggggtgggggagattggggccctaccctcctgactcttgcccacaccaggtctaaaataattttagtctagaggggcagaacacagctttctggacccccatcagggctggggaacagtgttcagaagtcccctttacatgttggccccatgaagagaccacggcccaagggtacgtggagctcgttggacgagagttcctcaggtgggaactgaggggacttcccactcctctgggactagggtaaactaaggtgtagaaggggacgagacatctggcctcttcctgaacaccaccctcttttcaggatgggacgtggagaagggaaatgctggagggatccagccagacttgctcatatccctcacagcccccaaaaaatctgcaacccagtttaccggtcgctaccattacctggggggtcgttttgtgccacctgctctggagaagaagtaccagctgaacctgccaccctaccctgacaccgagtgtgtctatcgtctgcagtgagggaaggtgggtgggtattcttcccaataaagacttagagcccctctcttccagaactgtggattcctgggagctcctctggcaataaaagtcagtgaatggtggaagtcagagaccaaccctggggattgggtgccatctctctaggggtaacacaaagggcaagaggttgctatggtatttggaaacaatgaaaatggactgttagatgccaagtgagttgtgctgtcctttacacaattcttattcatttgggacacagacagggagctacttctacttatcagtgtagcaagactacaaagaggttaaccgaaggaatttcttcaaaggcctccaaggaatatcttctaatttgtattcaggaccttcccaggctgggaacagagatgccagtcaggatttatctctaggctaggagcgcaagctcatgtttattcattcatttggtagcgctagaaactggcaactgtgggctaaatctagcccatagacctaaatttatgtttttcttaaccttcacaatatt

SEQ ID NO: 6701 - DNA, 1409 bp, Homo sapiens
aatctggtggcctggccactcagaatcaccaagttcctcacagccctccttctcctgaggggaggagtgaggggccgtgaatgaatggctaccagccccctcccatgtcatggcttctcggctccctggagcacattccagaggcccataacagctgctccttctcacagggcacagatgtgaccagcagctgagaaaacagcttcttgcctgggccacacagaggtgccatggccacctccccatccctcctctcagaggagacagaatccagaacatgtgggaaatgggggtggggcgggggtgagagcctgctgtgaggagcaggagacagttgtgggagatgggaccaacgggggacgggggctgtttgccttccagtcctgcaggctccaggcatcttgattaatcgtttttccttctgctttcgcttttttttccccctcttctctctccataacccatctcgtctcctccctcacctccccttcctgtgggagctgtgttctgagcaacatgtgctaccatttaatcagcatcctcagaggaggagcaggccatgggagagagctgagagtgctgacaggggccctgggctcatcttggctgatccagagggggctctctgggcagggaatagggtaggggaggcgggggtctgctacacagataagtcagccagggagcaggaggtgcttcccgggcagcggcagcgggcaggaggcaggttggttcacagaagggaccccagcccctccactgactgcctctcgcctgccctgcagctggctgtggaggccctggagcaggagaaacagggcctacagagccagatcgctcaggtcctggaaggtcggcagcagctggcgcacctcaagatgtccctcagcctggaggtggccacgtacaggtacgagacgagccctgtccacccaggcacacagaggcacacacacatgctggggcagactacgtggctgaaggggaccagaggtgtaggtgatggcaactctgctgccactgggttctgtgactctaggctggtcacttccacaccggaacatgtcctgcctgaaaccgtctgctcccccataggctggagacctgagcaatgtcctgtgcccaggaaatccccccaggagagatgatattgccgagcgggacagcctctggagaggggctgggcccgtgtggggcaactgcatccagacccttcccccaaggggcaaagctccaactctatgtgtgcccgcacccagggggtcatgtcctttggcagccacggaaaggaggcattgcaggcatggggtggctgcactgacttgccacctgacctgggcctcagcctcgtctaggggctgagggctgggctgggggacttccaaggcctcttctagcctggatgtcat

SEQ ID NO: 6702 - DNA, 2159 bp, Homo sapiens
agatgctgaggccccaggcatcagagatcatgagaggtgagtgagccccctgaccccttggcagctggactaggggggaccggccactctcggagaagaggatgaaaagggcctgcagtggtcagcctctcgggaggcagggtgggctctcctaggagaccggcactggctggggcaaggccaggccaaggccacaccattaacccttctcccctccaaccctccctcacagcctgtagccaccaatgtttcaagaggagcccccaccctgttcctgctgctgtctgggtgctactggggaaactggccatggcctgcaaactgggaacccctttcccaccccaacctgctctcctcttctactcacttttcccactccaagcccagcccatggagattgacctggatggggcaggccacctggctctcacctctaggtccccatactcctatgatctgagtcagagccatgtcttctccctggaatgagttgaggccactgtgttccttccgcttggagctattttccaggcttctgctggggcctgggacaactgctcccacctcctgacacccttctcccactctcctaggcattctggacctctgggttgggatcaggggtaggaatggaaaggatggagcatcaacagcagggtgggcttgtggggcctgggaggggcaatcctcaaatgcggggtgggggcagcacaggagggcggcctccttctgagctcctgtcccctgctacacctattatcccagctgcctagattcagggaaagtgggacagcttgtaggggaggggctcctttccataaatccttgatgattgacaacacccatttttccttttgccgaccccaagagttttgggagttgtagttaatcatcaagagaatttggggcttccaagttgttcgggccaaggacctgagacctgaagggttgactttacccatttgggtgggagtgttgagcatctgtccccctttagatctctgaagccacaaataggatgcttgggaagactcctagctgtcctttttcctctccacacagtgctcaaggccagcttatagtcatatatatcacccagacataaaggaaaagacacattttttaggaaatgtttttaataaaagaaaattacaaaaaaaaattttaaagacccctaaccctttgtgtgctctccattctgctccttccccatcgttgcccccatttctgaggtgcactgggaggctccccttctatttggggcttgatgactttctttttgtagctggggctttgatgttccttccagtgtcatttctcatccacataccctgacctggccccctcagtgttgtcaccagatctgatttgtaacccactgagaggacagagagaaataagtgccctctcccaccctcttcctactggtctctctatgcctctctacagtctcgtctcttttaccctggcccctctcccttgggctctgatgaaaaattgctgactgtagctttggaagtttagctctgagaaccgtagatgatttcagttctaggaaaataaaacccgttgattactatattggattctgactgattctttgggggtgtattggttaactgaagacagaaagtggggtaatggaatgcaaatgatttccaggtcatctcagatttaggtagagggtgtcaacctcctccatttttaggcatttggaaatccaaacttcttgtgggcagagtcgtagaataaaccacaccattcattctactcctgcccagccactgtttaacgcacctgggaaagttttttttaaaaaagggtttgcacaagaagtggggtgtgggaggatgcgagtatcggccacagcccaagatggccatgaagtgggagtttggaggctggttgtataaacaatttgaccccaaagtgcaagtcaaataataggataaccctttctccttgctaatgctaggggtacctgccacccttagctggtgatggggtggtagggggagggggttggtagggtgaaattccgccagtactccctgagttaagtggaatgactggtttagatcatttctgtttccttccagatctgacattttgtaactagatcggctactagcattggaagggcccacgtttcatccctt

SEQ ID NO: 6703 - DNA, 1176 bp, Homo sapiens
ttggtctcccaaagtgctgggattacaggcgtgagccaccactgcccagccgggaagggacttttgcaacagtatgaatgtttcttttagacagaaccttgttcttgattttgggtagcattccaaaggaaggagagggttcttgtgttaagaggtcccttcaggacacggagagaggttgagtgatgagctggagagacctgggcttttggggaggaaggacgatgtgaggttaagagcatcgtatttgttgaagacacagagttgaggaaggctcgctctgtggaagagggcagtggagctgggttgggatggaagagaagaggaatgatacctcaccttgggagaagcagcccgcagaaaggcctgaagtagcaggagtcaagcccagattaggtggtctgagtggacggaggtaaggaagaaacaagggctggtaagattttaggctagagaacttatctgtaactgttgtttttggtgttgctagtacataaaatctcacttgtcatctttctttcctcctatcccacacctgggctcaccagggatccagtgaggggactggtttgtctgccttgcttccccaacctaaaaacctgactgtgaaagagactaacaggttgctcctgccccatgccttctcccgcaaaccctcggatggctcccctgatactaagccctccagactggcttctaagaccaagacttcctctcttgcccctgttgtgggcaccacaaccaccactccgtcgccctctgctatcaaggctgctgccaagagtgctgccctgcaggtgacaaagcagatcacgcaggaagaagacgacagtgatgaggaagtagcccccgaaaactttttctccctccctgaaaaggctgagccacctggagttgagccatacccttaccccatccccactgtccctgaagagctgcctccaggcacggaaccagagccggctttccaggacgatgcagccaatgccccccttgaattcaagatggcagcaggttcaagtggggccccttggatgcctaagcctggggacgactacagctacaatcagttttccacatatggcgatgccaatgccgctggtgcttattatcaggtgggtaggaggcacagagggcaggcgagggaatgttggaacatggtggtcaaggagagct

SEQ ID NO: 6704 - DNA, 1167 bp, Homo sapiens
gtgagtgtgtttggggtataaatgaaggcctggctgtgaggcttgtgagtgtgagtgtgtgtgggagcgtgtgtcgggctggtgctggggtagtttcagaggcggcagctgctaattggtggctggattgtagtcaagcattaagtgggtctgggaggtctgggctctgtgggggtggagggggagttctttggtgcccatggggccaggggtgggacaggagccagcacagggagaggcggtggtgcccccttccccctgcctgctgtctcgctccctagcttctcagtctctcccctgcaagttacaaggtgggggtgaccaggcatcctgcaggcaagggtgggcagggccaaggtgtgggcaaacccctccatgcggctgtgtctcctctctaggcccggctgtgctggctccagaggatgggctggccatgtccctgcatttcatgacattgggtggcagctccctgtcccccaccgagggcaaaggctctgggctccaaggccacatcatcgagaacccacaatacttcagtgatgcctgtgaggggctatgctgggtcaagggcagggacgagtgtgtgtgtgtgtgtgtgtgtgtgtgtgtgtgtgtagaagcccctaggcctgaacgatccctccctttctcccacccctccccagccctattccagccataggccctgtcatattcttctcaggctgagtccagcctggctcttagctgcatcccctgcccagagtcacagctagcccaaaccatgtcctctcggggcaggtgcagccccacactatgacatggggcttgctgaaggggtgcaggttgaattttagcccccatgcagtccctcgtctgggcagccttgtgcagcacacagccctgccaagacagtccccgctacaaccccagccctcccaagactggggctaccgtctgaccctgcaagccccctcaggtgttcaccacatcaagcgccgggacatcgtgctcaagtgggagctgggggagggcgcctttgggaaggtcttccttgctgagtgccacaacctcctgcctgagcaggacaagatgctggtggctgtcaaggtgagaccctgccccggggggtactgctggcctgggtcccacccccaggagctccatcacatcaggacagagtggggg

SEQ ID NO: 6705 - DNA, 1167 bp, Homo sapiens
aaggaggaggcttctgtgtaaatgcactttcttcctcccctctttctccataagaccccaggcagaggtgggtgcctcccctcccctctttgtcactttggtttcctataaatatgtatgtatcgtatgtgcatctttgctattgtaaataactttgaccttttttgttcctgttcctgaagtgctggaggcagttatggaaggagctgcttagggaagaggggtttcacttgtatctccttagttaacaacccagttccaggatcgagcctaaagcgggagccaggcctgagtgttcctgtccctgtgagtgggaaggtcttctggctccccatcccacctggctccagagcctgccctccacagcttgctgccaagctactccctccctccctggacttctcatcttcacaagatggggatcatgggggtttcttaccccacctatgtccccctcttccccaccctgtccctgtagaaaaccagtgaagcaggtacggagctgaggactgggccccaggaggtggggacaggggtctgaatgccgagtccctgaattcacccaggaccatccaaggggccaccgcagcattggccccatcaccacgtcctcacccaactctccctgatgaatagaatatacacactgtgctaggtgtatatatacatatatatatatataaatatatatataatatataaaatatagatatggaaatgactgttctgctgttaagataatgtatactcttttattttcttcctttcatggttaagattttttttttaagaaaagttaaatatccttcagtggtggtgtgtgtgtttcttggaatcgctgtgataaaaggtacggtgtttgttccctgtaagactggttaggattggatagtgggaaccagagggagccctctcacccccagacccagatcttgcctgttccctcccagagcttcagctgtgcactcactgaactagggactgggcaaacttaagttgtacaacccccatggagaaaacatgacaagacactgaactcagttacacacacacagatatatatatagatacatatatatacacacatatatagatatacacacacacacacatatatatacacatatatgtgtatataaaggagcagtggacccagagtcaagaggt

SEQ ID NO: 6706 - DNA, 1149 bp, Homo sapiens
ttataaatatgaatctattgaaatttccttaatcaagagcttcttcgtgtaaagtttgcttttttagctatagaaaaagaaaacagtaaatatctcttaatggcatccagccttgctgagctcaccttttttcctgaagaatgggtaggagtgaaatatttaatgtaaacatttcaccaagtccctttaccctaattttgaagctgcattaaacccaactcactaacacagggaatgattgcaccctagtcctctgtgggccaagaaactttcagaagcattaaaaaaatagttgaagtatatcacttctcaccaagtgggtagagtcagttggctgtttgtcccttgttttttatttattccataattatgtttgtgctttttgttttgtaaacagtaatggaacgtacatttttattttgtttagaagacaactttgattcaatctttcaagaactgttccattcttggtttcttcttagggggataaaaagttaccagttaatttgttttgagatatttaagcattctttgagttatagaattgtgatgcagggatttgtgaatgagacatttacatgtgaaaggtgacttcactagttacctgcttgagcagagtaaagtgtgtatatgtacataaaatgtaagtaatcttaactccattgtgcagtgccttttagatgttccgctttctataaagtcttcaaatttttgcatatatattatatatatatgatgtaatgttatagaaatatatgtataatatacatattttttccaggggtatctgatagctctgtattttgttatggaagttgaaagaaaaaagtattttacctcagaaattaaataaaaaaatacttttaagtaatgtttgctgagagttggttttgttgttcatcatacactgtgctggggtggtcatgccagagaatttgccaagtccgtcctcgctcccccaccctcatgcattgttattcctattgtacaggtaccaacatagtaaggaaataggtctcttaacagttctggagattttccattttcttgagtgaatggctgctaccagttaaaactaactgaagccagagacgcaagttaggtggaaatttctatctcaagattattgtgaagattctttaagagtac

SEQ ID NO: 6707 - DNA, 1165 bp, Homo sapiens
ccaaggattatgatttccaggaacaaaggcagtttatataaagcacacttcccccaaatcgaatctcccaacctcttgtgtccagttccgtactctccaccccccactcccacccaacagagctgatttctaaattaactttgtccttgtaatcagcttagctgagttttttttattattattatttttcctcctccttcctgaattctcccaggaacagcccggggccttgctcgctccattacccagcattgtcaagccatgagttgcttttaactgcttcttcccattcgattcgcttaactgggaggttattaaaaggaaaggagcagagatgggcaggcagggcagaggaggagagaacatagtagagagagaaggcatttcaaaggagcagaaacccaaggctaggcaggctggcagaatgaagcctctgagagaagttgaagttttcatctctactcctgagtcatccagaaggacatttcatcgagacagtgggactcctgggttttaatccaaaaccttgaggaattgacttgctcctctttgtctcagtcctccccaccactccccactctccctggaaatctaccagcttgacactgtgggatgggatgggggactcccagaggtcccacactccccttgatgcctgaccctcccacacacacacactcgtggctggctgtgctgccagcgccagaaccctccagcattcacccccggggcagctacattgtggttgatgttggatcccagactgacgtgcctatcacacagcacacatctgggaagtctcccttcaccaggcagtgggcgaagtgagaatgcaaactcattttaatgtcagtttgagccaaatataattagaaaggaaaatctctgactttgaaaaaaaaaaaaaatctaatgcatttcaaagccaagttgaaatgacttctggattatctgcaccgctgccactctccatttatgcagaaaatcgagaggggagcctgtaaagtctgtgcctgagggatttagtttgcacacattgcctttggtttcatgccagggtcatgttttaagactggcctttttcaacacaacccggttcctggaattgggaagcacctagagtgacctcctcaccagggggcctgtggcagagtcagcctctttc

SEQ ID NO: 6708 - DNA, 1187 bp, Homo sapiens
gttgttaagctcctgcactagactataatgctacttgtggatagggactatgatttgtttatatctgtaacttccgtctcttgcctcttttccccagcatagagcagaatgactgccatacagtaaatcaaaaaaaaaaaaaaaaaaaaaagccgttgagtgaatatcccagttatttgagtgtggattatccacttggtagatccctataattaatgtttaactcaaagtctagtttctcttccagctcagctcctggtactatcacgtaatatgtgctcagagaatgcaaacagtttttaaatattatcttcagtacgacataattaggtgctgctaaaaattcattatcatgctttccaaagccaaaaagaaataacttttgtattatccactccactgctcttcctcagtggtgtggataactgagacataaacgttttcatcataattgatgatgggaccaccttacagggccgctggatttattgggtgccaggaggaagaagcagtggcccatatcttctgtaattctttcttctccagttgctaagctccttggatttgcacagagcacttagagttgatggtcccaccctcagcagcaacctaaaaatggccaatgtgggctggcattgaggaagtatctcgaccaaaacctcaaaaattcacagtaaaaaatgccgtatcctagggctcttaatttttttcttggtggaatcataaaatccttttggttgttcttcagacctatttgtccctcttttgttatcagaattattttctggtgacccggagagattctttcactgcactatattgcagattctccaccaaaaaagcagaactcagctggctgcatgatgccaaaatgactccttgctttggctaattcagtcagctggtgaaagtatcgtggtattatggaaggagccctgtttgaggcattaccctcatcttagtttcattcctgattctgctactaataagctgtgtgactttgaacaggttgcttaacctctctgggctttggtaatcataatccctaacatgtggaagttgggctaggtaaaagcagaggctctttttagctataactctatgtgtaagtctgtaattgaggttaagaagaaatgtgcatatacatgacttttgactgaatactatttactttctataacaggtta

SEQ ID NO: 6709 - DNA, 1177 bp, Homo sapiens
gaagacagagaaggctggaagcaggattcctgagctcttcctcagctctgggaagcagaggaaaccaaggaaaactgttggagccctgagtagataggtgaacattcggcagtcacagtggtattatggatggcacagtggtgaaagatgtcggaacacgggtggcagattggagagtttggagacagctgacctcaaagaagagcgaggggccaagcatcatagtcaggtgggctgaaggacagggatcgacagacaaccaagaccaggggcaaactcctgccccagctgcagggatgagacatgaccatgatctccattctgatggagctggagcacagaccaaaatccaaccacaatgcagaccttcctctctaatccaaccttgacttaaacctaacactgtccccaggctcagtcaaaacttagccctgtacacaagccaaggttgcctctgtggctgtggcctagcctttagccagcactgagcttagctcccagtataactccagcctcacccctccacctttccttccccatcgaaagaggtgttacctgtgggcatcatagctggggccaccatcggcgcgagcatcctgctcatcttcttcttcatcgccttggtattcttcctctaccggcgccgcaaaggcagtgagtatgggccctgtgcagcccacagccttcccctggctcttccagggccatgacaggcagtgcttggggtggatgggaggttggcccttgagctccagcccagagggagccagaagcagccgctgcagagaccagcaggaagcacttgttccaggctgcctctcccgtcccaggtcgcaaagacgtgaccctgaggaagctggatatcaaggtggagacagtgaaccgagagccacttacgatgcattctgaccgggaggatgacaccgccagcgtctccacagcaacccgggtcatgaaggccatctactcggtgagggtcctgctcctctctggcctcctgccttctccaccctctgaggaccagctccatcccagatctctaataaccgcggtcattctctccttcctcagtcggtcttccctggtcctgccacacacactctcccacactcacacacattctctcacacacgccccaggctagtttcctccagcagaggataggcagctgggattg

SEQ ID NO: 6710 - DNA, 1090 bp, Homo sapiens
agggctggagagctggctgggggggttctctcctgttcaaagaagctttcaccatgggcttcattatcttgtcagaagtgaattagtttccaccagggacccctttatcccaaacagcaacacaaaatacaccctaaacctcagagtaaaattgatgtggggctatcctttggctatcgggtcatctgtgctgctccccactcatttctgatgggtttgcaaaggtgccttttgccagggcaggacatagtatgcacatagggatattgttatgtgcctaggtttcaggcactccttctgtaggggaaaatgggaggagccttcctccaccctgatccttaggaacattcctctggcccagggacagcttgttcttctcaccaaacaggtgaagcctgcagtccaaggtgcctggagccagaggtcggggagtaagcacagctgcccctgcctgagaaggagcagcttgcaaggggagccggtggagggaaaggggtacaacagctttggaatacattctggatcttgaggaggatcttgtgattttggctgagccacggtcacttccctcgtgaaggacccgccctatatcctaaattctggatccctcaaagtccagccacagagtttgcatgaagcaaaaagcctagtaagtgagaaaggaaaggggccagggatgggagcagtgctgtgctgttatcactgtcttgcttggaatgaaaacatctgagcaccctgtcttcaagcggtacgctctccccttattccagcagggctactttcctcttcactctgatgaggggagctttatctgctttcaaaatggagcacgtcgcactggagtttcgtgccctctcgttaacctgtcaggagccacagggctccataaaacggaatcagtgtctcaatatacatgacctatgttcatagcaatgttcagccatttgggtttgaagaaaaccacattaaagccaagacccgtttggagcgaactgccttgttctttgctgtgtggaaggttctgtccctactgctgaactccagttcctccccaagcaccctggcctcagaaatcctggcttccccaagt

SEQ ID NO: 6711 - DNA, 1221 bp, Homo sapiens
tgccggggtctgggcttgggaattggctggcacccagcggaaagggacgtgagctgagcggcgggggagaagagtgcgcaggtcagagggcggcgcgcagcggcgctccgcgaggtccccacgccgggcgatatggggtgcctgctgtttctgctgctctgggcgctcctccaggcttggggaagcgctgaaggtgggtggaacgagggcgcttgagtgcactcgcgggagggcggagagagggagctgggtagggacggggagggcaacgcctgatggggactggtgagacccgggacgcactggcgcgatctaggtagaaaactcgctgctccctggctccggggagaggcagcgcggcacagagttcgctggcatcagccgcctcctgaagctcatctcctcttgtttctttcttccttctctttatgctggctgctctcccggccacttgctacacgcctccaatcttcattctctcccagtcccgcaaaggcttttccccctccgctgcctccagatctcgtccttcgccaatagcagctggacgcgcaccgacggcttggcgtggctgggggagctgcagacgcacagctggagcaacgactcggacaccgtccgctctctgaagccttggtcccagggcacgttcagcgaccagcagtgggagacgctgcagcatatatttcgggtttatcgaagcagcttcaccagggacgtgaaggaattcgccaaaatgctacgcttatcctgtgagctgagggataggatcctgggccggtacccaaggggagagaatggccacagaaactcaactgggagactgtggcaccacctgatgagattctctgctctgtccaccctcttctgatttcccttctacctggagatgtcccaggctttgactcctcaaagtgtccctcgttcctgcctactccaggtcacttactttcctttccctgaagtctgggtccccattataacctgcacatcaatttcttctctttcatctctcccagtcttttaaacccttctttgatctttctccattcctctccacagatcccttggagctccaggtgtccgctggctgtgaggtgcaccctgggaacgcctcaaataacttcttccatgtagcatttcaaggaaaagatatcctgagtttccaaggaacttcttgggagccaacccaagaggccccactttgggtaaacttggcca

SEQ ID NO: 6712 - DNA, 1263 bp, Homo sapiens
ggttacagatgggcaccaaccgcggggcgtctcaggcaggcatgactggctacgggatgccacgccagatcctctgatcccaccccaggccttgcccctgccctcccacgaatggttaatatatatgtagatatatattttagcagtgacattcccagagagccccagagctctcaagctcctttctgtcagggtggggggttcagcctgtcctgtcacctctgaggtgcctgctggcatcctctcccccatgcttactaatacattcccttccccatagccatcaaaactggaccaactggcctcttcctttcccctgggaccaaaatttaggggcctcagtccctcaccgccatgccctggcctattctgtctctccttcttccccctggcctgttctgtctctgagctctgtgtcctccgttcattccatggctgggagtcactgatgctgcctctgccttctgatgctggactggccttgcttctacaagtatgcttctcccacagctgtggctgcaggaacttaatttatagggaggagcctgtggcagctgctgccccagccacagctgcactgactgtgctcaccacacatctggggcagccttccctggcaggggccctcgtggcttctcattttccattcccttcactgtggctaaggggtggggtgaggggatggagagggagggctgcctaccatggtctggggcttgaggaagatgagtttgttgatttaaataaagaatttgtcatttttgaatggactctggctgtgtctggggccactgtgccactgtggggaagggaggaatactgggcaaagtgcagtgagtgatacaggaaggagggcagagatgagaggttgcagtgctaacccctgtcttgagtttcctccccatcctcattctcacttgctttggggggtggtgtaggttggaattgagaggggacaggacctcacagctgaatgcagactatgtaggcagtgtccacagggaagtaaggccctttctagtcaatggaattggctaatcctgcctgctgcctttggctgggtctgcctctacagttggaacagcttctcagtcactgagagggtggggctggctgctggcacagccatcagtcctggcaagtgaagctgtctccaggtgagaggtccctcaggcgggcttggggtgaggtggtctgtgttggagtggtgagggtgggggttgcagtggtgaggaaacgtggagagctggggaatgagcagga

SEQ ID NO: 6713 - DNA, 1192 bp, Homo sapiens
ttttcttctagaatttaagtcaaccaagtgttatctatgttgtaaaaatggataatagtagattttaggtgataaaacaacttgttagtaagacatttcctagcttaaaaaaaaaaatcaaaaattccatgatagaaatgcagacctgtgagggaaactcctgaaaagcataagaagcatcccagagagccatgggttttctagaccagagaatttagagggagattgtggaactgaggcttaggtggtcagatcgtttcccttatcactgtaatatttctgggggaaaaatgctttctgagttgtttaaacaagcatccttacatttttttttttaattaaacagcctgtctaggcttgggattccctaatactacagtagcagtatatgaatatgattttgtgattgtgttttttaaaagataagtaatttgatgaactgttcttttgcagtcagaaaacactcacaaaaagacaaaaaaagttccacagtattatatttcatgtcagttcaggcctaaaatcctttgcaaataagatgtttataggctggtcacaattaacaatgttattattggcagcacttcttggatggataccttttgggacctttcattagaaagagggaaagaatggggtggttttgtatgggctcctgtttggggtaaaaatagcagagtcagttgctgaggacaatgaccttccttataacatttagtttcatacccatattaggtcttgtcttgaggaccctttatatgtgcttgtttactagtggccttccagccatagcattcttacctttttttcctattctaagaattaaaaaaaaaaattatagagccagcaagggaggaggcaggaaacagaaatcgaatttcatcattccagtatagttgtccctttttttgtatttctgacttggttttataattatatttacttactaattattgttttttaacattctttattgtggcttactcttcatacttagaattgaaattgttggacatcacatgtatattcacattataaatacatcattcttccactgttagacctttagattgcttccagtttttaatattctaaataagactttcaacattttctgtgttttagctcattctcttaggacattcttagaagttagaaacatttctgctgggatcgttggagggaacttcaa

SEQ ID NO: 6714 - DNA, 1113 bp, Homo sapiens
tccaggaccggaccctgcacgtgaggtatacggacatcgactaccaggtcttcaccgacgccgcgcgcttcgtcacggaggggcgctcgccttacctgagagccacgtaccgttacaccccgctgctgggttggctcctcactcccaacatctacctcagcgagctctttggaaagtttctcttcatcagctgcgacctcctcaccgctttcctcttataccgcctgctgctgctgaaggggctggggcgccgccaggcttgtggctactgtgtcttttggcttcttaaccccctgcctatggcagtatccagccgcggtaatgcggactctattgtcgcctccctggtcctgatggtcctctacttgataaagaaaagactcgtcgcgtgtgcagctgtattctatggtttcgcggtgcatatgaagatatatccagtgacttacatccttcccataaccctccacctgcttccagatcgcgacaatgacaaaagcctccgtcaattccggtacactttccaggcttgtttgtacgagctcctgaaaaggctgtgtaatcgggctgtgctgctgtttgtagcagttgctggactcacgttttttgccctgagctttggtttttactatgagtacggctgggaatttttggaacacacctacttttatcacctgactaggcgggatatccgtcacaacttttctccgtacttctacatgctgtatttgactgcagagagcaagtggagtttttccctgggaattgctgcattcctgccacagctcatcttgctttcagctgtgtctttcgcctattacagagacctcgttttttgttgttttcttcatacgtccatttttgtgacttttaacaaagtctgcacctcccagtactttctttggtacctctgcttactgcctcttgtgatgccactagtcagaatgccttggaaaagagctgtagttctcctaatgttatggtttatagggcaggccatgtggctggctcctgcctatgttctagagtttcaaggaaagaacacctttctgtttatttggttagctggtttgttctttcttcttatcaattgttccatcctgattcaaattattt

SEQ ID NO: 6715 - DNA, 2500 bp, Homo sapiens
tgcagccatacccattctgtgtattgtctgtggcggccttcacgctacaatgagttgaatagttgcaataaagaccatatagaccacaagtctaaagtatttactctctggccctttaagaaaaattctgctgatctctggcctaaagcatctaaattctggctaagacctaacaggcttgtccttgttccatccagggaagttactaacaagcctttcccatccacagcgctggcgagaacctggggttggggccacagacgcggactctgatgagtctcccagctcctcagacacatcggacgaggaggagggccctgaccgggtgcagtgcatgccatcttgaggcctcatacctaggtggggcaggctggggctgccaacctgatcctgcctgggcaaccctttcctgtcccaggccctacattcagcagaaacgcactttggactttttgctttagataaaagaaagacatcccaggagaaggacaaaccagaggagtgaaccaacaaagagtacctaggaatgggagttgagccctggaatggggctctatggagaggtgcataggactcggcagaaatggcctctccccaaagcctctttttgagaggagagggaagcctattttgttaactggtttgggatagggaatggggtttctttttctttaatctcccttgtttcttgggctgggggaggggtggggggaacaactggctattcagtaccaaggggccagagtggagggtaggagtgccactctctctttggtttaggtttttgaccttttcttcctttgttttttaaaagtttatgacagttggctccccccccacccccagcaaccccatcccagaatcctattttcctgggaagtccttaaagcccctaaccatcccacactcttcactttcctttccaccttattcattctctgtacttaccacagtattttgcacttgattacatatccttcactctcttctcttcatcccatcaccccctaaataggtcaggtgagggaggctgggaagaggtgggaggaggggcagaagtgaaggaagaataggaaggatattacctcttctgttatttttttaagaaacattgtttggtggcagcaatctccctgtccctatcactgttagaggcctaattttatatctataaatatattaaaaagcaagtcaaacttggatgtatcaaggtaaaattattgtcaaagtttaaatacctatatattctctgaatgcaataaagggacttaagagtgaacaagagtaatggtgtggaagtgacacctggggtcagtttacctctgtgtatggtcactagagattgggacttaccctttaggttttaggaggcttgagaatggaaggatcctcatttctgcccttcctggttccctgctttggtgtaggggttgggaaaaacaggaaattcctctcagctctgcctcagatctcctacctctccttaagtcttgtagggggttccaaggatggctcttctaaccagaggctggcctgtctttaaaacttaactactttagggtggtgccaccactgcagactattgtggtactttgtgacagaagacatgtacacacacaccacacacatacatacacactctctcactctgtctctcttacctttagctgcttgatcattaagccatccaacttcatgccagttcccttctttatagaagagtgaagggaaagacttcctgggtttgacttaaaccttgtccacctcttgatattttaggattgaggaataagtcattaatctaaggactgattacagtggctggagcttgggcacttgtcttatcactggtcactgagtctgaaagtcccagctgaattcttgcccttaagtgcttttgctgctatttttttgcccccagttccacaagatccaaccaagaattctgtatcctgggacagtcagattcttctaaatcaggccaggaaggaggggaaaagagtgagagaatggtattcccagatacttcttcctcctgccccttttcccagcagctctgagaccagatgttggctgctgtacttactccctgaggtagggaatgtgtggtgatcgagtggtctgtgttcctattgctggtggggtgatagggtgggctaaaaaccatgcactctggaatttgttgtattttctcccagtaaagcttttcttctcccgactgctgctctgtgtggtatgtggtccatttattcacaatggatggtttttgttcctactaatgtaggtacctagccttcccctctcattctgcacatgatacagtgttagaaagtccattttgggagacccgtatttccagtgcttgggctccaattggagactgttggaagtaggatacactccatttagctcagtgatacttaggagattgggtggggtgagggtatacacttggggtattttcccagcccttattctgggccataaatattgttccccc

SEQ ID NO: 6716 - DNA, 1183 bp, Homo sapiens
tacaggcatgagccaccatacctggccataagttacattttaatggaatctgagcaatagtctctgaccttaaggtcttttttagcctactgtttctgggattcttcttccacgtctctccttgttcccaggtgatagggaagatatatttataaataaagggtaggaaggtatctgtagtattgtctgattaataactggctgttactgtgttggactgcagctaaactgaggcttcctaaagaatggtacattcatatacctttagtttatacttcttaaggaacactagaaagtgacttcactacatatttttttccccaatccccaaagtcccatataataaatgtatgtgcttttttcctgttgttacgtacaaaacaaacagagaaaacacaacaattctttctttccaaatgagaatctctttggtttcttattagccatgtgactctcttggctctcctttgccatgaccatttggatcttttggagtatataactttctgtgcttttctactcttaaaggaaactggtggtgacaaaagagaaagagaagaaagtggggctgtatacgatctatgtgaatcctgccaatacccaccagtttgcagtgggtggacgagatcagtttgtaaggtgagtttgtggctcttttgtgtctttgacagtttgtaagactgatgcattgtatactaccaggtgctcctttatggagagttacgaattttataggaatccattaactattatcttgaattttttaccgttttccaaaaatcttacacgcctttggagatgttctgttctctaatgtaacagtctctgaggggtgactttacatattttagagattatcaagttttaaagaagttagatgatggtcaggtgtagtggctcacacctgtaatctcgacactttgggaggtgaggcgggtggatcacctaaggacaggagtttgggaccagcctggccaacatggcaaaactctgtctctaaaaaaaaaaatacaaaaattagccaggcatggtggtacatgcgtgtagtcccagctgctcaagaggctgaggcaggaggatcacttgagctcaggagtcagaggttgcaatgagccaagattgtgccactgcactccagcctgaatgacagagcgagactctgtctcaaaaaagaaaagaaaag

SEQ ID NO: 6717 - DNA, 1222 bp, Homo sapiens
caatgttttgcctcttgagaacttaatataatcttagattgtcctgagattctttgcttttgttgaagtattttatgtgtgtggatttgatcttaatcttttcaatttcttgtcctttacaagatttcccctcagagggtactctctgtaattatttgtaatgaaaacacttggaccaaagttcattttttggtcttttgatgtgaagatttcttagactaaggtggtcactatcctgttttcttatttttccctctcctctactccttcctcactaacatgcaggaagcctgtctagcagtccagaggagatgtctggagctgaagaggggagggagacatcctcaggcattgaagtggaggcctcagacctgagtttgagcttgactggggatgatggtggccccaaccgcaccagcacagaaagtcgaggcacagacacagagagctcaggtgaagataaggactctgacagcatggaggacactggtcattactccattaatgatgaaaatcgagtccatgaccgctcagaggaagaggaagaggaggaagaagaggaggaagaagagcagcctcggcgccgtgtacagcgcaagcgggctaaccgtgaccaggactcatcagatgatgagcgggccctagaggactgggtgtcctcagaaacatcagctctaccccgacctcgctggcaagccctccctgcccttcgggagcgggagctgggttcaagtgcccgctttgtctatgaggcctgtggggcaagagtctttgtgcagcgtttccgcctgcagcatgggcttgagggccatactggttgtgtcaataccctgcactttaaccagcgcggcacctggctggccagtggcagcgatgacctgaaggtggtggtgtgggattgggtacggcggcagccagtactggactttgagagtggccacaaaagtaatgtgttccaggtgaggcaagggagcataatagcaactgagagaatcaggcatgagttagagaaatctgaactgcagcatggattgggagctgatagtgagttattgtaggaattacatatcgggacatggccctactttggctcccctaatgacctaaatacactgaaagactcttggcaaccctagattccttgagcatgtggactgttggaagcctcataggtagggtgcatgcagcttattaaatgtgtgctggtaggaggcagtgtagt

SEQ ID NO: 6718 - DNA, 1607 bp, Homo sapiens
cttattttctagctacaagatttaggccatcctccaaaagagctggctggagagatggtgagtatgtcttatttttccagattttaatttgagtccccaatttccagaattctttaacctctcaggattccacctaaggtgaaaattgtggctactggggatggatcttcacgtctgtcctaaaaaatgagcaactatctgagtcccttcatctcttccccagcctcctggcctcaactttgacctggatgccctcaatctttcgggcccaccaggtgccagtggtgaacagtgtctgatcatgtgaaacacaacacgttttcctctctgagtcccagctatggggaacatctggagtcagcagaaccattgggacctgaggcaggagtgtcacctgcgggagaagtctgcccgctgccctctgtcatcccattcaagattgtgccataccagctgaggtttttcctctgtctctctaggaatagggtctgtttcacaggccatttctgtgaaccctactccattgtggtttctgccactatcaaagttccagctacctgcaaggtgaaggaaggcatcccttttggggcatgcactttctttcctttctcaaaataatgttatatgtggccacactgatgttcacctttacgtccagggtctttgtgccttgtctctactccctctcttggatctggggaggaggggcagagacctgggactctgtatttctatagttctcctggcagagcctttgagaatggggagaaacagcctgggctggggctacaggtctgtcactatgctctcttgccttcagacagaccattctgaattctctaaagggaaagggcttttgcatctaatcacaatagagttgaaagagaggccttaggattctcctctctctaggtgctgagccctcacctccctgttccaggctgagaactcaaatggttaccctgcttcttcctacaatgctgtgtgatatgggtgaacccagcccctgaccttcctctatcccctgcccatcctcccttttacctcctctcttttttaaacacctgtttatcccaacctttttgagctcaagctgtgataaagaagggcccatcctatttcccctcatctagtccatttacgattctcactgactccccgtcttcctggcagacacaaataaacccagtgtcaggtctaggaaattaatggctattcttccccagatacattctggcttatttgagatacatgattctcttagaatcctgtcccttggttcaggaaagtagcttggaaaaggagtaggggtatagcttgggtcccttttcctgcaaggccccatggggcagaatataataaatattctgagtgaggagtgtggtctttttctgatcttcctcagcttccgtaagttgcagagtgaggtatattaggagactagttctacacaatattgtaatgctgggttccatcaacacccaccttccacaactcagtctgcacctcagttggcaaaggagactggatggccatctttcctcatgttcccttgagtatttcaatgtagaaagcccttcaagtggtattatattttaaccttttac

SEQ ID NO: 6719 - DNA, 1178 bp, Homo sapiens
ttaagagccagtttttggtagcaggaaggccagttccttccatctgtcttctattccctccctctgtgaaagctactgcaagttagcataacatatataccacaaaaataaataatacacaaaaataaatagtaagtaggcagaagcttggcacctgtttttgaaaggatttaacctgcctacagaaaaggccgtatctcagacttgctggactataaccagttccgttctgttccttccctctgtagggaagggaggagcactggctgctgacattgacattgacactgttggtacagagggctggggagaggatgcagagctgcagttggatgaaggtaaaagtgctgttttaagactgttctggggtgatggacaccttggattgggactgggttgtgggtagctctgcagacttccaggccatgaaacgaactaggattgattttacttcctttggctaagattatgccactgcccaaatctgttttgagcttgaattttccttacagatgggtttgtggaggctacagaaggtttgggggatgatgctcttggcaagggacaggaagaaggaggtggctgggatgtagaagaagatctggagctccctcctgagctggtatgtggaatttgtacccttagaaggttctctccgtatctccctgtggaagccagaggccttattgtcccctaccactatcctcaggtctcctatcctatcccctaccactatcctaaggtcagcccttctgggaaggggactagaccctcctagtctgatgcttatctcccatttgaaagaaggaagatggctgggcacggtgactcatgcctgtaatcccagcactttgggaggctaaggcaggacaattgcttgagcccaggagttcaagaccagcctgggcaccatagcaagaccctgtctctattttaaaaagtaaaagaagcaggaagaacgagagagtcaaagttagtggccttgtcacttccatctatcctgatatgctccaagaggagaggatgtaggacttatctctaatctgatgcttaactcccatttgaaagaaagaagaatgaggtaatcagcgttctgccagcagcagcttatgagaaggtagcaagctgtttcatctgaattggagtttttgatatgtcattttgtcactggtgaggtg

SEQ ID NO: 6720 - DNA, 1173 bp, Homo sapiens
aaagtcaaactctcaaaagtcaaggacaaagaaaggatcctaaaatacacaacagaaaagaagcaaagaacacacaaaggagctccaatttgtctggcaatagatgtttcaatgcaaaccatacaggccaagagagagaggaatgacattttccaagtgctcaaagaaaaaacctgacatctaagaatactgtacccagcaagattattttattttccaaatatgaaggatagtatttcccatacaaacaaaaggtgagaatttaccaccaccagatccatcttacagtaagtgttaaaagtagttcttcgatctgaaagaaaaaaacactaatgtggtagcggaagttactgcagctgcggtgttgtgctgtggggaagggagaaggatttgtaaaccccggagtgaggttctgcttacccgaggccgctgctgtgcggagacccccgggtgaagccactgtcatcatgtctgaccaggaggcaaaaccttcaactgaggacttgggggataagaaggaaggtgaatatattaaactcaaagtcattggacaggatagcagtgagattcacttcaaagtgaaaatgacaacacatctcaagaaactcaaagaatcatactgtcaaagacagggcgttccaatgaattcattcaggtttctctttgagggtcagagaattgctgataatcatactccaaaagaactgggaatggaggaagaagatgtgattgaagtttatcaggaacaaatggggggtcattcaacagtttagatattctttttattttttttcttttccctcaatcctttctcatttttaaaaatagttcttttgtaatgtggtgttaaaaacggaattgaaaactggcaccccatctctttgaaacatctggtaatctgaattctagtgctcattattcattattgtttattttcattgtgctgatttttggtgatcaagcctcagtccccttcatattaccctctcctttttaaaaattacgtgtgcacagagagcccacctttttcaggacattgcattttcaggcttgtggtgataaataagattgaccaatgcaagcgttcataataacttgcgaattggccctgatgttctagcatgtgattacttcactcctggactgtgactttcagtgggagatggaagtgtt

SEQ ID NO: 6721 - DNA, 1150 bp, Homo sapiens
ctgattccaagtaacttaattgtatcctagagcaaagcccaagaatatgtaaaggaatatgacaaaaatctagtaccaaacataaaattcacgatgtctggcatccagtaaaaaatcatcaagcatgtcgaatgaatgaacctaggattaaccttgatgtttctttttcttatcagaattgacagaaggtgacatcatggggcttagttagctcattgtatcattttctatttttttcagggctcagctttcaccccaaaagaccttggatcctgactagtttacataatggggtcatccagttatgggactatcggatgtgcactctcattgacaagtttgatgaacatgatggtgagatatttctaggaggaagttaaaggagtataagtatttataatatcctggggtattttaagccttgtttgacatggattcctctatgattaaagaatgtggaaatgatagaactgaaaaatcctgaataggaatcaccttagagattagaaaggatagctctgtctaacatacattgcctgccttctccaccaggtccagtgcgaggcattgacttccataagcagcagccactgttcgtctctggaggagatgactataagattaaggtacagagggtctgtcataactgagaataaaggaaagaggatgtgggaaggtttgggaatcatgaaaggaactgaaagacaggaaatttcattcatacagagctcaggcctttgacaacattatccggagaacttactcagcaaacatttattgaatgcttactgtgtaccagacactgttttctttttagggaattcaaaaataaataagaaatggcttctgttttcaaggagcttttattctaatacagaagataaacatatatccaagtaatagcatgtacagtttggtaagcaatataatagagagatattcacagtgaaataggaaagagcagtataggtgcaaagacaaaaagcatgacacagctagatacagggcagctgttattggttttgtatggagaaaacctggagaaatggtgagagaaggggcagaagatgagaggggccagatcatggagtacctgtttgtggcgctcaggagtttagatgttatcatgcagataactaggagccatttg

SEQ ID NO: 6722 - DNA, 1602 bp, Homo sapiens
acagatagtttgagtaggtgttcattctggagagcccctgtggatcccagaactctttcacagcttcaactcccggctggcattccccatctggcacagctgggatgagtcagtctaatgtaccgagctcctgtcacaagtcagtaatgtaagtgccgcaagggaaccaaagccatgggccctcctttcaaaatgcctaaaatctaagtaatacaagatggaagcaagaacagagatgctttacttctcttttcaaatggggagacaaagtctgtaggctggagagatgttgcccatgattattccatagttggtgcttagagccagcatccgaattcccatggctccaaaccccaaacagttatccaaaaaactgcactgagttctgagaatgcctttgtcctttcctgccctccctccccctgcagttgatcaccctgacagtgggcttcggcatcctcatcttctccctcatcgtcacctactgcatcaatgccaaagctgatgtccttttcattgctccccgggagccaggagctgtgtcatactgaggaggaccccagcttttcttgccagctcagcagttcacttcctagagcatctgtcccactgggacacaaccactaatttgtcactggaacctccctgggcctgtctcagattgggattaacataaaagagtggaactatccaaaagagacagggagaaataaataaattgcctcccttcctccgctcccctttcccatcaccccttccccatttcctcttccttctctactcatgccagattttgggattacaaatagaagcttcttgctcctgtttaactccctagttacccaccctaatttgcccttcaggacccttctactttttccttcctgccctgtacctctctctgctcctcacccccacccctgtacccagccaccttcctgactgggaaggacataaaaggtttaatgtcagggtcaaactacattgagcccctgaggacaggggcatctctgggctgagcctactgtctccttcccactgtcctttctccaggccctcagatggcacattagggtgggcgtgctgcgggtgggtatcccacctccagcccacagtgctcagttgtactttttattaagctgtaatatctatttttgtttttgtctttttcctttattctttttgtaaatatatatataatgagtttcattaaaatagattatcccacacgacttgtactgctagttattcttcccaggccaccttgttcagcgagcctagactggaagtcatgaagttatcttttatgctatcatcttgggctccagaggacccaaggagtaaggctctgtcaaaaacagttgaagtcctttcaaattgcagagccctggttctcctcttgtaagaacaatgttaacatagtttcttctcactttgtaatgaacgggcatttttttttttttttttttttttttttttttttgagatggagtcttgctctgtcacccaggctggagtgcagtggcgcgatctcggctcactgcaagctccacctcccgggttcacgccattctcttgcctcagcttcccaagtagctggga

SEQ ID NO: 6723 - DNA, 3411 bp, Homo sapiens
taccccatgtgaacctggagagaccatcctgctgtcaacagtacctgggaaggactcccacctcaccaacaacttttgtattactctaggccctgcaggaatcagtgcctctctccctcttctttccctagtcttttcccagattacagtctctcctgaaagggcacagggccctgctgattgtactttcccctcctgagccccgactcacaaatccaagttcttaaaacatttctcttcagtggcccaacagggtttctctggggcacatggacatgactccagagagccacagtgccaaactcctccagggcagcaactggccctcctgtccctcaccccagccacaacaaaccctgggttctagggcagggatactcctgccacacagcccgagttagaaatctccttgctaggagcatttgcttccacatatatttagagcaaagaaggatcccatccttttcccagaaatctccacctaatgtttttggtttgtatggtcacgtgaccataggcaaccacgtggaaaccctctgtgaccacttttccagggacttaggggaaggtacctttcttccaatgtgtcttcctaggcagcccctgaggaggagggctgaatagatccctgaggttttggagagacccccatcactgactcctgctccctaaccctaccctcactttcgtccccgctcttcccagtgaaggatggtatgtagactcctgtacagacatagtggcttgcagaccctgacccagcccctgtggtcttagacaaatgtttttatttttgtcaccagccacccctgtcctgccgccttctctcgactccagagacctgttgcctcatctcttttggggaagagccggcagctcctcctcatcccctgccttaagtccagttctttgcctcaggggtctcgtttccttggccttccagggtccccaccccttttctccctgcctgattctctgagctctgggctccgtctgtattgggttgaggggcaaggattactgccttttgtaggtacttcacccctcaccccattttagcttccatagtctttgcaccaaatccaaattcttgataatttagatctcattttgagcaaaatttgctggccctctaataaatattttcaatataaatctgagcctttgactcagacatttttgccaaggagagtagaattaggaagtacccatatacatccagccaggatccacatggaggacctttctgatggctgcaatgactaggccattcctctgagtaactcacagtgtccttttgtaggcccttcttttccctgaaagactggttggtacttaccttgcagagcacatcctgggataagatccccagtgtctcccctgggaggctccccctctgtgtagcaccagccctgggaatgatggagcctagtgatcggggtttctcctgctgtcctttctgcaaaagttcacttgtttacccaccgcatgctagagaggagctcattggccaatgcttaccttgtccccaaaggggtgggttgtggagctcacttaggcagggcctctggctggggccagggttatgagataggcctgtatgaaatatgtcctgttctgggggtctgtctcttttcttctcttcaaaaactttgtgtcagagagtcccttctgagtcacataaatacctcactatcctggaaaacagggcctggatggtgactggggtcattgcctttgtggacaggatggagtgtggtgtggtctgaggagcaggttggggtgggggagagggaaaggatttgggatcttagttgctgccctaggttaggggctggggagtgtttattttaagatcctgccatgtttttaatcactgtgatttttttttcattcccctttcctaaaaaaaattttttgcctccaactctctaagcactaagggctgtgcctgagaatggtagcattttggtcttttgcttcagaactgtggtatctttgtcttttttcattattattattattattattattattattactattgttttttaaaatgtcaggatgaattgtcagacatatggccatgtgtttgtcctctgcttctcccctgtgggaagttgtctccatgctgtgaactgctgtggggtgtgcagctgactcagtccctctgagcagtttccccactgtgtctgtcccatcatgcgctggatctgctcattctcctgctgtgggggtatgcccacctcttacccccttgacaccatagggctgctgtggctgggcctcaccagcactgtcttttgtgtgactcatggcatcctcgttcatccccaccgtgcctagcaggccttccttttcaccacctcggaacgcttgcctttcctccctccacaacaggacgctgtgcctcagtccttcacctacctcgccactctgccactgtccccattggtcctttctcctaaactggtctttgtgctctctttgttttttcttatttccctcttgtctctcattttttcttcccattcccctcccatttcagcccttaacttttctctttcccatctccactcagtattccaatggcaaaccctgatgatgtaacacctgcgatgagacatcggactctccggaactttctcatctgacacgtctttttcccagggttcgtacttctcctccattggtcccaggctaactcccctgttcctctgtggtgtctgtcagtccgtctgtcttctctttcctctgcccttcccacagggcagtatctgctgatggattcagtcctggtgtgtgattgttgtgatttgttcttccgtgcgcaaaaggaagagggctttttgagtcccttccaagtgagattgtaaatgtagaattttccactgttggatctagattttttttccttttttttgggggggtggggttacagagctgagaccttgtgcatgcatgtagaaaattgtaaaatgtaaattttttttaatatataaaaagcttgtttctacagtttgcagtggatctaaacattacggcaattttaggatttttttcttaaacataggaactaaaactgtacaaattttttttatataaaataaagacatttgacttttgtgggggcattctgttgcttttctttctttacaggaatgggagcaaatgagggccagggaataatgaatatattccttgttagggagggaatgggcaggagggggcagtgtgagctcatcattgctctgcaggccttcagggtgtgttggagagaaatgggaaaatgaaaaaggaaattgcttattctgaatcctgattctaaagagagagaaacaacaatgtgagggcttaaccacttcctggtgtagttgtcaggatagagaaagaaagattacttcctgggtc

SEQ ID NO: 6724 - DNA, 1694 bp, Homo sapiens
gccacctggggctggagtgaggagatttctagcccatgtttatgtgttttggggattatcagctaaagaagactattgagagttgactggatgttttatttctgcagggagaattcaaacagacctcgtcattcctggtgtgagcctggtcggctcaccgcctatcatctgcatttgccttactcaggtgctaccggactctggcccctgatgtctgtagtttcacaggatgccttatttgtcttctacaccccacagggccccctacttcttcggatgtgtttttaataatgtcagctatgtgccccatcctccttcatgccctccctccctttcctaccactgctgagtggcctggaacttgtttaaagtgtttattccccatttctttgagggatcaggaaggaatcctgggtatgccattgacttcccttctaagtagacagcaaaaatggcgggggtcgcaggaatctgcactcaactgcccacctggctggcagggatctttgaataggtatcttgagcttggttctgggctctttccttgtgtactgacgaccagggccagctgttctagagcgggaattagaggctagagcggctgaaatggttgtttggtgatgacactggggtccttccatctctggggcccactctcttctgtcttcccatgggaagtgccactgggatccctctgccctgtcctcctgaatacaagctgactgacattgactgtgtctgtggaaaatgggagctcttgttgtggagagcatagtaaattttcagagaacttgaagccaaaaggatttaaaaccgctgctctaaagaaaagaaaactggaggctgggcgcagtggctcacgcctataatcccagaggctgaggcaggcggatcacctgaggtcaggagttcaagatcagcctgaccaacatggagaaaccctactaaaaatacaaagttagccaggcatagtggtgcatgcctgtaatcccagctgctcaggagcctggcaacaagagcaaaactccagctcaaaaaaaaaaagaaagaaaagaaagctggagctggtggcttaggccatcacccttcccttggctggaactactggacagacccttttgagatgtgcctgtggtgctgtggagatgtgtgtagtggtcttagctctttgttgagcttgtgtgtgtgttgtgtagtcttagctgtatgctgaaattgggcgtgtgttggagggcttcttagctctttggtgagattgtatttctatgtgtttgtatcagctgaatgttgctggaaataaaaccttggtttgtcaaggctcttttttgtgggaagtaagtaggggaaaaggtctttgagggttcctaggctcctttgtacaacaggaaaatgcctcaaagccttgcttcccagcaacctggggctggttcccagtgcctggtcctgccccttcctggttcttatctcaaggcagagcttctgaatttcaggccttcattccagagccctcttgtggccaggccttcctttgctggaggaaggtacacagggtgaagctgatgctgtacttgggggatctccttggcctgttccaccaagtgagagaaggtacttactcttgtacctcctgttcagccaggtgcattaacagacctccctacagctgtaggaactactgtcccagagctgaggca

SEQ ID NO: 6725 - DNA, 1236 bp, Homo sapiens
tgggagatattataccaccttccttagatgaaaatgaggtccaaagtgtgaacctacttttggaaagcaagctgggtatctgaaatcctagttctcattttgttgaccttatcttgcagagtaaaggtgggattctatccaaagcttgtgattatatccaggagcttcggcagagtaaccaccgcttgtctgaagaactgcagggacttgaccaactgcagctggacaatgacgtgcttcgacaacaggtcagactcctacccccagtgcagcccttctcagttctgctagccactgacccagtttgacaccctctactttgttctccatggagaaggcttcatcttttccccctcaccagtggatgtctgaatacattcaggggcttggaagtgccagctttactacccattccctttactgcctccttcccatgtcaggtggaagatcttaaaaacaagaatctgctgcttcgagctcagttgcggcaccacggattagaggtcgtcatcaagaatgacagcaactaactatggggattcaggggctttgggcccaagaactgcagatagcccaggagcaacagcctaatcccgtgcccctttccttcactgccccacttctggcatgggacagggggaagttcagaaggtgtgtccttgaactgaggccctgtgatatggcggcctgcagtggtgtgaaacacacaatgtggacgtgcactgacagccttgcccacccccaccatgcagcccctgggcccttgtgctcctctcgcacaatgcatgtgctgtctccatgctggatactggacacactaaactctggggcttgtcctgtgcttgcttagagtgcccagcagaggtttgctgacaggtgatgctctggcttgccccaggactctggcacttccattggttcttcctttccctggagctgaggtttagatgtgcaacctgtggctcaggggagcaagcttacacaagaagtgagggaaggatgtttagcagtggctggtgcccatgaagaggagattggccagtgagaagctgaggcctatgcagacatctctggagccagagagaacaacaggcaggggcccacttggggccttcccccttgtgggggtcgttttttttttttcttttcttttttttttttttttttttttttttttaagataaaattgttcaaagccacagttgtctgtttttcttccttttgtgggccacgggc

SEQ ID NO: 6726 - DNA, 1206 bp, Homo sapiens
tgcagaagggtctggatcccggagtcgtcttagtctgccccccagagaaccccaggttcctgaccccctgttgtcctctcagcgcaggtcatatgcatttgaaacacaggctaaccctgggaaaggtgaaggactgtgattaggaccacagccctgggcaaaggggaccagcaagttgtcttgaatctccagggttcctgactagctgtctcctctgcagcatgagcagctgtagtgcccaactctataggctttggccctccagcttctctctttgactgtgggaggcactgccttggttggtttacctgaacttgtctccgacacaaagcacttatctcttaggagattcccaagaaagtcaacaagatcttgttcccagggagtgggtcattggccaaagggaacataaggtaggcagaaaacttaaaagagtttgttaaagtgaagactggagaaattcctcccttcctctgagctgtgaatctctcttcatgaaagccaaaggtagagacagggaggacagggccaggttagggccttccacacacaaacacttctagagttgcccattcctgttatgttcttggaccctaagatacctcctgtcccttttaaatccagattaagagaaacgtccaggaagagctctttgaagccctcaatatttgttggagggactggactcctctccagctccccaccctctgcctccagtcaccatgtgcaagagaggtcctgtacagatctctctgggctctcctttctcctttggaataacttgttcctatttcaggaaagggaaatggtgtcactcaggccctgggactgcttctccagccaggctggggccacaggtcccactctagtgaaggtcaatgtctcagaataaaagctgtatttttacacatagtgtggagtctcattattcttattaaagtctttggtgataggtattatatcttcacatatttggcaaaacattctttttcttcttcttgtttgggtgctcttcctcagttgttgtcatggagactagtggccagaaactagagctaggttcatggtggtcaggaaataaggaagagaaacttatatttacataatgcgttcattatgtgccaggaactggactaagtatcctgtgctcacaaaatctatgtccttgattttatttaatccacacaattctggaaggttggtgct

SEQ ID NO: 6727 - DNA, 1214 bp, Homo sapiens
[281 bp omitted]tggacgccaccatgagaagagagcaagttatggccacagcatggtggtagacccctggggaacagtggtggcccgctgctctgaggggccaggcctctgccttgcccgaatagacctcaactatctgcgacagttgcgccgacacctgcctgtgttccagcaccgcaggcctgacctctatggcaatctgggtcacccactgtcttaagacttgacttctgtgagtttagacctgcccctcccacccccaccctgccactatgagctagtgctcatgtgacttggaggcaggatccaggcacagctcccctcacttggagaaccttgactctcttgatggaacacagatgggctgcttgggaaagaaactttcacctgagcttcacctgaggtcagactgcagtttcagaaaggtggaattttatatagtcattgtttatttcatggaaactgaagttctgctgagggctgagcagcactggcattgaaaaatataataatcataaagtctgtgtctggacatcgcctttgggaactagaaggggagttggtattgtaccagctggactaagctccagttctagacctcctggctcattcaacatgcctccctacctaaataaaagtgcaacactcagtgcatgtcccagccccattctcccaagcatgggagtgggcgtaggagtggaggagggggaaggaaaaaggaattacttcacttacacctatgatgccctttgcccaagccagaagaaagcaaaggggaaaagggctgcagggtacattatttattttcacttgaacatggaaagaaagtgtcacactcccccttcccctttatagggggagtgtattttaatcagcaacctcttctccatccaccctgtgtatgtgtgtacacatataccaccacagttgggaggcatgactagg

SEQ ID NO: 6728 - DNA, 2125 bp, Homo sapiens
ccgtttaagggaacctcctgcattcaggcaaggatttcagagatacatagaaatagtcctggggaagaggtagagaagctgtcaggtgatattccctacttttttattctgttgtgcttttcagttttcaagcttggcttgtaaactcatcccttactgtaacctcttctgctctgtatcttctgtttccaacagacatcagactgcgggttcgggctgaatactgccagcatgagactgctctgcagggcaatgtcttctctaacaagcaggacccacttgagcgccagtttgagcgctttaaccaggccaacaccatcctcaagtcccgggacctgggctccatcatctgtgacatcaagttctctgagctcacctacctcgatgcattctggcgtgactacatcaatggctctttattagaggcacttaaaggtgtcttcatcacagactccctcaagcaagctgtgggccatgaagccatcaagctgctggtaaatgtagacgaggaggactatgagctgggccgacagaaactcctgaggaacttgatgctgcaagcattgccctgacctattccctcttctcactttggggactgttcccatcacccacctctggagcttacactgttctggggtttgttctctacccttccaaccaatcacacccctgcctttttttttttttttttaaagaaaaagacaaaagaaagtggaagtggtattccccacccctccctgcacccatgtgcctgggcttcccctttatttcccttttccatttaccccgtaatgtgtctctacagctaccttaccactgagccgtaagacaaatgtataggaagaagcaaagtctacagcacatagtctttgtaagggattgatgtgaacacttttttttggatgcactaaggagttatcaatacttctggctttatgagagctcttaaattttgtctaaaaaaccaaagggctgtgagtaagggagctatgtggaaagtgggactctgaagtgtattttgaaaattaatcgccaccctcttccaaattatagaattttttaaaaacaagctgtggccctttccactctctcctggcctctggtgctgctcctctctgccgcctttcctccattccatggcttgaaacctctgcctgatgtggctccttcctttttcccatttgtcaaaccctcttcaaaggaggaacagataagactgggtcagcctagtcatgcctcccaactgtggtggtatatgtgtacacacatacacagggtggatggagaagaggttgctgattaaaatacactccccctataaaggggaagggggagtgtgacactttctttccatgttcaagtgaaaataaataatgtaccctgcagcccttttcccctttgctttcttctggcttgggcaaagggcatcataggtgtaagtgaagtaattcctttttccttccccctcctccactcctacgcccactcccatgcttgggagaatggggctgggacatgcactgagtgttgcacttttatttaggtagggaggcatgttgaatgagccaggaggtctagaactggagcttagtccagctggtacaataccaactccccttctagttcccaaaggcgatgtccagacacagactttatgattattatatttttcaatgccagtgctgctcagccctcagcagaacttcagtttccatgaaataaacaatgactatataaaattccacctttctgaaactgcagtctgacctcaggtgaagctcaggtgaaagtttctttcccaagcagcccatctgtgttccatcaagagagtcaaggttctccaagtgaggggagctgtgcctggatcctgcctccaagtcacatgagcactagctcatagtggcagggtgggggtgggaggggcaggtctaaactcacagaagtcaagtcttaagacagtgggtgacccagattgccatagaggtcaggcctgcggtgctggaacacaggcaggtgtcggcgcaactgtcgcagatagttgaggtctattcgggcaaggcagaggcctggcccctcagagcagcgggccaccactgttccccaggggtctaccaccatgctg

SEQ ID NO: 6729 - DNA, 1477 bp, Homo sapiens
ctgaacttaaaagatgtaaggaaaaaaaaaaaaaggaagaactttggaggcagagattttcccagggtctgctggcctagtggggtgccaggccctcctttgctgagcctaagcaaagtacttagctgaacttgttctcaattctgatcactagtagtcttcctatgcccccaagaggctgctgtgctttatggtaaactttgcatgtcaacaccttcttcatgtccctctcataggggtggcaaaatatgcctgacggatcatttcaaacctttgtgggccaggaatgtgcccaaatttggactagctcatctcatggctctgggggtaagttttgtgtatttggcataaaaggagaaagagggacttaggccctgagcagtacaagaaaagcagctaagaataaaaggaataacagtgatgtcccttaagcatgttcccccagaatctgtctccaggaaggagcttctaatggaacaagaagcattgactggtagtaatctcacaggattttccttgtattgcagctgggtccatggctggcagtggaaatccctgatctgattcagaagggcgtcatccaacacaaagagaaatgcaaccaatgaagaatcaagccactgaggcagggcagagggacctttgataggctacgatactattttcctgtgcatcacacttaactcatctaactgcttccccggacaccctccacctctagttgttactaagtagctgcagtaggcattgctggggaagaaacaaacacacaccaaacagtactgctacttagtttctaaggctgcacagggaagggaaagactgggctttggacaatctagaggtaatttatatccgcccccaggtggagcaacatgcgattctggaggcacgggggtaactgaaagtgagtacatatagtctttctggtttctggagataacccatcaataaaagctgcttcctctggtagcctgtggttctcattgggagctgttaacagagggcaagtgggctgaaacctgaggcacatgaacagctacgccgggttgggttgggaaagagtcggaaataggggatgctctggtcaggagtgggaatgaaatgttgactgttccccctgctgctcagatctacctttgtcctttagtggtgagccatgctttgccctaccgtgttagcctgcaagaagtggttttgccggaccagcacttcccgccctccagggatcttcccagccctctgtgaagtgctagatgcttctccactggtctgcgggctggacccaggcctgcagtttgccatacttgcgcccctgctgtttgggaaggatctgtgctgtaagcctcgcggccatactacgactgtcagatctccatccctatgggctataggatggggcgacggcaccctatacctcagggacttgctttggagtcatggattaaagacctctctgggcagcgttgagaaccag

SEQ ID NO: 6730 - DNA, 1176 bp, Homo sapiens
tccccaaccacttgcaggtccatctgccactggtggtggcccccaacccttaaatctggcagttgtatctacttttcccagtgcctactttcctaaaggttattttctaccctctgagccaccttttgcttgcctcttccagacattaacctttgtttgccttccccactcccatcccaacagcctttgcagatgtgattggtgccctctggcaccctgactcctgcgaagctgtgaatcctactcgattccgagctgtcttccagaaatatgttccctccttctctggatacaggtgggagagctggaggctatgggatttctctctggccatgtctgggggtagggccaagcaagggccctggcagcattgttctgagccttgagatgttcttcatccaggaagtggggaccaatatctgggcagggaatagtgtctgtggactaggagaggagtcagttgcccatactctttgtctggctgtagccagcaggatgcccaagagttcctgaagctcctcatggagcggctacaccttgaaatcaaccgccgaggccgccgggctccaccgatacttgccaatggtccagttccctctccaccccgccgaggaggggctctgctagaagaacctgagttaaggtaagggtcgttccctctacctcctttccccgtagtttatcagcatcattcacacttcatagaactaaactagtaaagattgaagatgtagggtccagggaaaccctttagtatagaaaatagtatgagaagcaacatagaagtagaaggaaggaaggaagagggggagtctaagggagcagatggaggcagaagatcatgctagggatgtcaccaaattgaagaaggggataattcatttacaggtagaggaagacagcatattcttcccttatgtacattcctttcttttcctctcacctcggatttccctagaaagttcattgaggcattattcttttgacttttccttgaaatttagggaaggagcaggggtgtggatggggagtagggctctgtaggttgtttcagtgggtgttgggggtgcccagtgttcctgctgtctcatgggtgctccccacttcctttgatctgtggtagtgatgatgaccgagccaacctaatgtggaaacgttacctggagcgagaggaca

SEQ ID NO: 6731 - DNA, 1213 bp, Homo sapiens
ggggtgtcagaaaagccaattgaggttaggagcatattaacctaacactgtttgccatttattcaggtgtgtgaccgatgtcggcagaaaactcgaagtaccaaaaagttgacagtacaaagattccctcgaatcctcgtgctccatatcctaatcttcagattcttacttctcttaggatacctcccatacattctctttcctccatgtttccagagaattgaattttccttaggaaaagtctgccacccacttttccacaagatgctcccagtgtgtcgggagtggggagaggacagctttcaggatagaagaagttcccctcagaggcccactgcctcccaaatgctccttaaccagggcttagatctgaatcgattttctgcctcccgaggctccatcaaaaaaagttcagtaggtgtagactttccactgcagcgactgagcctaggggactttgccagtgacaaagccggtgagtctggtggggaaagtcctaaggagccaaaggagtgggggcacagctctgattatagaacttgatcatctccaaccccgcaggaagtcctgtataccagctgtatgccctttgcaaccactcaggcagcgtccactatggccactacacagccctgtgccggtgccagactggttggcatgtctacaatgactctcggtgagaatagcctcctatttacatcctgccccattcccactcagccctgacaccctccccttctatgaagctccaggagagcagagtgccaggtgaaaggagaggtggaggtcttgcctgatcatttcctggatgctctgaggttcggtcttgtagggagaagggagtaaacaggaatgaccacaaccctttcccgatctccttttttcctagtgtctcccctgtcagtgaaaaccaggtggcatccagcgagggctacgtgctgttctaccaactgatgcaggagccaccccggtgcctgtgacacctctaagctctggcacctgtgaagccctttaaacacccttaagccccaggctccccgtttacctcagagacgtctatttttgtgtctttttaatcggggaggggggagggggtggttgtagctccattattttttttattaaaaaatacccttccacctggaggctcccttgtctcccagccccatgtacaaagctcaccaagcccctgcccatgtacagcccccagacc

SEQ ID NO: 6732 - DNA, 1290 bp, Homo sapiens
ggaaggactgcctgggaattgttactggatcctcagggttctgtacccctagccaggaaaatcctaaaggtccctagatttctggctgttcctttctgggtcttagtctccaacctctaaccctcagatttgacctcctggtccgtacccagaattcctggacgcaagatgggatgaactcactgacataccagttgctggctcgagagctggggcctctttataccaacatcacagcagacattgggactgaccctcggggtcctcgggctccttctgggccacgttacccacctggttcctcccaagccttccgtcaagagatgctgcaacgccggcccccagccaggcctgggcctctatctactgccaaccacacagccctccgaggttcacactgactcctccttcctgtctaccttaatcatgaaaccgaattcatggggttgtattctccccaccctcagctcctcactgttctcagagggatgtgagggaactgaactctggtgccgtgctagggggtaggggcctctccctcactgctggactggagctgggctcctgtagacctgaggggtccctctctctagggtctcctgtagggcttatgactgtgaatccttgatgtcatgattttatgtgacgattcctaggagtccctgcccctagagtaggagcagggctggaccccaagcccctccctcttccatggagagaagagtgatctggcttctcctcggacctctgtgaatatttattctatttatggttcccgggaagttgtttggtgaaggaagcccctccctgggcattttctgcctatgctggaatagctccctcttctggtcctggctcagggggctgggattttgatatattttctaataaaggactttgtctcgcatctgctcctgctttctgcatcccaggcacactttgcctctttgctgccccgcattcttatgcctataggtgatagaacagccagaccaagccaagctccagcaatttttattttcatgaatgagagttggggatcagctgttaggttctgtgcccaggacactgactgctgcctggcgcccactctctatacagtcattaacagcaactccctcataggaggctccagccagagtcaggggcaacctgtgagcagtcaggaattgcctagctgactctggaaggaaaggatgaaaggaatgttttagctgggggtctgatgtccttggccctcctcagcccagctgttttcccaacttacctagtttttgccagtgacctagt

SEQ ID NO: 6733 - DNA, 1198 bp, Homo sapiens
gagaagccagacccctgggcacctctcccaagcccaaggactaagttttctccatttcctttaacggtcctcagcccttctgaaaactttgcctctgaccttggcaggagtccaagcccccaggctacagagaggagctttccaaagctagggtgtggaggacttggtgccctagacggcctcagtccctcccagctgcagtaccagtgccatgtcccagacaggctcgcatcccgggaggggcttggcagggcgctggctgtggggagcccaaccctgcctcctgctccccattgtgccgctctcctggctggtgtggctgcttctgctactgctggcctctctcctgccctcagcccggctggccagccccctcccccgggaggaggagatcgtgtttccagagaagctcaacggcagcgtcctgcctggctcgggcgcccctgccaggctgttgtgccgcttgcaggcctttggggagacgctgctactagagctggagcaggactccggtgtgcaggtcgaggggctgacagtgcagtacctgggccaggcgcctgagctgctgggtggagcagagcctggcacctacctgactggcaccatcaatggagatccggagtcggtggcatctctgcactgggatgggggagccctgttaggcgtgttacaatatcggggggctgaactccacctccagcccctggagggaggcacccctaactctgctgggggacctggggctcacatcctacgccggaagagtcctgccagcggtcaaggtcccatgtgcaacgtcaaggctcctcttggaagccccagccccagaccccgaagagccaaggtaggcatctctggagtctgtgtcctgcggtgtcctcccgccatgtctgtcctactgacccctattcaccctctctccacccacttacacttctggccgttctgcttccctcccttctgcctgcctttcctttctccatgagcctcctttcttggtaaggctcaggcctctccccttcacccttctcctagccagacccaccgagggttctcagaggtgggtcacagactctgggctgggaataactgctccctctccccaccccaccccttcctggccatggcatctcctactgacacagtccccagcagtaaaggtctcctaacagccccttggccttggctcttttctctg

SEQ ID NO: 6734 - DNA, 1262 bp, Homo sapiens
tttgttggcagagaaaaatactcttcatgttaatacagacacccaaccttcttccttgaacagggagagtttggggtgtacctggtgtctgatggcagcagccgcccttatcgatgcaagatcaaggctcctggttttgcccatctggtaagaatcaatcccagtaactataactccaatgaattaaacctgaccttggttgaggtttttatgaactcttctttctcctcccaccttgcaagtcttaactaacattgttgccatctcaatctccctaggctggtttggacaagatgtctaagggacacatgttggcagatgtcgttgccatcataggtacgaggcctattgtgtagtagaggtatcctagacaaaggagttcgggacgcccactggggacagaaggagaacacttcctgttcaccataggccatggcatggactcgggtcctcaatcttttgagcacagtaatgggttctggatcttgggtaacaccactttttttgtttgttttgcctcacaacaggaagataagtaacatcacttttttcctccatcctctcacctaggtacccaagatattgtatttggagaagtagatcggtgagcaggggagcagcgtttgatcccccctgcctatcagcttcttctgtggagcctgttcctcactggaaattggcctctgtgtgtgtgtgtgtgtgtgtgtgtgtgtgtatgttcatgtacacttggctgtcaggctttctgtgcatgtactaaaaaaggagaaattataataaattagccgtcttgcggcccctaggcctaaacttctggtatcttagtgtctcagtatcttagtgtccttcactcggactgtaaacctaagaatgttcattaaccctccattcctgttagattcagtcaggtcttagcaatttttcctgctcgtctccacccccttctctgactcttgtcctttccacttctctattccccatttcctctttcgcctcagttccctccttgcccaaaccttctcagtgcccacataacttggtaaaccactcaaatcaagacctggggtaaagttgggagggaaagggctatagtggggtctgagggaatgttgacgggcagtttcacacagataaatctctgaaccagccgggcgcagtgcctcacgcctgtaatcccagcactttgggaggccgaggcggatggatcacctgagatcaggagttcaagaccagcctgatcaacatggagaaaccccatctct

SEQ ID NO: 6735 - DNA, 1243 bp, Homo sapiens
ggatgttgaaaggaggaataacatactaaaacatatggcacatttagtttatgatgagatcccaagtagtctgtctcccatcataaacttgaacatgagtttaaatcttctccttttcaaggccgggtgcagtggctcacacctgtaatctcagcactttgggaggcaaaggtgggcagatcacttgaggtcaggagttcgagaccagcctggccaacttggtgaaaccctgtctctactaaaaatacaaaaattagctgggcgttgtggtgggcacctgtcatccccactactcaggaggctgaagcaggagactcgcttgaacttgggaggtggaggttgcagtgagccaagattgcaccactatactccagcctgggtgacagaatgagactctgtctcaagaaaaaaagaaaacaaaaatcttctccatttcaaaatggtttagaattgtatgaggtgccaggggtcccagttttatgtatcatattagttgtaacttatgagcagctgtgacaagctacttggttttctcctcaggggtctctctttttggcatgtcggccctgttactccctgggaactttgagtcttatttggaacttgtgaagtccctgtgtctggggccagcactgatccacacagctaagtttgcacttgtcttccctctcatgtatcatacctggaatgggatccgacacttggtaagttaattcgggatttgcacattttctctgtgaagggagtggggagactgggaggattctttccttcattactgggtttagtgctgttcttttttttttttcccaagagtggagtctcgctctattgcccaggctggagtgcagtggtgcgatctcagctcactgcaacttctgcctcctgggttcaagagattcctgtgcctcagcctcttaagtagttggcgttatagacgcatgccaccactcctggtttttgtatttttagtagagatggggtttcaccatgttggccaggctggtctcaaactcctggccttaagtgatccgcctgcctaagcttcccaaagtgctaggattataggcgtgagccaccgcgcccagctagtgctgttcttaaggttagttgtgactcagagtcctcttggggaaagccagacaagttcacaagttcccctgtgtgttacctggcagtcctgctggtggtgtagctgagcaatggtataggcctcacagatacttgcagggtctcattggga

SEQ ID NO: 6736 - DNA, 1777 bp, Homo sapiens
ttagaaagtcttgcagttaaatgtttatgaactttgtatgaccacagaacttttttttttttggcccatacaatggctttcaacattctgagagcaagtgtttggaagaatacaccttgagaaacattaatctagatgtgtggtcctgaggaaaagttgtatctattcattctggaagcttttgtataccgtatggggcctgtggcattctagagaacattcctcctaccatcaccacacaatagaacctgattttctgtcattggaataagtggataataggttccatactgtgggttttgagaagggtaaaggtggggcataagggtagaagcgcttttctctagaatcatgctgagaggagatatctattcctttaggtagaattactttctgagacaggaactgttaatgtcctatttactgaaattccttttttttttttttgctttgtccacagatgtgggacctaggaaaaggcctgaagattccccagctataccagtctggagtggttgtcctggttcttactgtgttgtcctctatggggctggcagccatgtgaagaaaggaggctcccagcatcatcttcctacacattattacattcacccatctttctgtttgtcattcttatctccagcctgggaaaagttctccttatttgtttagatccttttgtattttcagatctccttggagcagtagagtacctggtagaccataatagtggaaaagggtctagttttccccttgtttctaaagatgaggtggctgcaaaaactccccttttttgcccacagcttgcctactctcggcctagaagcagttattctctctccatattgggctttgatttgtgctgagggtcagcttttggctccttcttcctgagacagtggaaacaatgccagctctgtggcttctgccctggggatgggccgggttggggggtgggttggtgaggctttgggtgccactgcctgtgggttgctggcttaaaggacaattctcttcattggtgagagcccaggccattaacacctacacagtgttattgaaagaagagaggtgggggtggaggggaattagtctgtcccagctagagggagataaagagggctagttagttcttggagcagctgcttttgaggagaaaatatatagctttggacacgaggaagatctagaaaattatcattgaacatattaatggttatttctttttcttggatttccagaaaagcctcttaattttatgctttctcatcgaagtaatgtaccctttttttctgaaactgaattaaatactcattttatctttgactctccttgaaatctagagaaaccaagaaaatggctgttgggaaggaaccaatttcctcctcttccctcgggtctcaggcatttacatcctccctctccccgcaatctgacctttaccaggagggaaacagttctcctacatctcatcattggaaaagttttcagggaatcagatagaacttagccagagatttaaatatcacagaaaagcctcagagaaggaaggagaaaaagaaaagaagtgacgcatgtagagtgcttttgggttataggcaccaaaatcccattaaggactgattataagcttcatggtacagttcagcaaattatgattcattgaggggcacagaggaccagtgttggtgacagctaggggatgatgacctgaggttataggcttggggtgaatgaagcatagagtttttttttaaaaaagaagggattgttgaaa

SEQ ID NO: 6737 - DNA, 1500 bp, Homo sapiens
tctgtggcattattaaccctggcagttgctttagccgttgtttagtcaatggaggttgtttgggagctagaattgggagagaacaggtgatcctggcacccagcccacttgtagctctgcttactgactgagagtccctctgcaccccttgaaagtttactgacagttcacacccttaaagcacatttctgtatttctggggctgaagcttatggcagagatgcacattctgttgaatatttattctttgtgtatattcctgtctgcagagaatgtgatcaatgggcaggactacgaagtgatgatgcagattgactgtcaggtgatggacaccaggatcctccatatcaaaagttcgtcagttcctccttacctccgagatcagcagaggaatcaaaccaacaccttctttggctcccctcccgcagccacagaggcaacccacgttgtcagcaccatccctgagtcattacaatagcaccctgcagctatgctggaaaactgagcgtgggaccctgccagactgaagagcaggtgagcaaaatgctgctttctgccttggtggcaggcagagaactgtctcgtactagaattcaaggaggaaagaagaagaaataaaagaagctgctccatttttcatcatctacccatctatttggaaagcactggaattcagatgcaagagaacaatgtttcttcagtggcaaatgtagccctgcatcctccagtgttacctggtgtagatttttttttctgtacctttctaaacctctcttccctctgtgatggttttgtgtttaaacagtcatcttcttttaaataatatccacctctcctttttgccatttcacttattgattcataaagtgaattttatttaaagctatgccacacatgcatgttcaaatggtttccactgattcgatttttcattcatttaatgcaaacccattctggatattgtgcttatttgagaaaacacatttcaaaaccagaaaagccaaaaacactccaaaaacaagcaaaacaatttggagctttagataaaaggaaaaactcccagttggtaaagtttatctttacttaggatttgtggctcacacctaaacaaagggggtcagggagtgggtacaaatttgagaaaatagaagggtaagggaagggccagtggtggggtttggagagaggagatagctccattaatacacatgtttaaaagatggaaagttcacgcctgtaatcccagcactttgggaggccgaggcgggtggatcacgaggtcaggagatcaagaccatcccggctaaaacggtgaaaccccgtctctactaaaaatacaaaaaattagccgggcgtagtgacgggcgcctgtagtcccagctacttgggaggctgaggcaggagaatggcgtgaacccgggaggcggagcttgcagtgagccgagatcccgccactgcactccagcctgggcgacagagcgagactccgtctcaaaaaaa

SEQ ID NO: 6738 - DNA, 2356 bp, Homo sapiens
gactgcagtatgagattaaagccacaactattgtttattttggggactctaggccaccaagtattagcacacatacttatgttttctctactaatctggtccaggtcctcatggaccacaggacaaagctttcattttcattcattcttctattgaaattataccaaattcagctgaggaatatggaagtaactttagacttaaacaagacaaaagttttttcactgaagaattgacaagtatttgctccttaaaacaacgcagattagtgaacgtggattcctgctgagggagtgcatcccataatatggcaataattttcagtttctccaacgaaaagatagtgaaggaattaaatcttttgtcctcccatggttaaaaaaaaaaaaaaagctgtgttcatttttactgtactatgcctcttttttcaccatagtagacaattatgtttcatttgatgaattcatagaactggatctcatacagcgatgtcctctctaatgttctacctttcagtttctaaagtgagtcttcctccctctcctacaaaacttttcaattttttgatgtaactcatctacaaatactgtttcttaccccagttgacttgcctttgtcagatttcttcttgttccacactatagcaatcaatttctcttcttccttacaagaaagggaacgagaaattgtagcaacctctcaaggattatatgcagctagttagttttctgcctgtgaaattaggtctggctcctaaataattttaaagaaccatcagcacttctaactctctggacaggtgcctctttgtccaagctagttaaatgctttccaaggaaatcagttcaacttttgtgagcggggaaaagcagggctttattgttgtgttacctgggagtctggagtttgaaaagtgctaattaaccttcctctttttccacattacaaacctttttaagcagcgcagcactccccttagatttggctatcctgggtgattttcagacaagaaccattttctctggggaccattcttctgctgggtgccaaggaatataaggcaaatgcccagaagaccttcaggtgactgggcagtcttatcatgggatatttcttctggccctgccccttcccattctgtaatgtgaattagccacaccagaggctgtgaccatggctagtagacagtggcaacatagtcatccccaagatgctaatcttctgctggaactgtcatacgttatcatggtcaatgtaaacctggtttgtgtggggtgattataaatagagtttccctcctctctgtgacagaatcacaggagaaggacccatctcgtggccttcttgttcttagcgcttcacttttacttcatccctcgattcccagctttttctatcatcattttgccaactcctcagatgcaagactttggttatgtcatactcaccaacgttagtccctctcttccaggtgaaaaggtgggtagcggttgggagggagtctccactgaagagcaggaaggtggtagcagggccggcagctctgccacagagctaggggtgcctgtaaggtgccgcctagagcagcctgggagctttgccttcttttgtctctcactagcccttctactctttgtcattgcctgttcttgagtggatctttgaaatgaggggacaggattctcctaagggtagagtttcaggaaatgagtgaaaggcaattgacaaatgcaaagaagtagtcactttttaaattgctggcaaagctataattaatccctaggcacaattgtagtttttattttaatgtttgtatgcacaaggccctttaggaaatgagaagttgccatgccagattaatttttttttttttttttggtgggattgccttttgggggttgcagccagaaattgtgggtaatgtgtgtatttttttatttattaaattttaaacaggattgtgcaagcttatgagacaattagataaactcatggaggaggcaggtcctcctgttattagatgattttgtgctcttggggctgacaataatacactcttgggaagtgatggtagagactgatgggaatagtctttctgcctggttgcaagtcccaaatttttaagggttaatggaagtaagtggatgtttcctcatgttaactactgaatcagatgttaggagcttgtccctttggggttgacttatgcccagcagtacagggacacagcttcattagagtgttagtgtaaactaactccaaagttaggagttaatgtgaaaggatcatccttgaaacaaatctgctgtttgccatgcttgtagtacagaaacttcacatggagttttgggtggga

SEQ ID NO: 6739 - DNA, 1232 bp, Homo sapiens
tgaaaacgattcttcttttagaggtggtaaaaccaaggcacagggaagttgagtaacctgccctgagttacacagctaggaagccggctagctggctttcaaatgcaggctgtggggttttataatctgtgttcttatttgtcatgctgtgctagataaacaacaattctacagccattgccagtctgttctctggtactgctaaagacagaggaaggaaaaagctagttcttgcctgcagatgcatccagtctgttgggaagacggacctggaaaccagcatttggggtaaatgctgcagcgattatgcaaaaacaattcagtgagaatgtaaagaaacattatgtgaagcttcttgagaaagtccaagcaggcttcacagaggctgtgatccttgaactcagatccagaagggtggatgagtggggagggaaatcctggacctagaggtgagagagcacagggagggctggagagagatggacttgacagtggatttctcaggcaataagatcatgaaggcgctgacttgcctgctaaaaagctttgacctcatcctgctggtagtagtgacctattggtagatttttagcagagaataaatatggtgaggtttgcagattactaagctctctctagaggtgatgcagaggatggattgggaggagaaaaggccggacaccatttattagtgctggctgctggcaagaatgtaggggcctaaactggagccatgacagtgggaatggagagcctggatctgagaggtgaggaccagcattatgcaggtgttcattatctggatttctgaatgatatgttacctaggaaagcaacagtgatcataacatccaaatattcaccaatgaagccatcacttacagaaacaatccctgtggcaaatgcacccggtgacctccaatgtgccaggcccttgtgtagcctcctccatgatgtgttattttatttttatttatttattttatttatttattttttgagacagagtgtcgctctgtcgcccaggctggagtgcagtggcgctatctctgctgactgcaagctccgcctcccgggttcacgccgttcttctgcctcagccttctgagtagctgggaccacaggcgcccgccaccacggccagctaattttttgtatttttagtagaggcgcgctttcaccgtgttagccaggatggtctcgatctcctgaccttgtgatccgcctgcctca

SEQ ID NO: 6740 - DNA, 6958 bp, Homo sapiens
atccacctgccttggcctcccaaagtgctcagattacaggagtgagcccctgcacccagccaaattgtacttcctaataggtgcaatttccagcagcttttgaccaatattttttcctttttcactgctaaaagtacagattatcatccaggtaccattgaaatgcagttgctgtctgagctattcagccgtatctttggcagatgtctagtgttattcatcactcctgtaacgaccttagcaaaagattgtacatgattcacacaacttgtccttgagagatttttcaaagttgagctgagttgtgaggaagtattctaaaccttgctgtcctgaagtatagttcatagaccagcagcattggcatcacctggaagtttgtttagaacagaaactcaggcgacatctcagacctaaggaagcaaaatctgcattttaataacatctccagttgatgtatatatattaaaggtggtaaagcactggtctaaaacaatcttggtggaaatgaaatgtttttttctctgtcttctttcaggtctttgttgagtatgcaaatgctggtgattccaaagctgcgcagaaattactgactggaaggatgtttgatgggaagtttgttgtggctacattctacccgctgagtgcctacaagaggggatatctgtatcaaaccttgctttaatcagtaacctaaggactgtttcctttttctcctcttccatttcttgggttattccacatatgaatgcaggactacccccttaccattttaagaaggtactttatacatttatttaatcctactaatgtgcagccattgcccaagcagtgactgcgttgcatacatttggcactgagtaggacaagacctctcagctatacattgaggggttttagagcatccatgtgggcaacccttttttgtgcgggagagcaggtgttgctcttcagtatgtagcctaaaaaaatcttaattatttcatggatcatgaagcaaggatgaataatatcatgtcttggtaaatactaacaaatttgttaggtttggtgacatcatttacagattatttctttatgttgtccagtggttcttccttattgttgatatccataagctggcactggatgctctcagtaatgttaagtaattgtcaagcagcagttacctactgtgttcttaacactgagttgtgaattttttcttaaagcagtactgtagtactgaatattcctttaaaggaactgcagtgagcctatctaagtttttttaaattaaggcttttaaaatagaaagctgatgcttgatcttgcacaatttttatgtctagtatgtatgcttgagtgaatgtgcgagtatgaatgattagagaaaatttgagtcagtgtactttatagtgtgaatcctgtgagctaatacagtctatacttatttcttccctacctgtttcacatccgtaagatttaagatatacattttttgagaggtagtctgtctgatacaatgtaaatgacaaaacataattcctgagaggcccagaacaaactggagtctagcctggagttaaattgagacttctaaaatgattggaacaaagactaagttgtgccagatgtaaatcaacccctcttttagtttactttagactttgtattagctcatcttttttgtagtaaatctatagttttaaggtttctcaagatgtggctctacctactatgatgaaaattgaagtgggtcaaaagaattagatgtacagtgaagggaaaagaaaaaaaatgggcgaagagagggtggaaaataaaaggattcttttttcttcctttctgtttctcgtatccctgctccctttttcctccccttccctcattctttgcctctatccttagctgaagacaaactagaggagcagcatcccaggtagtttggcttttgactgcaaggtagttaagaaaggtgtagatataatgaggtagaagtagaaaggaagaaaaactcaaagaattcttaaaaggattcatagcaacataatgtgtccctgagtagaggatgctgctatgcgtgagttcatggacacaagttgattacatggtttttagaattataattatggattcttcttatttcatggtaggttgtctttaaagatataaaaattaggatgcctttatgaagcactgattataccaaaaaaaaaagacaagttatatacaggttattaatttttttatttatttattttttcctaaggaaaaagtcttctatctttccctgctggaagcctcctcatatttccttatgtttgccatgcaggttgctgagagtccagttagaatttgcattttacagaatgaaatactttaccccattcaaacaattattgtttgacattttagttatttataattgtcaaattcaggactctcctttaatgtttattatgaaaccaaatttggcataaggaggctgatttatgaattaccaaagggtcttgtggcatgttccccaatacatgcccttagaaggaagaactattattttttattttggccctttcaggagttgattataaattggtttgttttcaagtcagaattcaagtgggcagaacccgtattgtgaagacctaaactttcctaaatgttcatatgggtagcagattttgtggtgattagaaacatcaggtccttaaatacgatgaacatgggatacaaaggaattctttataagggcaagtatcctaagttagcacatttacttttctctcccctccgcccccaaaagaaaaatccttacaaataaactgcaggtaggcttctaagcctagtcctgcagtatgctgctaacatcttgatgccaatcttcacagcattctttgattgtcatcttattgctgatacattcatacatatatttagtgcttgacactgtagaattttgttacagaagatggttactagattttaagggagctgagggaataattgatgagccttgaattaaccatgcatttaattagattttttgttgttgttgttgttgttttgagatgatgtcttgctctgttgcccaggctggagtgcagtggctcaatctcggctcactgcaacctctgcctcgcaggtttgagcgattctcctgtctcagcctccccagtagctgggtttacaggcgcttgccaccacacctggctagatgttttatattaaagccagagaattgaaaaagaaatgcctcctgtgattgaaattattttatagctcttagcccgttctaccaaagatcacattagcagattacccctccctcctgtgatattatctttcttaaacctgaaccaaatatcaaaagatacaagtttcatgattaggatgaaatatatacatagggattttggtttattgaagttattgaaagacctagaaattttctttttgagagaaagggtaaagaggtgagggttcatgtcacttaacccctacccttttgggcaaattttgtctcaggtagtgtttcattccctaaattaatacctgtgcttccttgcctctcaccttcccagttacttctttggggtattactgtggcacattgtacacccagaaaaggcacatacagtgattattttgtgggaaatacttgattcttttgaaatatatttggagggggtagctagctagccactgtcaaaactaatgctgtatttacaggacaaaaacaagtagagttggacacctcagtaagagacagcattaactaaaagtactgactgccttttaaaggaatttttaaaactattctcttgcaataagagatccgcatttattaccactggatgtcttccttttttgtggccaccaatatagcagctctctttagagggattccctttctgctatgccttgagccaaactggctgcttttagaacaaaaaccataagtatggttttactcgaacttctctttgtttttattgagagaaatattgccttctttttggtactccagctgctaaagagtgctgagatatgttaaattattttttaaaagaaaatctccaaatacttatttaacttgtcttctagattcatgttgcttatattttaactattgagcaagtttattataaggaatgctgccatatagagaaagctgaagagaaaccatgggcagaaggcttttttctgtcttattacactggaccttcactctggtaagggcatcagttacttttctggaataaaaggcggagttagagcacttatcagatgctgtttcatggcttgttttagttaatttatcatgcagataactaacatttgggtatctttttgttttaggtcttattttctgactgttaggcctatcttacacataagttctactatcagtatacttggcagcatgacttttttttttttttacagttaatttaatgaaaatcagcaccattgtaaatgatagtaattgtaacaacatagttactgggtgaaggagtaggggagacactcagtaaccatctatttacctagacacttatgcaggggtacatgctaggtggctttattcagattcgggtacattggaatcacatcatgactttgagtctgatggctgtgtagataaagatttaagcaagtgccttgtgtttgctggaaaatattaaaactcatttgggtgaaagcttcccagatgatgataattaatagcacttctgcctttttcctggagtaacttttagattgagtcacatatgatagtataaaagtccaaaattttctgggtttacctttgttttatttttcatatatatattcactgtctgcctggaaatagccttggtttaccttatttttttgtatatgtaaaactattcatatttgattttattccaatattatatatgatggaaaagccagaattgtctggcagaatttaattcttccttggatctctagttctgtttttaatatcaggttccttcatcaaattttactactgtagctctgtgatataatttcatttcttgtcaattatggtcacatatagacaagtacttggtcacaattagctcaaaagaatccccatttcttaaggtgctcagtcaatcacctttattttgagatggtagtttttcaagttagtattacttactagctttcttgatgaatataaaaatgttgtctccatcatacagagctgagcctcttgtggtatattaagataagtcccattcttaatcacagaagaacatggatattttagtttttggagtacccagaattgtaaagattttgtttcattttgttttaggatagcttctctgcctaatactataggatatgtcatgttcgttattgtagccacctccctcagatgtttttcactatttttaaattatataatgaccagtagattcacagtagcatgtacttgacaagtgccatggatatttaagaagaaggtaaataattttaatattttttgctgtaattttataggagcagtggactgtaagagaaatatctataaatcagagagtatttaggaaactttgtattttataggtggtcattaaagtgatcttcaggatataagatagtttacacaaactttattctcctgataggaaatttttattcattttcctaccactcagcacttttgttctgccttgtactgcttatgaggattaatgttttaaatttgctttatttgtgcttttcagagagttgtcataattgtggcagttgtgtttgtggcactgtaaatgctgaaattcatgggaaacttaccaaatgactgcttgagtgttatttcccattaaattgggtagctgtcacaataaccagaagaaatcttgtggcccttttgaagaaagccatgtatgttttgttacctaggttcatagtattttaatttaaaggcaaagagaagcattctacttatttgtcttataaaccattaatcgttttttgtgcagaagagagcttattttgttatactgctttgtataatggaaataagtcacattctgggggaaaaaaactggaattgtttgtattttgtttttttggggggggatctttatgtgaaaaatcagagctacttgttaccataagcccttactatcaacaagataattatttgtaatcacttttttatcccaggttggaattgctttccccttctaagttatcttcccttaataatatttatgataccaggacagtgagggtataagagcaaatgtagtgaggtattcaaaaatcctgcatatatggactcaaaagttctttagttatttgaattatatatagctatattattttattagcttgggttgtcagaagattgccaattttaagagtaaagaggagagagataagtaataaaaatagaggaggggaagaaaatggctcccttactggtcttagtaatcttctatatagttaatgagctaaaaaatgatacttaaagttccaggtttggtaccgctagcatagaaacattgcctttcctacacattcctcatcattgtttcctcagaaaattattttaagagtttgtgaaaccagattaaatatctatattcagtttggcctaatttttaaaaataaatatttatactccagcttttgtgtatttggtgtacatcaccacttatgcaaatcaaggatcagaaaactggaggttagccatctccattatttccttttgcacattgggtacagtgggtggcattagtatgcactagctgcaaagtcacagcaccttatggaaataagtatgtttattataataaaaaaaagttaagctgcatctctgtagattatttactttgcagactgtaaagctgccctatcttttccagcagaatttactcttccattcttaattcttttttgaaatatcttaaataatttaacattcctttataacttcttaacagtgtca

SEQ ID NO: 6741 - DNA, 1215 bp, Homo sapiens
acagagccactgtcaagaaggaatctgctcagagcagattctgagttttcacactccacaaatcctcagatttagtgggaagctggaaaaaggaactcttaattccaattgaggagaaacaagaaaacattacaaatcagtttcccaagctgagaaggattagccttgaccccttgggtctgcctctgttgccctcaccagtttaccttctacaacagtttctcaggaacatgtgtatttccccattcagctttcagcattgctccacgccacagcataagcatagatcccaagtccacaggctccattttgcaggtcatcttctgatcctagcaaatgtcctttccccatagttgtcctatgcctttgggctttagtctatcccaggactaactgtggagaaatcattggtttgagagtcaagagagcattggtttgggagctttaatcctctttctgcttcacactaagtgtgtcatcttggctaaatcacttggtctttctgcattttgttttcttatttataggatgaggaaattagattaaatggttttgaggtcctttcttgttctgatatgtccagtactcactggaaaattggatctataactgatgggtttagtaatctggtcatttcttgctctgaaaattgtagtcagcaaaagagatcatggaagaaatcactgtaatggtagtaatagtaacacatgccatttgtattgtgccttaggtttaccaggtgtttccaaatacattagcatatttgatatgtgcaggactagataccttgggacctgccacactccactttcaagatatgtattagcttcattagaattaaagggacttgaactcaggacctgcagcctattcttctttatccacatgtctctggtagggctacatccagatcacaccatgacttcttatagagcaagagaaaataatattattatatcttcctttgcctaaaatctctccacttattcttttttatgattctgcaccagttcactgggttattctatgattccatattttttttaaaaaaaatcatatttaaaatgaacttacaatgtctgaattttcctggccttgagtcacagaagtaatatgtttcagatggctgcccaatatgtattatcatgtaatacatatctgtgtccttttctgggatgaggaaggcttcaacttctggcactgagaactttgtat

SEQ ID NO: 6742 - DNA, 1267 bp, Homo sapiens
aaacatcaaaacaatacgcataagttagacaagattaaatcttgtctgatatctgcacaaacagatatgcaccatgttggaaacatgtgttttcctagtcccatccaggcttcccacaagaaagccatgatgtgggtctaaaccatatgttttgagtaaaggagaatagaagaaggggagtgtccgcaaaatggaaagagatgaagatgttccaaggaagtatgctgaaacagaacagtgaatgttttgcccaaaactacaaaaataaaagaaaaaaagaaaattgcaatacatggctactaagtctttgatcataagtcgaatttatagacctggaatttgccatcctagtctttcctttttagtaagacttctgtcctctggcagtgcatatggtaggtctctaatgtttcttcatctccaggaagatgcagatccttatttttgctgggaaatccttctaaatagaaatgtaacatttttataaaaacagattaatgtgtttttcacttagtaaatgttttcaagagctgaattgagaaggaaagagactggagtggttaatggtgatttgatttctggcattctgagttttctgctacaattagctgcattacttggtgccaaagagcagtggggaattgttgagttgctgtatcctttaaaaaaaaacaaaaaacttgttattttgaaagaacttaaggctcacaagatgttacaaaaatagtagagtggccttaccctagatccagttttccccatttataacatttcacttagtccattttcggaaccagaaaattaacattggcataatgctattaactaaactacagaccttttttcaatttcgccagtttttccacacatattcatttagttgctggatacttttaattcttgctgatttgtaaactggccttgcttggatacaacaggaaagatactatctggataaagttctacagttttagagagactattaacacattaatgtgttcctttgtcatgagcaataccctgcctacactgcttctaaattttctgatttgtttggctgtttggcatctgaaacaatccaagacaaacttagaaagattaggcaacacaaaacacagtaagacctgttcatagcttgttgtctagaaaaccaggtagcaggatattctagatgcttcctgctgcttctacgtgagtaggattagcactggggacaaaataaggagtttagagtaaaccagtatttcagtcaagagttagttggcac

SEQ ID NO: 6743 - DNA, 1231 bp, Homo sapiens
ttcatagccaaccctaccagttataaagatggcagctctatcacttgattaagtgggaggtggtcaaatattttggtgcctcattttcttcatctgtgagatgggaactgttatgcctggcttactaagagtcttgtgagagactgagaagttgattttgttcatatccaatctgtaaatgcgaagtcaggggaagtaatgtccctgaaataaacgggttcatgccatctagggacaataaatggttttcttgttgtaacttctggttaatatcagtaccttgatgtcatcaccgtgatgacaaagagaagagttattgttgatcttcttggttttggtctgtctcttttcttaggataaagaaaaacttccaaactagaaaaacaggccctggttcccttagtttgcacttgaacccaatatgttgccttgtacatacttggtccctgtcacattgactgcttgggaggcttccagggagaagtatgagaccctgaggggtgagaatgggcagctagcaagaacatggaaattctgcttggcactacagtcataaatagaaaacactgtgtgtgctcaggggagcaggggatgccactgaagaaactcaagggaatgtgtatttgaaggaaatgcaaaaactaagtatttagcaaaatgaaattatgccttgatgactaaaaggcactagaaaggttgtgtctactaacttcagccctaatcagaacagatgcctagaaggagcatttttgtgacaacttcatagtgattagaatcagtggagaactccatcttagtggcaggaatataatgaaactacccacgcaagaacatggttgaatcacatttgcttgacttagggcaaagtacgaaagagagacaaaagggttctcttggaaacaagaagagtgactccagatgtggcctgaataattgccatgttaagttaatgcaaaagatcagaacagggctacatttgcacaggcagtttctctccgggccgtagttttcactgatgatcacctttcacagcattttccccaaccagcatttcacttagtcttctctatacccagcacctcccccggcacccccggcaagcccactatcacttccgacttccaacgtggcatccgtgagatctgtccacattaggcgaagcaggagaacactgagagcagcaggatgggtttggaaagagcatgcctctggaaacacagcttcctgggaa

SEQ ID NO: 6744 - DNA, 1215 bp, Homo sapiens
cagccaccgcgtggcccgcgcgcctccgctcccggccgcgctccagcgccgagtgcgccccgcgcggcctgggggcgctgcggcgggggcaggcgaagactcgggccttgggggttccgggggtacgcggccacgatcgcagggcgggagtgctcctccggcttttctccccccgcgttaataactcgtggccggggtcctatgggggaagggcagggaagcggatgcttattgttttgcaactccagtgtcgggggagagggctttccgcaggatcccccactaacccccgatggactccctcaagccccggtctggcacagacgtgctcgccccgcggcgcagcctggtgccgagggcggagcgagccgggaagcgcggccgagagggcgagggtggcgggaacgcgcgaggcggcatcccggggaaggggagcccagtgtggggctgcacgcaagggctggggattacaggggtttccgggtaaaagtctgagagccaaataggtgccgtgacatcaatgaaacgataatagtaggggcttctgttttttaaggttataagaggaaacgtggtcggcttcaatgagaaagttgtactggctccaagctcttcggtgtccaggacgtacgcgtcttggatccacggaagggggtcatcgtatgggtgtctgaccctcttaggagcctgtttcctttgttttatccgcaaggcaaggagagacaagggaaatgacttcctagctttacccggggttttttctgcaggtggagaagggtggagtcctcccagatggttctttctttgctcccctaacagcctttaagatgtggctacttgtttttcccaccgtttaacaccctccaacttcatttggagcacgggttcctcaagggatcctgagagctgggtgctgggtgctggtttggagaggcaggatgatgcttctcccggctggggagagcagagcaggaaggctggttggcgccatgaggaaagagccacgaggttttagctcccgaaccgactcgtcagtagcccctcctccatgttggttttacatttttccctcctggtctggactactttagcgcaaggagcccagccagacacggcggctggcgctgctggacttctttattgatgaagttgatctcgtccgtagctcccggggttaggaatcggcctgctttaggtcctgaagtttctgttctg

SEQ ID NO: 6745 - DNA, 1052 bp, Homo sapiens
agactcccacactcacccctgcacccatgcctgcacccgtaacgctctgctggtctctgccccacagtggccatcaacctcatcgtgcagcacatccaggacatcctgaatggagggccctccaaacggcagaccaatggctgtctcaacggctacaccccttcacgcaagaggcaggcatcggagtccagcagcaggccgcattgacccgtctccatcggaccccagcccctatctccaagagacagaggaggggtcaggaggcactgctcatctgtacatactgtttcctatgacattactgtatttaagaaaacaccatggagatgaaatgcctttgattttttttttctttttgtactttggaacgacaaaatgaaacagaacttgaccctgagcttaaataacaaaactgtgccaactactactggtgatgcctaattatgaatccaacgtgtaaccagttataaatacatatatatataaaaaaggatctatttttgtgtaaatgtacaaatactgtaaagctgtttgccataagtattttgcaggagggtctgtacttgagtgttttaggactggagctggaatttcaccaaggggaaattgcctgttgtgtcccagggtggggaggctcgggcatctgtgagagacagggagggtggctaaggtccagttgcttttgagtgccccgtggaacttgatgggaatggggttggaaaaccttgattgcctcctctgtcacatgccactcttggagctggagcttagtgatatgtcaatgagagatactcttgtcttttttttttttcttttcttttttttttttgagttgaaattaggtaaaatctcaactcaaaaatcaaactcagggaagaggcccactgaggagaacaagtcttctgcattttcttcctgccctgctcccaccttctcgcctctggctgcttggatagcttggtgactccttcctcaccctcctgcttctctgtctctccaagaagccagagctgcctctttccttccctggaagagattttatgggatcgctt

SEQ ID NO: 6746 - DNA, 1052 bp, Homo sapiens; identical to SEQ ID NO: 6745

SEQ ID NO: 6747 - DNA, 2889 bp, Homo sapiens
tgggtggaggggagcccaagtgagcctgaaggagttctgattatagagtcccgagcctcagtttctgactgcagaagagccagagatgttcatttcattgttgaccaccctagtgcttggtggactgtgcccttagctatcccactgtggctgccattgccagaaacattttggagaaccttttcttcccattgctctcagagcctgttcgagccattcaggtaaattggtctccattattacctggtcacaccagattttcccccagactcagcaccatccagtctgattccccgtttctgggctcagtttgactctaaatctgttttgctattttaaaaagtcaaacctggtccccagcagagcttgccacccggagactttcaggagaccgtgcaggctctgaagggagctcccagtcacagcagccgcctacttggagcaagggaaggctcccaagatgcctcctttgaaagccggtgctcaccaagatcagttcaggatcaatcattatccttgtagtcatgccttgatcagttctgagatgaagcagggaatgcaggcctgggttagtatcctgaggacacagggcccctggccttgatggcactgggctgtgctcaggtgaagcccacccgtgtctgggagagccttggcttttcagtgggcagcatgctcaactttacttgaagctcccaggtgccaaaccatttagtgccttggctgtttatcccactgccttggaagatggactcctctcatctctgagcctttacctagctgcttcctcatctacctgtggtgttgggaccaagcctccaatatctctgaatagcccactcctagcttggaaacagctataagggctgccctgccccttgtcaaatgatcaccaattcttggtggcttggctggggacaatgaacagtgtctgctggggtctgtgacacactgtttctggaacaaggaagggatggaaggctctacccctccgtggcagcccagcatttggccaactctgtatctgaacttgagctttctatggaacaaacaatggtcttagttttttaagagcctctgggtctctgattccatggagagtcaggagtagaattagtggaccagaaaccatgacatttgccatctaggtactctgctgttcagggtggaggcacagatgagcagagtggggtgatgttggttgtatgtgcatagaagtcccctggctccagagccatccagtggtgcttggttctctcttcctgcccaggtattgtgtgtggaccaagtgtttaggaaacaagcatagaagcattatgtcacaggaaggcctggcctctcactccttcacactaatgagccttctactgacccaagtttctttttctcgggcagcctgggaccactatgagcagagagatgggagtctgtgtaagaaggatgcaagtatcctttgatttggagtggacagagcaggtccttgcaaaggcagtgggttaaacaacgggatgtctgtgggacaggccagggaaggagggcagagacagggtctccagttcaccttgccgcagaactagcctaatcatccctgcttctggtcttggccacttggcaatcatggggaagttgactccccgcctcacttgggcttggagctggatacttgtggccacgcccaggataggttgccagagtttcattaggccgctgggtcgggctggaggcttgtgtacacctcggagcagtcgggcagcaggagggccggaagcctggttggtttgtatatgacctctcttgcccttgtgcactttccttgatttagcaaccttgacctgcactggccctcacagctgttggagggaagtagcctcttgcagggaaatattttcccctgccctggaatctcctatgtgcctgttaaagattccagggccaagaactcggcaggctgaggagcagctaggtaggtgggttatgcggttcaggactgcttctggaagggactgcctgtacttctgtaccaccgttgccctttacactttgctcagggcggggtgggggaagcattcaaacaaaacaaggaagggaactgtctggcaaagcataagtggatgcatccagagctcagtcccctttaatcttttgtctctgggcgttctgctgccttcctcataccggggactggcattccaggtcagcttggctgtggtcttagaggcagggagtgcctacccagtcctgcctcaggagcagggtgagtagctaaatacagacttaggcttttttttccccccttttaagatgcttgctcctctcccttttctttttaccaccctacctttattgttagtggttacaaagtgaccacatattatgtactttgctgtaaataaagacagacaaaaaggctctcgccttctgtgtgatgcttggcccagagcagcgaccgaatcctggctgtgtggcccaagtggctcaggaagggccatgctgtgcatgtgtggtgtagatgtcactgggcctgctgtcacgaagcctcatgatcctggggtgtatgtggggcagaccccaggcctcacctgggctcagatactggttcaggttagtggacttgcagttcttgtcaagtgggaagcccgggccagggtttctgggagcctttggttcttaggacaacctggcgctatgttcccctgattccatccagtttacctggcctctgccccattgccttccttaggctggtgacccagccccttccttgctcaaacaaacccttttaaagtaaacttttttgagggagatgggtggaagatgaggaaagtttacattataacaacacaaacagttccatgttgtccacacgcagtgaatggatgtatgtgtgtg

SEQ ID NO: 6748 - DNA, 1918 bp, Homo sapiens
gcagttactctcagcagaacacctatgggaaaccgagcagctatggacagcagagtagctatggtcaacaaagcagctatgggcagctgcctcccactagttacccaccccaaacttgatcctacagccaagctccaagtcagtatagctaacagagcagcagctacgggcagcagagttcattctgacaggaccaccccagtagcatgggtgtttatgggcaggagtctggaggattttccggactaggagagaaccggagcatgagtggccctgataactggggcaggggaagagggggatttgatcgtggaggcatgagcagaggtgggcggggaggaggatgcggtggaatgggcagcgctggagagcaagttggcttcaataagcctggtggacccatggatgaaggaccagatcttgatctaggcccacctgtagatccagatgaagactctgacaacagtgcaatttatgtacaaggattaaatgacaatgtgactctagatgatctggtagacttctttaagcagtgtggggttgttaagatgaacaagagaactgagcaacccatgatccacacctacctggacaaggaaacaagaaagcccaaaggtgatgccacagtgtcctgtgaagactcacctactgccaaagctgccgtggaatggtttgatgggaaagattttcaagggagcaaacttaaagtctctcttgctcggaagaggcctccagtgaacagtatgcagggtggtatgccaccccatgagggcagagggatgccaccaccactctgcggaggtccaggaggcccaggaagtcctgggggacccatgggtcacatgggaggccgtggaggagatagaggaggcctccctccaagaggaccccagggttcccgagggaacacctctggaggaggaaacgtccagcaccaagctggagacaggcagtgtcccaatccgggttgtggaaaccagaacttcgcctggagaacagagagcaacaagtgtaaggctccaaagcctgaaggcttcctcccgccacccttcccacccccgggtggtgatcatggcagaggtggccctggtggcatgtggggaggaagaggtggcctcatggatcatggtggtcccggtggaatgttcagaggtggctgtggtagagacagaagtggcttctgtggtggctgggcatggaccgaggtggctttggtggaggaagacaaggtggccctggggggcccccggacctttgatgtaaccaatgggaggaagaagaggaggacgtgaaggacctggaaaaacggataaaggcgagcactgtcaggagcgcagagatcagccctactagatgcagagaacccgcagagctgcattgactaccagatttattttttaaaccagaaaatgttttaaatttataattccatatttataatgttggccacaacattatgattattctttctctgtactttagtatttttcaccatttgtgaagaaacattaaaacaagttaaatggtaaaaaacaaacaaacaaaaaaaaacagatgctggtgaggttgtggagaaatgggaatgctttcacactgttggtgggagtgtaaattacttcagccattctggaagacaatgtggtgattcctcaaaaacctaggagcagaaatatcatttgacccagcaatcccattactgggtatatacccataggaatataagtcattctattataaagacacatgcacatgtatgttcactgcagcattattcacaatagcaaagacatggaatcaacctaaatgcccatcaatgacagattaaataaagaaaatgtggtacatatacaccatggaatactatgcagccataaaaaagaactagatcatgtcctttgtgggaacatagatagagctg

SEQ ID NO: 6749 - DNA, 1752 bp, Homo sapiens
cctgttctcctgtccctccatcccagacattgatggggacatttcttccccagtgtcagctgtggggaacatggctggcctggtaagggggtccctgtgctgatcctgctgacctcactgtcctgtgaagtaacccctcctggctgtgacacctggtgcgggcctggccctcactcaagaccaggctgcagcctccacttccctcgtagttggcaggagctcctggaagcacagcgctgagcatggggcgctcccactcagaactctccagggaggcgatgccagccttggggggtgggggctgtcctgctcacctgtgtgcccagcacctggaggggcaccaggtggagggtttgcactccacacatctttcttgaatgaatgaaagaataagtgagtatgcttgggccctgcattggcctggcctccagctcccactccctttccaacctcacttcccgtagctgccagtatgttccaaaccctcctgggaaggccacctcccactcctgctgcacaggccctggggagcttttgcccacacactttccatctctgcctgtcaatatcgtacctgtccctccaggcccatctcaaatcacaaggatttctctaaccctatcctaattgtccacatacgtggaaacaatcctgttactctgtcccacgtccaatcatgggccacaaggcacagtcttctgagcgagtgctctcactgtattagagcgccagctccttggggcagggcctgggcctcatggcttttgctttccctgaagccctagtagctggcgcccatcctagtgggcacttaagcttaattggggaaactgctttgattggttgtgccttcccttctctggtctccttgagatgatcgtagacacagggatgattcccacccaaacccacgtattcattcagtgagttaaacacgaattgatttaaagtgaacacacacaagggagcttgcttgcagatggtctgagttcttgtgtcctggtaattcctctccaggccagaataattggcatgtctcctcaacccacatggggttcctggttgttcctgcatcccgatacctcagccctggccctgcccagcccatttgggctctggttttctggtggggctgtcctgctgccctcccacagcctccttctgtttgtcgagcatttcttctactcttgagagctcaggcagcgttagggctgcttaggtctcatggaccagtggctggtctcacccaactgcagtttactattgctatcttttctggatgatcagaaaaataattccataaatctattgtctacttgcgattttttaaaaaatgtatatttttatatatattgttaaatcctttgcttcattccaaatgctttcagtaataataaaattgtgggtggaaattcttatttcttttttaatgtggattttgtttgcagtaagataaagcttgggtctcatggatcatctctactcaccatagcactcttctgcttcctaggggaggtgagacaaggtaacagatttgagaatcctggggtccctctgcttgtggccgcagtagggtcaggcagtgcctctagtggttgctgggaataggacagattcctgcctgctggtggaggtatattccaggagtctgcagtgtcaggacaccaggaggcctgggtgtcggtccacgtgcttgaaggaagatggtggagatgctctagccagttctgcttcctatgatgccccttctga

SEQ ID NO: 6750 - DNA, 1249 bp, Homo sapiens
ccgttttcaaacaaaaactacatccatggtgagctttataagaatcgcgtcagcatatccaacaatgctgagcagtccgatgcctccatcaccattgatcagctgaccatggctgacaacggcacctacgagtgttctgtctcgctgatgtcagacctggagggcaacaccaagtcacgtgtccgcctgttggtcctcggtgagtgtcttcatgtctttcaggagttgtaggaagagggtgggcaggtggcagcacagggagaagagcccaggtgttgagacgaagccagaggcagcaacaaggagctaagactcctcacctcgtccaggctgtcttcagcagagggaccgctcctccctttggaactaaacactattctgagttctccgccaatggccaacagtctcgaggacagagaaggccgacttggagtggtcccttgctctgtcggtgtcctttcctccataccagctcctctttttcataccacacttattacaaagataaaggaaaatcttaaatcctattgcaaagactcattgtgccttaattgggtgctcagggggccacatcatgattctcttatatctttccctgccgtaactttggctacccagcagaaattcttcatgccaccatctgctcacccccatccctcaacagatactccatcagtcaggttctgctccctttgaaatgtgtcccaagataacattcttttcataggaatgacttattattggaatttatagtttgggaaggatctgaaagatcatctactttaatatcctcattttgtagatgaagcccagagaaaggaaggaactgactcaaagtcaaatcgttattggaaaataactgttatttaatgagcacttagtctatgtccaatataagaaatggcaccactgctgggaggtagcaatgctttaaaccaaaacaaagatcttttttccctcttccttttacataattgattgcattttatttttaattaatatgtttaatttaaattaaatttattttaaaatttaatttaattaataattaagatatttttattgcataaggtggttgcctgacgttttgaaagcattatagtgggtccaactatacaactatgcaaactcgcattgtataaagaataactaaggtctccttccaccctaccccctagagaggtagccaatggcaacacaggtaggtattccatattttcctcatgtcctttcaacacacacacactct

SEQ ID NO: 6751 - DNA, 1149 bp, Homo sapiens
tgtgttcctaatctcacttgcttctctcaaaatgttcctgtctcacattcctttcctgggtttgatagataaggggcactagctagttagggagatggattactccacaggttaaagtgacttagagaaagtcacttagtgtgtcttccctgcctctcagacatcacctgcattttagcaggagcttctgtgccttctgtcaatggtggaagtttcagtattgcaagagctggtggaggacatagtggacttggggggaagttcagttgcccctcaagccaccccgggttggcagcactcaggttttgccctccatcgtcttctctctgcctgctctgtggggcttgtctctgttcccagatcaccctgtcccctttctgcctggggcaccaaccgtcaagcttggaacccgcctccttcctgaggtgtttccctctcctctcctacccagtgacctttggactgcttcctcattttctgccctggtgagtcagggatgccataaacaccaggcatgggcagaacatggcgacagacagacgcttcccattagggccgtcacaaagttcactgggagaggagcataaaacgtatatctgttggctagagctcacgccctgcacgtgtccaccaatgtatctccatctgcatttggggaacaggtgacacttgccgtgagcaaagctggctttccaactgtgccctggcccttcccctcctctcgggtcccctcccaggctaaggtcttgctccatctggtgtctgctgcactttcagactcttccttgctggcagcaccttccctataacctacaaacccacctccatttctccttcttcaatcccaaaggggctaaagaaatctgctcaggatcctctgtgcccctctggtctcagctttctcatcttccagtgttaggtgagctcctgacaaaataggctgccctcactgtctctactttttcacctcctagttggctttattgttaaaagagggctgtatgtttgttgcagagcatttgggaaataaaagtacacatagaagaaatctcagattgccccacgatctcagaatccacaggtaactgttattaatactgtattttggtgtattttcttctagaaatattctctctctctctctgtctg

SEQ ID NO: 6752 - DNA, 1260 bp, Homo sapiens
tttcttgcaaagaaggatgggaaataaggcccatgagcccaagaaaaagaggaaatcagtgtgtcgataatagcagtctcagccacaatgtactcctctagtcagtcaatccatgttatcttttttttccccacctatagaacatgtttactgcctcctaagtgaggcaactcaaaatcccacttaccaactgctgcatatgtagttccaggctaggttctccaatgggtgtgcattctgtccctcaggcctgaatgcaacacattatggtcggatcaggataactgccaaaaacagctaccattttataaaaggaggaagaggaaatactgctgtcatatcattaatgaacatgttgacccaggatgtgaggagtcctcctagatttgaccttgatttgtctctctgagagaaatacccttgtctattgttctctttgacctctagctctgccctcctagctgtcttgcttgtccattatcctccatagccacgttgaagacatgtcttccttgaaggctgtatagcttttgcagactgtgtcctgtttatgaaaatttggtggctctgggactgttttaaggtttatgccatgcaaaagcttttggaagttcctggtttctttgaaaatacgaccctttcaaaaactcaataggtttatgatctatgtagattagacaaatccatgtgttactaaccacactcaaagttctttcctagatatagttttcaatcctgattcattcatttgcctttttgtctccgtttaatgatagttatcttgggaggttatctgaaactgtaaatttgggtgtggagtccaagatgcatgttgtaatttgtagtgtaattgttagaaagttttgcagtggagtgtatagctaacaagctcatgaagggtggataaaataataaaatataatcaatctaaaaggagaaaagaaagtagagaaaaagaatacagaaaaagaacaactgtctccacaagaaactataggttaaaaaaaaaagaaagaaaaagaataataagaaaatagtaggatggtagatttaagctcaaatatataaataactacattaaatgtaaatagactaaatactccaattaaaagacaaagatggtcaaactcaatttttttaaaaaggctacatgctgtttacaagagacacaccttaaaaataacgatataggtttgtcatggtagctcatgcctgtaattctagcacttttggaggctgaggtaggatgattgcttgagg

SEQ ID NO: 6753 - DNA, 3835 bp, Homo sapiens
ctgtggggaatgttcttgctggtttccttatccttgatgactcttacagaggtgctagaaaattattttcttttgccacttatgcaagaggcttggtgcagaagctgaaggcagtgtgtgcaaacactcccattccacacacgccccttcccctccccacatcaggtggtgcctttggagcacttttgtgtaggaaggaattcctgctgaactgtagctctcactcacccccaaatcattgaatgaccctgaggcccagttcctgtggtgcaacagtgctgctttctgctactttcaatgggaacagctgtacatgttgcagggcaggatttggttcccaagagcaaagactactgcagacacctgacttggtggttctcctgatttcttatctcctgaaaaatgctcctgctgttggtgtgtttgtttgtttgttccattttgtggaagtttttcatccaaactttaactaacttggcaaagaaaaaaaactgacttactgaaattgggaaacttttcccttcttttattttctaaaggaattctactagactattttccattgataatatatacaaaagaggtgtgatgagaagggtataaggttaccaccttttcctctagagagccacagacttcctttccactggatggtttataaattcctctaaccctgagattcttcttggttctctgactaaaggaggcacttattagccgggctgggatctgtagaacctttgaagaaggactttgagcaggaactttgcacacaccttaagtgtctccttggtttgttcatgatgctcctgctaggtaggtctaaatggcaatacacatctctttattcaatgtagaaagtaattagctctgtaattattttcagggtgtttgtagactatataaatgagcccattgaaaaggaagagtttgtgaaagtggatgaagaggaataagggtaacttggagattaaattcctttttttgtcagtgtactgttgttatgccatctgtaccaaaaaattttccaaaagactggatcactgcagtgcagctcatctaagttccccttcttattggagttaaaggttcccatttggtggctgtgggtgcttgcttaaatctctggtggtcccaagactgcactttttctccctttcgagctggggatgtagagagaacttacaggtgatttttattctgattgcttttgtttgtgtccacaagggagcttggattctgtgtacttgtctctttcccattgtccagtaaggcagtaaatacagacacaatgtgtacttttgtgtgtgattcaagtgggagacagtctgttaaaaggtcagaaacattttagtcccctttaaaatatttcttttagtttatttctatcgtgttttatttcacagatatttaattaccacccctaaatttcctcctcttacccttcaccttccctaaaatccttccaaaatcagtgaactgcaagcagggaaactaacaaatgtccattcaccctttttgtgtggtgtgtttttttatgttttgttttgttttttaactaagcttgaaccaaagtcaatttttagcaagctgctgtactaatggactagttgataacgtgcagttcagacacatcgaggagatagatgctactgacaatttctttttcatttgtctttattaattttatatgaaagttgctgcttgtttttaatcttttatgttggtaaattgtgatatcctctgggcagacattaacttgatgtttaactagtttattaggttggtgtgtaaatagaatgacaatgtcaattactaatttctctcctctccattcactttttctctgttgtagttaaatttaatcttctatcctgacttgacatctctacctttagtctgtggaaatgattttagggctatcagtaatgctgtagctgcccataataatgagtccctcccttgggagtggtgaaacttagaaggaaggattcagggagggaaatgctggtacccagtatactggattagaagttatagcattaatttctcaaaattgctaccaaaggaagtgtggagtcccaagggactcaagctcagtgaggtaagacaaagggcaaggaaaggctgtttgggtggtttttttttccccacatatggtttagaaaatgatccctttcccaaacaaaactcaccaacagactttaatattagaaaagatactaagctttaaatgtcaatacagtggtcttttattccctgccctgtctatattttctactcaatttgggataaggggattttatgtgaagcacttgatgagggtagaccagcataaaaaatctgtttaaaagaagaaataatctttaggaaaagataaatctttagataaaaataaatttttttctctttttttacttatttaaaaataagttgtgaaatgaaaggtacatttacacatgtacacacgaaacactaatatagctttttggtggttgtttagtttaaaatcaactccctatccatcatccctagatattctacttatcgtattgcttcatgaacaccttagtcattttttactttacgtatatatttttttatcatctcaagaaatgcattttgaattgaatgaactatcttctaagctaagatactcaaatttaacttttagccaccttatatgggagagcctggaaactaaaggggaccagggaccatttgaccaaaagaggtgtttggtggagtttctgcatttcaaagaagaaaggccagataggtcatcacaattcattgtattattctttttttttccccttaatgtttatgcaaattttattttatatttctgaatttggttagcacatactaagccaaagactattctaaatgcatttatagtgaatactatgtatgcccatggtaatgggtcctccctaaggagtggtgaatgtaattgtgtgaatcctgcttatcacaagtggtgcaatttggtcataaactttatttataccctgtatacatctgaataacagagcagaaagacctaaaaaagggcttctcacaggaacaatattactatgttgttctaagaaaaaataagttgagtgctgtattagtttaagtgtttctaaagttctataggcagcattttagaattaagaattgtgtatatccattaactgatataattcacatgtccttttatttgttatcagaaagatcaatactatcccaatttattcaacttgttacccaagaaatggaaccaaaggaatccaactttcattttgtgtagaatcatacctacttatacttaatgctagcactgtaagaaataagtcttttttgtttaaaaaagggaagataagattaaagattcttagtgagatcatcttgccaatttgttgtacatctctcattcattgttgggggaaaaaaaagcacaactatacctctttaatgttattttcttccattatccctcatttatttggaaagataagggaaaccttgtctgtattatccagaagcacagatatttgcttgacacaatatttaaattcagcccaatctttaacattaaaaaattttctttttaacttgctggaaaagttggatacattggcaaatatagggaattcatgtcttttttttttttttttttctggtcttgctctgttgcctaggctagagtgcaacggcatgatctcggctcactgcaacctctgcctcccgggttcaagcaattctcctgcttcagcctcccaagtagctgggattacaggcgcccaccaccgcacccggctaatttttgtatttttagtagggacgg

SEQ ID NO: 6754 - DNA, 5061 bp, Homo sapiens
catcctcatgtcaatttttaaagtgataaatcctgatattatacattgcaattagtgtagaataaacgcttggcttatagaactctctgttcttagtctaaagctgttcccaaaccaggtcatcctcacgaaacattcttgaccaagaaaaaagataaggtcattgagataggaagacagaggaaaagcctcttgctgttgtttcttcccaagaaaggagaagccctgccagggagaagtcagtagtattgctgactcactgtatcactgagtgtagggtgtggtagcaaggaggaggcaggggattcacgctgacaggtggctctggcctggctcttggggggccttctgaagaccagtctgcagtttgaggaagggccccaacaattcatttggagagcttggccaaatactttctcattaaatcagcacctaaacttgatgaacttaaagtttgtttattagagttgaaaacattaaaagatgactgatactaatgggagaaaaatactaaagacccaaaatttaaaattttccaaaatggacaagaattgatgggttaatttgctcataactgatatgagtttgcttttatgtgtgtgtggaaagcatttaatgtgtgatgctgttcatagtcctggctatttgatgtcattttcagttttacaacattttgaggatgacactttataaaatggtaaatctttctcagcgtttacaaacttggcttttgagaagggaaaaatcctctttgctatttctgtaagaagaataactgagatcagctattatataggtttgcatggatggtgtccacaatacaaatgtaaacttggacaggaataggataaataaattgctttcatcataaaggccaatcatccatttcttagtccaaggagattaaatataaataggacacccctgagatttccagtaaggtatttgaaaggattccactgggagggcagggaatatattttttctcagagcatccagtttgtacccagttttctatatggtttgtgaactgtagcttttaaaaaaaaattttgtagttttcttctaaccttattcattaagtagttccttgttttggcccttctactcttggccttagctaaaagcagtaaatgtgagtgaattttatgttgattatgtcacctggatctcctttccttcccttctttttctcattgaatggtggtaccttaatttgggtaacagctagcttctggcaccttcataaaatacctcagaatagcttagcattgttgcaaaactggttttaaactaaaaaccaaataaataagtgaaaaaattttataaatagtggaaataattctagctgtagcatttagttgaactaatgtttattatgatcgataaacaagattgatgctgtatgtatttgggatcctgtttataggttacaatttatagggttagggagggttgggtgggggaagaggagatgttgattatgttagaaggaaaacattgctcgtgtgtgtgtttgttttttcttatatctgtcttgccaaaggaaacttgattttccctgtgattggctttggcctctgtggtctggtctgcagcagtgtgtggtggcatgcaggtaacatatggggtgtccagtaggttcagggaccctgagggtgcatttacatcccttcctatggttgcccatgccccccagaccctgccaacctctcctaatgattcattacctctgtacatagcaaaagcataggcaaaggatgaatgcgtgaatgcctggatgtgcagttgagaaacagaggcagacatagacatgcaccaattaatttggagccaagaggtgagtgattgatgtatcttaaatctaggaaagttaaagtgaaacaggttctttgtgttgccctctgtcaagttactgaatgttgtgctaataacacaacactttaaaaccttacttacttttctcataccaaggctagttctttctagaccaaaaacacaaacaggataaaaagcaaaccaagaagttgaaagctaacctgcccacctcacccctgtgatacaaagtgtgaaccttaaggattagttggtgggattgaggagagaattattcttggtgggaacatgaatgagaaatgatgctggcttaggaaaaatcacaagccctttctgcccatactctgggacaaactttcttggctccctgagttcggatatagactgtatctctagaaaggctatttttttaaataaatgatcccacagaacttaagtgggatttggtttagataccaaagacactgctaatgtcattgcttatccttaagttttcaaaacaggcagagggaataggagcaaaaagccaaaatttggaaaagctttactttatctctttccttcccttttccccttttcccagtcccctgctttttgaaggaagtcttcttggttatcctggctttggaaaagagatttattttgttttgctctgctggctctttaaagatggatagttgctcaatctagcagtgatgttcttggaattgctgagaaatttggggagggcaaaagataggggtagaattttttcattatttccctttatctaatacttttaaatagaaccaacacagcctatatgagttcagacaatatttagatgtggtatctccatctgtctcctgtaaaagataagaattttcaagaacaggattacgtggaaaaccaaaagatcttcccttactctcctataaatgttttgttccaaatgtttttatatatgggctctagggagtcaggtagttcattgtttcggtgtactattgataggacacagaaagggagagagggtaaagaaatgtatcactctctgaatattgcatcaaaaatgattaggttgcagaacttcatgaaagctttactaataatcttattgttctgacattatgtaaaggtggtattaatattgtatgacttgtcaaagtgctagataggtttataagtaggtaatagggatgttgaagattagagcacttgaaacagaagttctgggaaaacaaggtgtgtgtaatggaacaccactttgagcacagaaacaaaggtcccttggacctggtagggaagatgtgatttatgattgtttctgtgtccctgtatctgcccaccctgcacagggctccaccacccagggccaccttctggtttaaacccaggacactgtcaaaaagttaagaccccaaaactaatttactgtaaaaaacattgaggactgctgcaaagttttcccttgttttctttgtgtacttgttcatcattgtataagttagccacagcttcacaagagcagcttaaggcttctttcataaattggcagtggcattgagttctcaaacattatatcccaaagtctgcaggcagacagctggatacagcgctgtgtataaatgagacgtccaaacacttgagtttcttaagattgggatctctttcaaatgaaaaaggacagagccaagtagagaaaagactttgtgctcccacccagccttaatgagtctcatggtctaaaagtataggaagaaatgaaatgcactttcagaagctaaaatgacagtgtctgctacaaaaggctgtagttgtaggcagtcggggatgccatgtccttggttccattcctgcgtgagtctgcagaaggcacacactttgtaagagtagagtggactagtgccagcctgaataggtttaaaactgcaaacagttggagaacatggaacaggttggtgcaggaagcctaagattttgcaatcatattataacattggcttttgacaacataaatgttgtatcttccctaaggtcaggtcggggaaagaaagacttccagcttcttacctctgcgtgcatgggcacgtgtgcattgctcagtccgcaggaggtctcactccgcaggaaacgctctcctcccgcataagtctgtacttccatcccctcatctgtggtagtagtgaaggctaggtgagtaagcgtgggctgttctacccaccagaagtccaggagctgttgtatacctcatttctaactcgtgaccgagtgacttgctttaactttctcgaaatcctacagagttgccaagtctgccctccctcctcagtcatgttaaactctggcctatagcatcatgggacctgtagcctagggtgggaccccctaaagcctctgaatgtcgctgcttaaaagctactgcaaactgagggcaaattgcaatcttctattcctttttgttgcaaggggtcttcacaggtctcttaacatctgctttccctgccaccctgcctttaggggctggccagctatccacacccctaacccaccctgtgtttctgacagctggccacacgtcaacttctgtacttgccttttccttggtggggtagaggccaaccccttctcctctgaggcctcagggttctgtttcttttcaggactttgggtagaagggaagacaccaaaggctcctttaagctgactgctgcatacacatttcactttttttcctttgacatgaccaaaaatatccaaatatttaagtttattattattattattattatttgacaatcttatatccaatgggctctctagaagctgcatccccagccctttcaccttttctttgaatgtagttcccaaccttcaattcccacccctaatgctgacaaaaagcttagccaggtcatgatactgctgctataagccaggggagggtggtttctttgttttgttttgttttgttttgtttttcaaatttccagccaaaaccaaagatttcttaatgattgtataaactcaaaacaaacaaaagaaccaaagaaaagggaagtcttcagcatcagtccagtctgtggtgtcctggcacttagaagagtgaggccagggaaggtggggcggggggaccctctgactggatcagaaagggcaggcaagctgcttaccaccttccagggtccagcacaggtgcatgcccctagctttggccctcacaaacttgtgagcatgccctgaaac

SEQ ID NO: 6755 - DNA, 2187 bp, Homo sapiens
gggacttagcacagggcctagggagggtgggagctgctgctggactggcccgaggactccacagagtgggggacgttgaagacactggcgcacgattggctgctctgctgggtgctttaacctctggggctgggcgaatgcacgccacggtgcccttctgagcctttttttcttttcctgtactggaactgcttggaagtggctgtcctgtttgtgagaaaacatgcagaaagattatcaagcttttcatttctctttattgtagttttctttcctttttgcagcaccactgtgcaactatgcattgtacttcacaaccttttgtgctaggtagatgcctgtgactttttaacttggggggtggggggattgcaaatgaaggaactttttacatggatctttttaatctcagttggttgggggaggggggtacttggttcttgggtcacacaagctctatcccaaagcaaaatccaaatgttaataatattagcctgatgcagataccaaagataatttctttcctgcagaaccttagactcgtgtattaagtacgattacccagcacttgcattagtctaacctcagtaattccaaagcttagatgtatattttggtatatttctgggatattaaaaaaaaaatgtcgtttaacttcttgtttgtttcagtgtaatgctcttaaagtcatagcatgaaaataattgaactgtcctattcttagtagtttgaaataatagtatttttgtatgttttgggtgtgtctatgtatgtattaacataacagttttcactgcctaggtgttcataataaaaaagaaaatgaaaaaagttctgagtgtacataatattcaataataatctcccaccaggtgtcaatttagattgcatattcctcattactgttcccaactgggattttgttttcttttaaagagacagtgatcgtgtttttctaaagatgttttctttctctctttcaatatcttaactcactttttttttcttccttttttgtcttaattattaattcaggggtgtttgtccactgttgtcaaaggaggggcacaaggggaattggcccccggcctcctagaactttttgttttatgtactttaaaatgtgagtttgagttcttctttgtggaaacttaagatgtggtgtaaatgattctttccaaaattgtccagcagcttgaatgaggcagtgacaattctgaggtggtttattgggagtccttctacatttctcttagataactctgcactctgggtggctattgtgtagccttactgccccagagtgcctgttagccaaatatttcccctctgataggaatattttctaagaatcagctgataacttgcgtgctggaccttgttatctgtgcccctgggagacacacgttttcttggttttgaaaacctgaaacacaggcaactttacattttggggaattagctgatgcctcctgaagcctgaggaggtggcggggaatatgagcggtgctgtctctctcaaaagtgccctttagatgattccccctcctagggctgcctgcaggggctgtaggcttgggaaagattgtgtaggtgacagtgaatcagaatgaagtggtagattttgtgtagatgcatttgtctgctgtaattttttatatatatattaaacttactgtaactgtacagttcatttctgttgtaaaacatcattaaaccatcttccaagtgttttcacattgttggagtttctttgaaattgctgtgttggtattctggatgcttcacatacagattctcagacttcgcataattcagcttccaaattgttttttccaagtgctctcaggaaccccagaatcaccataagcaccctggttcctgccccactccacccttcctcctgcactccaggaggagctatggccactgcatttctccctcccagaccctcagtgtggtttcgtgggaccctgagtagcagtagtctccctcaggcccaagtactttgtgtgatcaaacacgcaggcccatgattgatcctgcaagggagctcttcaaagctccatctcactgtgtatttgactgcagaactgggaccgaactcaactttttccaaatgtattgtttaaactgcactgcccctctagcatttcttgccaagtcctgaacattcactgggtgggg

SEQ ID NO: 6756 - DNA, 1174 bp, Homo sapiens
gcccggcaagaatttttttttaagtgtcagaataaaattactaaattagacaccgaactgattaatgttttacagtgcaataaaatcatgagtttttgtttttgttttttactgaatggaaagcatttgcatcttcacaaaataaaagtctgcaggtcaccatgtgatttcacaatcccacatggctctaatctataataaatagcaaacaatgattcgttctcctggaaaattaaacggtccttgcgtggacttgtgaagcagtgcaccagactgacattgaaagtgcatacagtcctcctcttggcctttttttatgagtttttggataactttccttaacactttcttctaggtgcggacgaggggctcaataaaaaggcgccctccctccaggcgattccgaaggtcacagtcagactgtggagaacttggagatttcagggcggtggagtcatctcagcagaacggtgctaaggaagaggatggggatgaagtgttgccatccaagagcaaggccccaggatcccctttgtccagtgagggagcagcgggagagggagtgagaaccctgggacctgctgaaaagcctcctctgaggaggtcacccagcaggacagagaagcaggaggaggacagggccacagaggaagccaagaacggtgaaaaggccaggcggagttcagaggaggtggacggccagcacccggcccaagaggaggtcccggaatcgccccagacctctggcccagaggcagaaaataggtgtgggagccccagggaggaaaagccagctggagaggaagcagagatggaaaaggctacagaggtgaagggggagagggtgcaaaatgaagaggtgggacctgaacatgacagccaagaaacaaagaagctggaggagggagctgcagtgaaggagaccccccacagtccccctggaggagtgaagggcggagatgtccccaagcaggaaaaaggcaaggaaaaacaacaggagggggcagtgctcgagccaggctgcagcccccagaccggccctgcccagctggagaccagcagtgaggtccagagcgagccagcagtccccaagccggaggtaggtggcctggctcgttcacatgcagaaggcagtgccagggccagtgtgtgcctctgtcacatgtcctgttcc

SEQ ID NO: 6757 - DNA, 1234 bp, Homo sapiens
tttgggagaccaaggcaggtggctgggaggtggaggttgcagcgagccgagatcacaccactgcactccagcctgggcagcattgagcattgagtgagcaagactccatctgcaaacccagcaccttgggaggctgaggcaggcagaacactccaggtcaggagctggaggccagcccggtcaacacggcaaaacccctctccaccaaaaatacaaaaaccagtcaggcgtggccgcacgtgcctgcaatcccaggcagtcggcagcccgaggcaggagaatcacaggagcccgaggcagggaggttgcagcgagccaagatcacggcagtacagtccagcctcagcaacagagggagaccgaaaaaaggaggagagagagggggagagggagagggagagagatgttgcatttctttccgtatgaagtctttaaaagaacctttcatagcatgcacattacagagtttaggaattctgcctttgagaatagttcatgtgttccttttttctaattgcagtttttccactactcccaagggcaagtgtaccttgggaattatccaccatttaaagacagaatcagctgggctggagaccttgacaagaaagatgcatcaatcaacatagaaaatatgcagtttatacacaatggcacctatatctgtgatgtcaaaaaccctcctgacatcgttgtccagcctggacacattaggctctatgtcgtagaaaaaggtacttccttgagtattttggcagtaataatgcagtctcctttatctcatgtttggttggaaaacatgagttgcatttcatggtgggtttggagggaggatttttgccatacagttgtgctccctgttgccacgaacctgtggctctaccaaacacacttggagctgggaaacttgttgctcattctgacccagagtggctgatttctccatttttattcctaccgtctggtgcctattggtctaatttcaggagtatgaatttttcagtgttaattagaagaaagaccaaattcattatgtttggatgtgatgggcagtgggaaagaaggagattcatactgttttatattctccaggagaaagctttcaacaacagcacagttatttcttccttttgattttgagaacaaacaggaaatgcaggttctggtgtctcatttttgagacaaagtctgttttgttggagagtagatccaggtaaattcacacctccggttt

SEQ ID NO: 6758 - DNA, 3637 bp, Homo sapiens
tcctgaagacattcaagagggaagtctttgctttggaaccctgatgtgatcacgttaatcattgcttctatgcctgtagctgaaggaaccgccagcgttttcagtcctctaatccttctgcttcccttttccagggcccagtcatatatgcacagttagaccactccggcggacatcacagtgacaagattaacaagtcagagtctgtggtgtatgcggatatccgaaagaattaagagaatacctagaacatatcctcagcaagaaacaaaaccaaactggactctcgtgcagaaaatgtagcccattaccacatgtagccttggagacccaggcaaggacaagtacacgtgtactcacagagggagagaaagatgtgtacaaaggatatgtataaatattctatttagtcatcctgatatgaggagccagtgttgcatgatgaaaagatggtatgattctacatatgtacccattgtcttgctgtttttgtactttcttttcaggtcatttacaattgggagatttcagaaacattcctttcaccatcatttagaaatggtttgccttaatggagacaatagcagatcctgtagtatttccagtagacatggccttttaatctaagggcttaagactgattagtcttagcatttactgtagttggaggatggagatgctatgatggaagcatacccagggtggcctttagcacagtatcagtaccatttatttgtctgccgcttttaaaaaatacccattggctatgccacttgaaaacaatttgagaagtttttttgaagtttttctcactaaaatatggggcaattgttagccttacatgttgtgtagacttactttaagtttgcacccttgaaatgtgtcatatcaatttctggattcataatagcaagattagcaaaggataaatgccgaaggtcacttcattctggacacagttggatcaatactgattaagtagaaaatccaagctttgcttgagaacttttgtaacgtggagagtaaaaagtatcggttttattctttgctgatgtcctttctgcttgaaataacagtcaccatacagctaaaggagaggagtttctttccttctaagtaggcagaaatggtatcattatgttgccgctctccaatctcccagagctcgctctctagagaatcaccttctttcgcttttttttttttttttgaggtagagtctcactatgttgcccagactagccttgaactcttgggctcaagtgattctccctcctcagcctcccgagtagctggaacgaactatagttgcaccactgcagctggcaagaatcaccttctttataaagcgtcagtcatgcttccagcaagaggcagcatcagtcatggctttataacagcttcatggtgcctcaaagactgttgaggttaatgagagcctagattagacagtttggctgtccttccctaaaacttgttttctcctattcactactccccaccgcacttaaaatctatgagtttttactttttactgggaatggaaagtgtggtgaagatcattcaacacttatgttgtcatttctcccattttctgaatttttttttaaatttccccccttttaaaattgttcgaaagcccacagttatggaaagaattactgtctagatggtctgcagaacgtgtttggggtgagtgggagtgaggggcaatgttactttttctccctgtagtttggagtccattatgagctgctgctttttcttctcatcttgtcatcttctggggatgtttgaaggctgagttccaacagaattcacaaagggaataaaacaggattgagattttgaggtgtgcacaaggtggtaagataaagggcatatgagcttcaaaactaatgctgttgcatacatgaagccttttgttttttgaggagctatttttgttattcttgtaacgctccaccttacatgccacatctgtgtgagtcaacagggatcaggtttggtcaccacacatgtctgaagctgggcagcgtctgctctgtgttctgtgtggaatggagaaaaaaacgcctgccctgctgccttccatgttcataggcccagcccaagagagtgacacacagtgctggccctgagacatttccacaaagtggtcaactctgccttgcatcctaaaactttttgggcatctattttgaaaactataggagcctttggaaggcctcttatgtttggaggggaagggtgttgagattgtcaccatccttcaagctgagactcctggtgagcctttgccaccatgaaaaccacatagctgaccagggctgtgcttgaggtacagaggacacacattgtagacaggcctgtgtcatgtttccttacagtcgttttttacagagaaaaggggcattgttttttcactgctttctcaacagttcctgtgaataaatgaaacatttcggagctccctgagagcaagagccttcacttcttcttgcggtgccgggaccatgtgttggtgaagctggtgctgtgggggccactcactcgaatgacacctggaggcctgttcctcccttaccactcccttccccagcccgacttcttggcctcctgcccaaccagacacctcaaactctgtcagtgccctggcattctggcagagaatcctcaccagttctcaccaaccttccccccaggcaagggcagctgccagcatggtgctctgccaggacaggtttccctgaaggaagctgctcacactgagatgagcctctcagggcaggacctcttcccaagccctgcacacccacccctgcagcccttttggctccccttttccctgtgcctcagcactcctttcctggttgcagataacgaactaaggttgcctaaagggcagatctgccctctccatgtcttcgtcctggcaaacagggtcgtcttaaaattatgcgctaattctgtatgggagcactcaaaaggcattacttagagattgaaatttcaaactatctctagtttttcaatggaaatatatcagctagggaaaaaccatcaagctcattattattttttgatcttcagttgtatttttgtgaatattttaatacatctttttcaatttctgaattgtgttgtgtgctcattttgaccagaatagaaaaagagatatgcctttcactcatatcattccagctacacctgccttcttttcttcaaaaatgccgtccgtgtgcctgcttctgggcctttgcacatgctgttccctgggcctgaagcatgccttctgccaatattcctgtggtttgctctctgacttcctttaagcctctgctcaaatgttacctcctcagggagaccttctgtgatatataaaagagcaagccccccaccccaccgcctcagccttcctggccccctcagttctgctctagttactctatttctctccctctttcccagtacacacttgtctgttctcccgcattagaacatagttaacaagagaccagaaccttgctgttttgttcactgctccgtctgcagtaaagggaacagcacctggcacttagctgctcaatacatgttacgtggatggatgagtaggtggaagcattcatccattcag

SEQ ID NO: 6759 - DNA, 2355 bp, Homo sapiens
ctacagtgcgacaaaccacccatccagctctgcctagagtgggttaatatgccacaattcgaaaagagaaagagaatgagtgtttcatggtggccccagacagtttggtggccgcagaagttgagaaggctcaaatctggagatcaggtttgggttggagtcgtgcgtaagggagcggatgtcacataggtggggaagggagctgacttgagatacgttggcttaggaagagatgttgcaggagagagggtgaaatgcacaggctaggagagtagacggcttcacttgaagggaagggattggggctgtggatgcctctagaggcagttgtcagagggcctctaaaaggtccattttagaggaagcgagaaggaaggtctcgataaggagccattcagggtccattacctgctggatggttgtacaacggcctcaatttctcgggcagcatcagctccactttatcgaggagccggtggtaggtggcccgcaggcctcgggcaccggcggccgacatcgccgccgagggatcgttggcagccgggtgggagcgtggctgtgttctcgtccctggctgacaacgaaggggagctagtcacttttcctgccacgacgactcgcgtccgcctctcgcctggagtacccttcccgcggctttccctgcccgctgtgaaccgaaaagctgcggcccgcgccccgcgaaggttgagggggcggaggctgccgactgccagcccccggtccgcctccggcccccggcaggagagagggaggagccatggcaacaggtgccaaaataatcacctcaccaagtctgcgctgcgccctgctggcagcgcgcttgcgcaggccgagctgcccgccatgattggcccgccccgaggcgcgggcggggtcgagcggaaacctcctccttctccccatgccctcgaggccatgttggagaagggaaagtgaagctgcgctggttctactgccctttcactttgattaagcaggcccgtagttaaaatgggtttttgggccttcagtgcctaaagatgatgccgcacaattctcttgcttcttttcactggagactcgtgagcgagagactacagaattgagtagcttctctctctactcgtcttttatccctagcgacttaaggatctggttagagtggcccgaatgcattcttccagggtgagggcagccgcagcacacaccagcctcagtccccagggtggtcgtcatctcgcgagaaagggttggcggggagggtatccaggacgaggagagggaggagtcgccatcgcctccgcctccgcctcctcctgttggaggggggctgagggaggagactgttgctgatctttggatgttctggttagtctaagaaggagagtatgaggcgagctccggcccgggtgcggccgggcttcaggggcccaggcgccgctgctgccaccgccatctaacgctgcgccctggaggcccggcgcgcggatggtgccggtgcggctcgggtgttgaaacgggtgtcccctccccctcctcccctcccccacgcggtggtctcccctcccacccggctcaggcagagccatgtctcggggtggctcctacccacacctgttgtgggacgtgaggaaaaggtccctcgggctggaggacccgtcccggctgcggagtcgatacctgggtgagcgggggccccggggcggaggcgctgaggtcgccgcctagagtgggggagggggcacgctgccgggtctgttggaggtgggacggcgtctcggtgggggcgcccggagactctggggtgttgggtggggccttggttgccgaattccgtgccggtgcctcccccagtcaagccccctgtgcatgctgccagccgccgcccttgctgggtttttctcggagggccgggccgtgggcagaaggtactggcttgtaaaggtgttggggtcgctgatgggttgggactcgggagacttgcggaacctccaggagctgccgcgtttagagcaaaagttagctcttttgctcttttccagcgcgctttccccgctcagccgaagaacctaagttgttgcccaccctctccttcaatctccagagggtttaggtgtcggctgcgacgcgttgaccaccctcagggacttcacgctccagacagaatccgtgtaaactgtttttgcggcgctgagccaaaacctaaaagtgatagctgagctctccccacccccgcgcgctctcccagttccactctgctcttcagttcgttttgaccgcttaaaggtggtgtagggtttcacgttcctcttcccacccctggaaaacacacttggcatttacagtttcgtagtt

SEQ ID NO: 6760 - DNA, 1141 bp, Homo sapiens
gagctcttctcaataaattctgagttgtttctaaatgcataagtttttatccttttaattgaattttgttatttgattgaaattaacaaagcagcttaaatttttgtgtataaatcagatgagttaactgattgttttcaatttctgtttctttcctagtatcattttgttctatgttcattttgaaatcttttgcttatggaggactttttatttccatttggtttaattacttaaatattcctagagaaatatatgtatctaattcatcgtagttaaatagaagcatttggttgtatatgtattgtctcataatttaatgaccagtaattttttatcagtaatttgtttatagtattcctctatgagacatgtgttttgtttatatccttcttcttttttaatgtataatcaaattcttattattttctattttattactgtcttttcacctttcttttcctatttgtgtcagaatttttaaggggccctgagatagctttgcttcgtaagcgcctgcaacaactgaggcttaagaaggctgagcagcagaggcagcaagagctagctgcacatacccagcaacagccttccacttctgatcagtcttctcatgagggctcttcacaggaccctcatgcttcaggttattaatgtcaagtgtccttaagcagctgatagaattgttttttaatactgctactgtgtaataaggtgcttcccttttcccattcaaaaagagagctaatgcgcttgcagcttacccctcctttccttgcatatgggtggtattcaacatcacgtgttagggggacagattggcagcagcatctgccagagaggtgaatataaaataatcaattttaaaagttgtaatatatttggagaggggcaaatatttattacttttaaagctgatgacctctttttgaataattagtgaatttagagcctgcattgatctttctattgaaagtttgcatatgctgaaatgaatctatgctttatggctcctagctcttcttcttcttcctctttgaatgttagccaatattcctaaaacctagtaatgctagattttagaattatagtattatttggccatactagcatgctgactaaattatttccttctgtcatt

SEQ ID NO: 6761 - DNA, 1255 bp, Homo sapiens
cttatgataaagtaagtgtggaaaatgatataccaaacaaagcttaaagaggtttcttgctgcaagtcttctcagaggctttattacgctacaggttcttgtgaatctcacaaagaggtatacacaatgtagtatttcccaaattttgtgaccacattgtagagtatcagaacactttggacaacagtgaccttcatcttcttattctgtaattaaattattccattcaaaaataaattgagtgtgaatttattattaaaaacttaagcctgggcccctccccgccccgcctcccggcgcgggtggccgaggcgtagcgctgcgacccccgcacccctgcgaacatggcgctgcgagtggtgcggagcgtgcgggccctgctctgcaccctgcgcgcggtcccgtcacccgccgcgccctgcccgccgaggccctggcagctgggggtgggcgccgtccgtacgctacgcactggacccgctctgctctcggtgcgtaaattcacagagaaacacgaatgggtaacaacagaaaatggcattggaacagtgggaatcagcaattttgcacaggaagcgttgggagatgttgtttattgtagtctccctgaagttgggacaaaattgaacaaacaagatgagtttggtgctttggaaagtgtgaaagctgctagtgaactctattctcctttatcaggagaagtaactgaaattaatgaagctcttgcagaaaatccaggacttgtaaacaaatcttgttatgaagatggttggctgatcaagatgacactgagtaacccttcagaactagatgaacttatgagtgaagaagcatatgagaaatacataaaatctattgaggagtgaaaatggaactcctaaataaactagtatgaaataacgcaagccagcagagttgtcttaaattagtggtggatagaagacttagaatagaaacttttagtattaccgatggggaaaaaaaaactactgttaacactgctaatgaaagaaaatgccctttaactttctaatgattatagataaatataatatgcgtctttttcacaatatcctatgatttttagactaggctctagtgttcagaattcatgaaattatccatggtaaaaactagttataaaaattacataattcaaagataacattgttattcttaagccttatataatattgtaacttgcatgtatccatacctggatttgggatgaaatacttaatgatctttccattgg

SEQ ID NO: 6762 - DNA, 1509 bp, Homo sapiens
ggcctgacctgtttgacatttgagggcctatgatgtgctaggtgctgtgttaggtacttccaaatgctttatctcattttaccccagtgcaagtgtgatatagtgaggatggtgaagacgtgggtatggttaagtcatgagttcagatcccgtgcttccaattacatgggtgttttcaaacaagtcactacttatgagtttcctcatctgtgaagggaagtttagtcatctgtttcaatgtggagacacacaggattgagggagtcctccgtcacagggtgactgtctggattctatgaggaaatacttggaaagcatgcagcacaatgcctggggtgcagctgaagctgagccactggtgtttcttcacagtatctctgtggggagggtgtattattcctttttatagggatctctataatgaagtgagaatcttgaaaatataagtgttatcctagatgggaggtgttaaaggtttttgccttgggaattttgtcatatttgttgcacagcaaggaaggactttcagaaaagcagggatgtggtgaggaagagcaggcaatagagagcagggaggaaaggctaagtagcatctggaacttgagaagtctaagggagccaaaatgagattttctattaaaaatgtctatcctcagccgggcgtggtagctcacgcctgtaatcccagcactttggggggtcgagatgggcagatcacctgaggtcaggagttcgagaccagcctgaccaatatggagaaaccccgtctctactaaaaatacaaaattagttgcgcgtggtggtgggcgcctgtaatcccagctactcaggagcctgaggcaggagaatcacttaaacccaggaggcggaggttgcagtgagccgagatcgcgccattgcactccagcctgggcaacaagagcgaaaccccgcctaaaaaaagaaaaaaaagaaaaagtctatcctctatgctactggcctgtttgtacaaagataaaatcattctaatttgtccggaatgactatcaaagatgatcaaatccccagggcctggtgtaacgttccaaatcatagcacaaatacagcttgaccttccttacagtccagaaaggacattctccctgagaaatgcccttggttgctgaggacagctctgtcctgtagtgacagagtgactgcctggctgtggctcttgggttcacagaatccctaatcctccaagcccctaagaggcagggcagggatgctacccacaatatatgcagaaccccagatggagcctgtgggagagagaggaaattaccgtcttcactgtaggcaaaggagaatggctgtgattagccatatatgcctataagaaggagcagagccatactgtccttgtgggttgggagaggggacacagaatccagggcaattgtctgaggtctcaaagtaagttaagccagagtcaaagccaaactccaagtcttggccaaggggatgagaaaagcaaggagctagtcttat

SEQ ID NO: 6763 - DNA, 1168 bp, Homo sapiens
atttagtacaacatattttaactgtggtgatagaaattcagactgtaggaagaatcactcagaatataaagttccttttagtaggaccctctcctctactcggcccttctccccacttcccttccatgctgggccggcagatgccatgcttctggggtctggtcattgaggcagataaccccctacttcagataacttggctgcattttttgtgtggctgacgcagccccaccggctgtctgcaaactccctgaaacaggatgacaggcgggtgtttcttgggcacgtgctgcggcgcagtcagctccacttgatgatgggtttggatgaacgggagaagaggggtggaaggggtgttgagaggggagaagaggccaggaggactttagattgtagttacatatgcacaatctgcccgttgttttagggacagatatgatgctgcttgaggactacacgtctgatgacaaccctccctctcactgcacttgcccacccaagagaaggagctcggtgacatttgaggatgaagtggaacaaatcaaaggttggcttctgtgactgattgcttcaagaaaacatagggaaacggaaaggatcttaggacaattccttggctcaggctggctcccatcccggaatatatcagggctccatccctttgctcactccctggttactcccagccctgttggtctcacctgagtccttaggcacccagttctcagagcaagcagcatcgaaggctgggcaaacaatggctgtcaaactccacacacacacacacacacacacacccacacgtgtttacacacacagcccagatcctgggtgaggtatggttataactgaacctgctttccctgagcctcagtttcctcctgtggaaaatgagataatggcccaatgagtgtatctgctttgctggaggccaaagctgccatcttgcttgtccgtcgctcctacagcggtgatggcccttgggtcctgtgaggagaatgagttctgccgcagcccaatccctacatttttctactctatatcttccccgctcacccccagggactgttgtttactctggaacttggaattcgtttcccatccagacatgctgattaggagagtgacaagagccatccagataccaatatgactgggctgtggattt

SEQ ID NO: 6764 - DNA, 2505 bp, Homo sapiens
ctcccaagaaactgggactacaggcatgtgccaccacacccggctaatttttgtatttttagtagaaacagggtttcaccatgttggccaggctggtctcgaactcctgacctcaagtgatcctcctgcctcggcctcccaaagtgctgggattacaggcgtgagccaccatgcccagccccatgtcctttttaatgcctggattgactttgtgggacatgaggccaaggtaccttttaagatgtcacctgtatagcatactagtagtgaatgtaggctttgaagtcagatgcatctggctgtgagctgtgactagtcatatactagttgtgtcattttgaacaggttacctaacctctggctcctcagtttgttcatctgtttaaaaattgtgggaataacagttcctgctgggtcattgcaagatgtcagtgagacgtgtcaagtgcttagaatagggcttggcataagtagagtctcagtagggtaggtgttatttaatcccagaaataactgacaactttggaagatgagagtgaatgtctccgatcattaatttatttaacaaatacttatctagtactatgtgcccggcgctgtagacactgccatgttttatctcattcaatattcacagtgactgcccagtgaatggtattgcctccatcctctgagaaggtaaagagcctatcccagaccccacgagtggaggcgtcagggaggggttcttggcaggagatgggtcttgtagaaaggcttctgctttgctttcactcacggcctgtggccagtttgctcagacagctcccatcaggacaccattggcagcttttgcatgaccctgcctcccagggtcttcctgcgtttttccttaagttgccttattctttggttgtttccctacttgtttttgttagactgtgggaggaagaaatccatttcaaatctgctgaaacctgttaccaagcaacagcagtgattaaaagcaacctgatgagtgagtaaagaattagggtttcagacctgtagttaatgatggtctctgtctccctgctgccctgcattcccttcccttccgttcactgctgggtgaaggagggcttgctgcattttggaagttaagggaaccaataaggtgactcttttgcagattggaatatggtgctcagccagccatatggaagcactgtcctggcgtgatctgccctgggctgttggctctctgagtgctgtcttgggaggagcactgcccttcagaacagaagagatggcttccagtcccctctcccccttctcccagtctctctgaggctgcttgttgggtattgggcgtgctgtgtactaactcactcccgtctcttgtctcattatctgaaatgcatccccttttgcagaaagggctcaaacggagccttcagttctgctcctctgcatagccgtagctcagatcctagctcaagatgtcttgtctgggaagggcaaaacatggtccccagtgtagcattttcactgggttgattatctcagtggtggatcatctatcacccttgtgtggtgactttgtgaattatctgcctgagtgccacttcccttccaccctaatcactgcaggctcagggagcaagaaataaaatcatgaaatgcattccaaataaaattaccttttggctgggtgcagtggctcacacctgtaatctgagcactttgggaggctgaggtgggtggatcgcttgaggtcaggagttcaagaccagcctggccaacatggcaaaaccccatctctacaaaaaatacaacagcaaaaaaatcagccaggctagctggtgtgcgcctataatcccagctacttgggagggaggctgaggcacaagaattgcttgaacccaggaggtggaagttcagtgagccgagatcgcacccctgcactccagcctgagcaacagagtgagactctgtctcaaaaataaataaaaaaaaaaatcactttttgatacttctgttaaaatagataataaggaaccatatcttaaagtgtggaggatctggcttggcttctgtttttgatagctctatgaaagtgacagatttgcatcatgagacttagtggaatgaattgggaaattgaagggcagcccagtggctatggattctattttctatgggactgtctacgccaggctttattttctctttgctcagataacttctgactagagtcgacggtaggattataaatggtttaaaatacgtattctcaaacctcattttcagcatataaatttttaagaatcagtgtttaaaggtacgtgaaaccatttgctagatttttgtcctagttttttttttttaatttaaaaatcttaagttttttttagtaagcttaagatgtccagtagtttatttgcagacagcatttttaaaaagtgaatagatgtttaactgaagttaaatacaaatttatgtctgtgtaactcttggtaagatataacaaaacctagacatcta

SEQ ID NO: 6765 - DNA, 2058 bp, Homo sapiens
gtcttgtttttgagtacacatagtgatgcatgatgtgagccattaaaatttcatttcattctggatttcagcgagatgaagataaggataaagttggaaatgtggagtattttggactgggcaactcccctggttttcctctgcagtattatccgtactatggcaaactcctgcagcccaaatacctgcagcccctgctggccgtacagttcaccaatcttaccatggacactgaaattcgcatagagtgtaaggcgtacggtgagaacattgggtacagtgagaaagaccgttttcagggacgttttgatgtaaaaattgaagttaagagctgatcacaagcacaaatctttcccactagccatttaataagttaaaaaaagatacaaaaacaaaaacctactagtcttgaacaaactgtcatacgtatgggacctacacttaatctatatgctttacactagctttctgcatttaataggttagaatgtaaattaaagtgtagcaatagcaacaaaatatttattctactgtaaatgacaaaagaaaaagaaaaattgagccttgggacgtgcccatttttactgtaaattatgattccgtaactgacttgtagtaagcagtgtttctggcccctaagtattgctgccttgtgtattttatttagtgtacagtactacaggtgcatactctggtcatttttcaagccatgttttattgtatctgttttctactttatgtgagcaaggtttgctgtccaaggtgtaaatattcaacgggaataaaactggcatggtaattttttttttttttttttttttgttttttggctctttcaaaggtaatggcccatcgatgagcatttttaacatactccatagtcttttcctgtggtgttaggtctttatttttatttttttcctgggggctggggtgggggtttgtcatgggggaactgccctttaaattttaagtgacactacagaaaaacacaaaaaggtgatgggttgtgttatgcttgtattgaatgctgtcttgacatctcttgccttgtcctccggtatgttctaaagctgtgtctgagatctggatctgcccatcactttggctagtgacagggctaattaatttgctttatacattttcttttactttccttttttcctttctggaggcatcacatgctggtgctgtgtctttatgaatgttttaaccattttcatggtggaagaattttatatttatgcagttgtacaattttatttttttctgcaagaaaaagtgtaatgtatgaaataaaccaaagtcacttgtttgaaaataaatctttattttgaactttataaaaagcaatgcagtaccccatagactggtgttaaatgttgtctacagtgcaaaatccatgttctaacatatgtaataattgccaggagtacagtgctcttgttgatcttgtattcagtcaggttaaaacaacggacaataaaagaatgaacacattcctcgtgtgtgattcactcttgtctaaatgtcccaacctgtgacttctttactttccacaccactaattatccaagatcttgaagaagtattgaacctgaaacggagaaacacataatttcttagttcagacaaattttggtcttttccacttaacagagtccaagaggttggtcaggacttcagacactggcataccccttcccaaagacactaaaagttaatcaatcaatcagaggcagagaatcgatgaagctccagtttgaagttccatttaaaaaaatcatcttgcagtgctactgctacttcactcagtttagaaaacatgaagtgttggttcctgctattgcttcactagacatatgtgttaaaaaaaaaagttgttagcacttcagtttttaaaaaatgaggttaggtttgtggttcagtaaattaaggttcataccttgctttttggttcagggattggcctaagtccttatttagctgtatttaaaaattagccttagtgtgaaagaagataaaaaagctttccaaaaaacattttccagctataat

SEQ ID NO: 6766 - DNA, 1195 bp, Homo sapiens
cagcctgggccacagagcgagactccatctcaaaaaaaaaaaaaaaaagacataatgatataacctcattttcttctatgttttcctgctttcctaccaatatctgtaaaacattaacgtcattatttaaaaaaatatgtaacctagataatatagtaatcagacatcattgttaaatttacagcttaaggaagtaagttgtcttttcaatcagattagtcattctgtttttttagtaatagttatatattaatgaagtgaaactttataggtaggtatacatcaatgaaatcttaggcttttaccatctatattgcatacttctgacattatatcttattttccttaggttctaagaattttagatccagttacctgcaaagagagttcacctgataatccattttttgagtcttcaccaaccaccttacttgctacaaagaaaaatattggacgatttcatccctatactagatatgaaaatataactttcaattgctgcaatcactgccggggagaactgattgccctttaacagtcaatatgttggaggcatgctaaggtacttccttattacccaagagtcattattatttgggagctggggttcttacaatgctagaaataatatcacttcctatttacataatgtatacacccaaagatattttatgtactagactccagattaccctttcttaataaatatctcagggtaaggaaagaaagaaactgtatagatatatttaaaatagagaatactttccaagcaatacatgatacttttcctaaaagactctaaaagaaaaagattctgtaactctcttttagcaccaaattattgtttatcttgctggatattttatatgaacagtgttaatttagatgcactaaagcaaaggtaggcaaactacaaccatgagtcaaacatggccacacccattcatgtgctattgtctaagctggttttgcactacaactgcagagttgaatagatgcagcagatcctttacagaaaaagttttctgacctcaattctaaagtaattgtagtagggagctggaggactttctttccctttatggtaattttttgagctacaaaagagccttgcagaaatgggtgaagggattaatcttttaaaaataaatgctatatattaggaaaataaaaaatattttagagccaagttaac

SEQ ID NO: 6767 - DNA, 1147 bp, Homo sapiens
atcagcttgaaggcagagaccaggactgaattataacaataacagcaacaacaataaaagtaatactaacagcattagcattgtgctaataagcatttatgatctcactgatgggtaccaacatcgctgtaaagtgagaactactatgaattccattttgtaagtgaagaagggctcagagatgaagtatctcaatcaagttcacgcagcttgtaagggatgaagtcaggattcacactcaggcagtcaggctttatttagtaccaccgtgctgtgatgctgctttgtgtcttcagggtctggcacgtggtgtaagtatgcaatattttttgaggctttatggacaaattctgaatatactttattatagagtaatcctcttgtcattgataattcaataaactgcttttcccccttctagtttttgatctatgccagttattttgcactcatcgctgtggttttcctggccagtggtgcagtcagtgttatgaagaaatgtagaaagctggaagatccacaatcaagttctcaagtaaccacttcataatatactgctgaagggcttcttcttatagcaagaactctgcacagcaactgcctggatgtgtttgattttttaaagcgtagacatatatttatgaatgtgcatttcttgacttcacagcagccacttgactaataccttgtgttccgggaataacatgatactattcagaggagccagaagtaaagtttatttcatggattatttatgagagctaatttaaggatgactttttttctgattcaaaagtgaacttgattttaaaaaccagtcaagagcaatcaaagcagcacatggtgttgtatacttcattagcaagtgagtttggtgttttataggtcacatatgtctgtatctacttagccagatgcttggcctggtgggaccagggctccacagaggccacaaaatgttgcaagtcatgatggatggaaatatgttctaacagcatctgcctctattcaatttaattcttatttctgtgttactcatgtacattggtctttctacatagttattctatcactggcaatatttgttctggtttagtgttctgtattttaaggtgtacgtatcatttctaattttaagttattttaa

SEQ ID NO: 6768 - DNA, 1102 bp, Homo sapiens
tgtaatgtggcttagcgtgactgcccagactggtccagcagttcctgctgggggcgagggggcaatattttgacaaagaagtgaaaacagcaaagtgtactttggacacggcttagtaaatattcattgactgaaagtaggcaaccactgcttttctgaaaggatcttccctctacctccttcacctgcttcctgtccataccttactttgtttgcatttggcagaatgggtgggcttaatcaagtaaggacaggacagaagtacagaacatcttaatttgtcttgatttttaattgggtgaggttgtgtccaaggatatcctgcccctctctaccttaagaccaacctccagggataaaggcagatggtgaaacataattgacttttaattatagtgtttcttgtattgcgaattgttgcttcacagatgttagttttgcttctcagatacaaggtgatgtctttgaaggccttctgtgatgttcagggtaattgagagcacgtagtccatcatcaagagtttcttgctgattgattttttccctagatgagggcttacaaataaagtacttcagaagcgcatagtgtactttagaaatgtgctgacctatttaagtgcatggtcaaaaccagcacttgatttttgcagaagaaagacaatatataaactgagaaagaaattaaacccaaagtacttccacaaaaccgaaataaagccgattcaacaccctcttccttgaatacaacaaagggtgaaagctgaggtctcatgttctttttcctactatcagtcaaggggccacttgagagctttttcttttttcctacacctgttccttccaccctgcctccttgccccaggtgctgtaaaatactcctcccatttaaaccttactcttctctatgtgggtagtagtcagtcacttcttttgagtagccactcagtaaccctgcataacaggtcagaacaagagatggcactaccggaatcatttgcacactggcgagatatagttactcatagtttgttgtttgcagtttgtttgttgcaatgctccgtcattttcaagggcacttgagagagaattaagaatcagtatt

SEQ ID NO: 6769 - DNA, 1238 bp, Homo sapiens
taggaggcatttaaagccatgaaatgagattgactgatttatccattcgggaaagattacgtttttgctgtacccagtgctgttttaatcattggcaatgcagtaatgaaccaaactaataaatccccactgttagcctgtttagaggcaataaacaataacaacatgatgatatgtgcagtatattaaatggtggtgagtgctatggagaaaaataaagcagggaaggaagatagggaatatgaatgtgggggtccaatttgaaatgggatatatagttagtgaagtcctcaccaaggtgacatgcaagtaaaaacctgaaatgcaaagcactggagatgggagcatgcctcatattcagggaagcaagtatagctaacacaaaggtagcaggactttgcaggtcatttgaggactttggctttcactaacaagggaaatagggagctactggaaggatttgagtaaaagagtgacattacctaatatgttttagtgtgtgtcccctgggacaggattatgttaacttgacaacactgggcttattgaatgtatggctattttatgattatctattatggtttcttttctctattataataaggcttggttcttttaggacagaattctgcccaacctgtcctgtatgtttgccttactgctagctgacaggagttggctgctagaacaacataccttggaggcgtttactcagttcgctgaggtaattataaaactgatttatcacagtgactttcaaaccattttaatatttcaaatattccagaacaatcccaaaacatttattgaactgcttctgtattgcaatcggaaaattgtctgaagggtacattactcgttatctcttttacagcttctcaaaatgaggcttagataaatgaagtgaatttcgtaaggtcctctgaataaacaaggaccagaacaggcatacacagcaggcctactgatacagacagacacagacacagtcttccagcagatagtatttttgggtcaaatgataatacatttcattttgtgctatcagtcataagggttaggctgatgaacctaaacctgtaagatgggttgctcctttactcttactgcatttgctgtatagtcatgcctatgatcataagggagtccagaagcattagtatgacccagcagaagtaattaaagcttacaacacttgtacagaagttaattttgtattatccttagggaccctgaag

SEQ ID NO: 6770 - DNA, 2364 bp, Homo sapiens
tgtatcttcatatgaaaagacattataaacagcaaaactcactttactacagttttatttttatcattccctagcaatatattactgatcattgctagcatgtaaaatcttttcatatttttgcttaagagccatatataagtaatttattaaataaaacttttctgatttgattcttccactttgtttcaaatagtacctactgacagaggtttcccatacttttaacacacattgttagaagtattttattatatacacttttaatggctctattaaccttaaaaaaaaaagttaatgatatccacctaaatcactatccctgctaggaagagaatcttggtggtataaaaatgtaggcctcttaatctgcattgtggatgtgtgatgaaaaacatagcttatcattcttttttttcttttttagccttggaatggatggctttggccaaccagttggcattcttggacgccctgccacagcatatggattccgccctgatgaaccttactactatggctatggatcttgataaagtatctgtttccatgtgtaatctcagcttagaagaaatctgtgtgggttgggttaattttggatctttgcctaataatgcatgttgatgttattgtgggtctgtgtttgtttttatttttatatgttgttagctgcagattaaccccagcccctctgtcttctgttaagtacagttgatactgacattgttcactcatcaaaccacatcttgatgctaagtaacatttcccatgagccacaaaactgaatgctgaaaagctactagactggaaaacaaacactgcattatgtatgttaagtgactaatttaatttcaattaaaaagcgtaaagtgaaaatgaataagtgaaagtcatgtgtttatatttcacacatttcactacgaattacatgttaatatagggtgcgcgtgaattttattttttctcctttttttctgcttgtaaactcttgagtaatttgtataatatatgctacctttaaaatttataaaaagaacatcaccttcatattccatgccatgtgcctgaaagtttccttcccaaagtttattaactatgagttttcaattaataatggaacatatgtcataagttatttatggttatagtctctttggtggttttaattcatatcttcctagttgtaatatagaaatcctaggacaagtagtatacaagacaagcagtgatacaagattagcatttggcttttaacttttattcttcataaatttagtatctaaagcatgggaaagctaattaaaagtcgcattaaggaaaactaaggaacagaatatttcactcacttgggtacccagttcccaattgttcacttgttcttataacgtacatttagatagcaagaaatggagagacattatataattcataatgggttttgaaaatagttcagtgttttcatattaaaaaaatgttcaattctacttgaaaagctgagcaaagaaataaccataataataactataatcagagatagttccatgatcacctgctatgggagaaaatatgaagcttcaaagggaatacatagatcaaagataagacttctgttcttgaatttaaaatctcattgatctaactacactatttatgtggcttaaattacattttaagcagaagataacatttggaaaaggcctttgaaataactcattccatctacttatttaagaaaccaatcacataaaaaatttaaatgtaatcaacagatattttcctgactacctgctatgtgtaaggaagtatatgatgccccttaggagatgtaaatctgaggtatgtttatgcctttgatctttctgaaaacatacatttatttgtcttagtttctattttaaccataaaatattaaagctggaaaaggccttagaagcaaccctgtccaactctaatttttgcagtcaaaaaaactggccaggagaggttaagtgacttagtcaatgacataggctgtctctttgcttcctattcagcaatctcaatactaaatagcttgttttattatttatcatgtgtacaaagtataaatacacataagtgacattaataggaaaatgatgcaaacatcctatagctttaacttccctcatgttgttataaactgcattaggaagaacacccgccaaaattgataaaattcccagggctatgctcgctcaattttacgtgcacatgctcactctccctaattttgttttcattagtataggacttaacaaatttagaaattgtaatctttccactcaggcttgaactggcttaccattgcattatttatgaaggaatatttttctaaagagatta

SEQ ID NO: 6771 - DNA, 1110 bp, Homo sapiens
aaagtgtgttttcttatgttagtttctatttcctattctacctttcttgtggtcttttggtatttttttattctgtctctttaaaattaccaaataccatccctctgcatatacataaacacgcacaaaggtctttgaggcattcaaatgagtcttttattttctgtgtctatgttgtcattcagttgtactctcaaaggctcatttccacttttctactgccccctgcccccactatcacaaactgtcatcagcaaacatggaaatttggaaaaaggacaaatttatagcatatcaaggattcatatgacttgatttaatagctttcagtatcctttctgtgtatttacattttgatactctaaatgaatttggatcaggacatttcagtgaaaactttctatggtttgacttcactaggtgctgcagaagatgatcttgttttagaagtggttataatgattggaactgtatccatggatgactcttgtgctgcattgctagccaaatctggcataatccctgcactcattgaattgctaaatggtaaataaccttaatttatttttatgttaatgtctaaacagcttattgatttaaatatttaaatataaaatgcagagtctgtaatctgtttttctcattacattaattgtttcatagcaacttatataatcaagaaaaatgaattaaatatactgctaactgggattggatagagtaatatcaaagatctttagctttcaaagttaagaatgttgctgtaaagcagttcaggaccaattttacagaagtactctcctcaccaaccttgaacaaccaatatagtagtcacaacttaatcaaggggaatacattccaagacccccagcagatgcctgaaactacagatactatcaaaccctatatatactttttttttctaaacataccaatgataaagtttaatttataaattaggcacagtaagagattaacaaccataattaataataaaacagaaaaattataacagtatgcttagcatcactactcttatactttggagccattattaaatgaaataagggttacttgaatacaagcattgcaatactatgctagtggacc

SEQ ID NO: 6772 - DNA, 1435 bp, Homo sapiens
ttgtctctaaatttagattttgagattcactgttgtgcttctagttttattcagcaaatactgaatgagcaacaacgtctggcacaataataggtacatactcagtaaacattggaccgctggattaattattctggtcttagtttggtgaattatctagatgtaatatatttcccatcttatgtgttttcattttaatgtgtatgttcatcagagaaatttctgatatttttgtggggtttttccttctccatgcctgatacccagtgttagtcagaaatagagttgtcataactcatctgataccttaatgtttcagcatccacctccagatcgacaggcagtacctggaagaccaggcccctttccctccaagcagcaagtagctgatgaagatgaaatatggaagcaaagacgaagacaacaatcagaaatttctgcagcagtagaacgtgctcgtaaacggcgtgaagaggaagagcgaagaatggaagaacaaaggaaggcagcttgtgcggagaaactgaaacgattggatgagaagcttggcatcctggaaaaacaaccatctccagaggaaattagggaaagggagcgagaaaaagaacgggagcgtgagaaagaacttgaaaaagaacaagaacaggagcgagagaaggagagggaaaaagacagagagagacagcaggaaaaggagaaagagctggagaaggagcaggaaaaacaaagagaaatggagaaagaaagaaagcaagaaaaagaaaaagaactagaacggcagaaagaaaaggaaaaagaactacaaaagatgaaagaacaagaaaaggaatgtgagctggagaaggaaagggaaaaattagaggagaaaattgaacccagagaacctaatttagagcccatggtagaaaaacaagaaagtgaaaacagctgtaataaaggtttgatagtattcttcattctcttttaaaaactttacaaagagctttatgttggttacagtttggggtttgtatattttaaatatatgtaatcaatataaaagtgattgttttatgatagcatttgcagtacaaaatatgggctagagccgtgttttctaattctgtatatgaacagacgtctctgaagtgtttctcagttattagatgagcttcatttctgttttatctgcagaattgtattggcttcatagtcacatatactgattctccccctgcttttttctgactccaagacatttaactaaacaaaatctcatttgttcacatgcattaatacctctaaaactgaactggcatagagcttaatgagtatgttggattatcataattaaatgactgcacctagttcataatttcaggtttgctgtttaatcagtttaaacatgcaagcttccatggtgtagttgatatgctattaaactgtaatttcctgg

SEQ ID NO: 6773 - DNA, 1172 bp, Homo sapiens
tgatcacaaatcatgttttgatttttacatttatactggtatttggaaatttaagtggcatattttgtagaatattgaccaactaaggtaggttaatggaatttaggaaagaattttctctgaaagttatcatagtataattttcatgatgtttgtattgacatccagagtcacagtacttggtgtctgatttttatatgcataatattttctttcttttgaagtaaaacaggctgctattgtgattttgcttattttgcttcctcagttcttaaatgcaatttttatttaacagcagtaataaaattccattcacagaacaacccttacataatttccaccaatcttttactcaggaaaaaaatgcttttaatatggagaattccacctaacaattaataacctgtattctatgtctatcatggttttgtttcgttcatttttcaaaatcctcatttcacctttttctgaacttttgttacaggaatgattcctcctaaaccattaatgagaagagaccagatggaagggtcaccgaacagttctgagtcatttgagcatatagctcgatctgcaagagatcacgcaatttccctttctgagcctcgtatgctgtgggggtcagatccctatcctcatgctgagcctcaacaagcaactactcccaaagcaacagaagagcctgaggatgtaaggtaataaattatttcaatttaatagatgatacagaatattttggtaaaaggaaaactgtgtagtgtttctgaagatcattccaatttaggactgaagcataaatctggtttccttctatttaatttagcatgctacgcttactctttggacatattctctgtattcattagggcattttgtaacctggttctgtactcaattgtatgctgtaatttagtattagatgttgaaattggtaggttcttttttgagataggaacttgctctgttattcaggctggagtgcgttggtatgatcttggctcactgcagcgttcacctcccaggctcaagtgatcggcttacctcagcttcctgagtggctgagactacatgcgttcaccaccacaccccgctaatctttgtggggttttttgttttgtttttgtttttgtttttgtttttgagacagagtcttgctctgtctcccaggctgg

SEQ ID NO: 6774 - DNA, 1532 bp, Homo sapiens
cctttacctatatttcctatatttacctttacctatatttcctatattatacctatacctatatttcctatttccccctactcctagcccctggcagccaccattatggtttctgctttgatgaagttgattatttcatgttcctcatgtaagatatttgtcctgactgactgacttcacttaagcataatgtcctcagggtttatccatgttgtagcatatgacactatttccttcttttttatccctgaataatattctattgtatgtgtataccacattttctttatccattcagctattggatatttaggctgtttccacctcttggctattgtgagtaattctcctctaaactttttatatagcgagagaaagattctcattatggttaagagtcattgctttctgttttagagggattattttgctatatacttacgcatgggaaagattgctttgttgattatacctttgaattcttatcatcataggtctgaagctgcgttggaccaggaacagattactgctgcttattctgtagaacataatcaattagaggctcacccaaaggcagactttatcagagaatcaagtgaggcacaagtacaaaagtttttaagcagatctgtggaagatgttagacctcaccatactgatgcaaataatcagtctgcttgttttgaagcacctgatcaaaagaccttatccgctcctcaagaggagcggatttcagctgtagaaagtcagccttcccggaaaagaagtgtttcccatggatctaaccatacgcaaaaaccagacgagcagagaagtgaaccatctgcaggcattcctaaagtaaccagcagatgcattgattcaaaagaaccaatagaaaggccagaggagaaaccaaaaaaggaaggctttatacgatcttctgaaggaccaaaacctgaaaaagtatataaatctaaatcagaaactcgttggggcccacgaccaagctctaacagaagggaagaagttaatgatagacctgtgagaagatcaggtcccattaaaaaacctgtacttagagatatgaaagaggaacgggaacagaggaaggagaaagaaggagaaaaggccgaaaaggtcactgaaaaagtagttgtaaagcctgaaaagacggaaaagaaggatcttcctcctcccccaccaccacctcagccaccagcaccaattcagccacagtcagttccaccaccaattcaaccagaagcagagaaatttccttcaacagaaactgcaactttggctcaaaaaccatctcaggatactgagaagcctctggaacctgtgagtactgttcaggtagagcctgcagttaagactgtaaaccaacagactatggcagcaccagtagtcaaagaagaaaaacaacctgagaaagtcatcagcaaagaccttgttatagagaggcctcgaccagattcaagaccagcagttaaaaaagaatcaactttgcctcccaggacctattggaaagaagctagagagagagattg

SEQ ID NO: 6775 - DNA, 1130 bp, Homo sapiens
cttccactttacgaagaccagcttatcgggacaatcagtggaacccaaggcagtcagaagttcctaaaccagaagatggagagccgccaagaagacatgagcagtttattcctatagcagcagataaacgacctccaaaatttgagcgaaaatttgacccagctagagaaaggcctcgaaggcagcgtcctactcgaccaccaaggcaagacaagccacctcgatttagacggctaagagagagggaggctgcttcaaaatcaaatgaggtggtagcagtgcccacaaatggcacagttaataatgtggctcaagaaccagttaatactcttggggatatttccgggaataagacaccagatttatctaatcagaactcttcagatcaggcaaatgaagaatgggaaacagcttctgaaagcagtgatttcaatgagaggcgagagagggatgaaaaaaaaaatgctgacttgaatgcacaaacagttgtaaaggttggagagaatgttctacctccaaagagggaaattgcaaagagaagtttttctagtcagagaccagtagatcgtcagaatcgacgtggcaacaatggtccacccaaatcaggaaggaatttctcaggtcctagaaatgaaaggagaagtggcccaccatcaaaaagtgggaagagagggtgagtactttgttttaaatatagttgcttttgcacctttaaagaagctaaaagtagagttcttggttgaattatgcaaagagccagtctagataaaggaccaaaaaacattgttcttcccaaatgctttattctctgttctcaaagtgtaagggtgcttaaggaagagaggttaaggtgtcttaggagtctttgcctgctacgttacattttccagaagagttctcttggaaacttgtagctttgggaaaatgttcacatctaaggagggacatgtactgtgtccttatttggtaagttatctgatgagtagccctcccttctttctcagtttctcctaataaacctctaatgctacacaggtgtcctctgagatttaaattaatgttataaccatatactttgtcactctagagagaggcccagaaaacaaatccctgttctactaccaaggaca

SEQ ID NO: 6776 - DNA, 1135 bp, Homo sapiens
tggaatgcagtggcacggtctcagctcattgcaacttccacctcccaggttcaagtgattcttgtgcttcagcctcctgagtatctgggactacaggtatataccaccacacacatctaatttttgtatttttagtagagacagagttttgccatgttggccaggctggtctcaaacttccggcctcaagcagtatgcccatctcggcctccaaaagtgctgggattacagacgtgagccactgcacctggccagttttaggatttttattttcaactttaagagtatgaaatcttttcagatctttacaatgaatggccatgcaatagggtgagaaataggttatacactataagttataggaactaggcctttggctagttttttttttttttttaagtactactgtactaaacatttttattaattttcatttgaaaaacagaaaatatcttaaatcctttcccacacccacaggtgttgttataattgatgatcatcctgaagtaacagtaattgaagatccccagtcaaatttgaatgatgatggttttactgaagtggtatccaaaaaacaacaaaaacgtttacaggatgaagaacgccgaaagaaggaagaacaagtcatacaggtttaaatcttgtttcaacttgttgctagttatctagatttgttgcccaaagtgtatcagcaaatgttcaaggtttttatacttgtcaaggctgttttcattattcaagtgttaaaagtgacatcatcttcccaacttttaatcattttgaccagaatcaaaggaaattttaaataaaatataaggactgtagctccttatattttgacttacagcaaagaccatctttttttttttttttaaatactgtaagttctagggtacatgtgcacaacatgcaggtttgttacatatgtatacatgtgctatgttggtgtgctgcacccattaactcatcgtttacactaggtatttctcctaatgctatccctcccccctccccccatcccacaacaggcccaggtgtgtgatgttccctgccctgtgtgcaagtgttctcgttgttcagttcctacctatgagtgagaacatgaggtgtttggttttctgtccttgcaatagtt

SEQ ID NO: 6777 - DNA, 1580 bp, Homo sapiens
cattttggcttctcatcattcaaaatcttattagcaaccctgacattttgtggtttgagtacctattttgaaaagtaaaggagccaagttagtgggagttgttaaaagttgcatttatgaactgttgcattcagctgcattattgacaaaaatggtccccgttaattttttaaggtctggaacaaaaagaatgcaaatgaaaaaggaagaagccagacttctaagcttcctccaagatttgccaaaaaacaggctacagggatccagcaagcacagtcttcagcctcagttccacctctagcttcggctccacttccaccttcaacctcagcttcagttccagcctcaacctcagctccacttccggcaaccttaactccagttccagcctcaacctcagctccggttccagcctcaactttagctccagttctggcctcaacctcagctccagttccagcctcacccttagctccagtttcagcctcagcctcagtctcagcttcagttccagcctctacttcagctgcagctataacctcttcttcagctccagcctcagccccagctccaacccccatccttgcctcagtttcaaccccagcttctgtcaccattcttgcctcagcctcaattcccattcttgcttcagccctagcatcaacttcagctccaacgccagccccagcagcctcttccccagctgccccagtcatcacagcaccaactatcccagcctcagccccaactgcctcagtcccacttgcccctgcctcagcttcagccccagccccagcccctaccccagtctcagccccaaatcctgccccacctgccccagcccagactcaggcacagacccacaaaccagtccagaatccactacagactacatctcagtcttcaaaacaaccaccaccatcaattaggctgccttcagctcaaacacctaatggcacagattatgtagcctcaggaaaatccatccagaccccacagtcacatggcactctgacagctgaattatgggataacaaggtggccccaccagctgtgctgaatgatatctctaagaaatgtaagttgcaaaagagaagtgaggggtggggaatggcataggaatactgaggtttcttttcaattttatttatatactctttaagtgttttctagccatctcattttttattgtaggaaaaagtaatagtaatcctctcaactttcttaaaatttttgttttaagcatgtttaacaagcatattatattttatggaaataattttgtgttgatgagaaaataataggcaatgtttgggggggtcttgtacatgcatatctcatttgattacagtttgtggacactgcatttttaaaaattaaaagttcatggtaactgtcaagcaagtcttctggtgtcatttttccaacagcatgtggtcatttcatgttctgtgtcacattttggtcattcttgcaatatgtcaaatttttcatcatttatctgttatggtggtcagttatctttgatattgtaattgtttcagggtaccatgaacacccaaataagatagtgaacttaa

SEQ ID NO: 6778 - DNA, 2714 bp, Homo sapiens
gttttaagtgttacatgtatgtttttagatttgcaagcaggttccctaaataaaatttaatatgagagggcagaccttgaaaaggtggtgggaggtggtcctgtggttttttttttttttttaaatcacatgaaatatttcaaaaataggaagaaatctattcattaaaagctcaaagatcaatgaggtacttttggctttggccaaaccagtgtggggaaaactgatttgtgattggtaaaagaatttgaaccaagattgatttgacaggctttggtaatgctgcagtattttcagttgttctttctcattttttaaggcaaagcagagagcagaggttcttcagtccacgcaacggttcttctctgaacagcaacagagcaaacagataggaggaggcaaagcccagaaagtggacagtgattcaagtaaacctcctgaaacactgaccgaccctcctggggtctgtcaggaaaaagtagaagaaaagccaccccctgcaccctccatagccaccaaacctgttagaactggaccaatcaaacctcaggcgatcaaaaccgaagaaacaaaatcttaaaggctatggtttattgcaggggattgggaggggggcgggaaaacatggagaattaagtcagataatgctggcagccaaaggggcaaaatggcctgtgacattatcctgttcagagcttggagatgtacaagggacataggagcaatttacactgacacacagctgctgtaccagtgaaaacgaggctttgcaagcttgtacctactatataacatgtgcttggttgatggccatgcatcttcagtcagaatttatatataaatgtatgcacccatttttttgagtgcatataatttagacctaaaaatccttatgattagatgaaacaccaaaaatataaggaaaataacacagcagaggaatagctcagcctgaacagtgtgatggtcccagctactacatcagatgcggtttttttgctcccttatgttcttcggatatggttatggcatttgtaggcttggaggtaaagaactgaagataactggtgctggatagaggagccttattttttattatggcagcttgctatttttataacatggtgattgagttgaacacaatcaaagtacagtagtaactgatgtccccttcttcctggatgaatgagcagataaatattgatgtcagcatccttgaaccatatcaaagtgagcagtgtttggctactgcttctatttgaaatggtgctgtgttttggttgtggtctgaagctttgaagcgctacttagcatctcctttcttccatggagctctcacgattcaaacatgacagatttggtaaaatgctggttaggttgagtcttccttgcccccactcagtcatctttgtatgaatcccatgatttgggggtttttttctttttttttttataccagtttttagctggtgtttatgaagaacagtgagtacctagaactgtgccactaattaaaggaaatcctaagaaggtgcatttctttacagagctgtgtcatgccatcctttgggccctctgctggaaaagtagaatcaagtctcaaataatgcctttttaattgtatcctctagtattatagatataggacagtactgtatcatacctctgtgaatgtaaaatatcttgtacctgctttatgatacgtagtagtgaccgtgctttatcagagctgtttttaatgatgttattctagaatgttttctttccagatgatgattcagaagctaattttaaaaaacggtgccaggtaccacaacagtaacagaactttgcaattttctggggttttgttttttacctttttccccccttttttttaaatggagtgtgctggatgtctctataattttattcagatgactgcagaacctggaaaagctgttgctgctattgatgcataacatactgctattggtctttttatataaatatatatatatatatacatatatatatataatttgaatttttggaaactttagctgtgctgtcaactttggaaaaagtatcccggtttactgtgttgagttggcattgtacagaaattaacagccatattggtctagaaacgttaaacttaatttttttccatttgtacaggggtaacgcactgtattaaatatgtaaggtcttatctacatgggtttgattacagaaactaataaagtattctctaaataatgattcttggagcttataatcatttcctaaaatctgaagcaagagggtttgtcatgtattaaaaatagtggtcaagagtactggccagtcgcagtggctcatgcctgtaatcctagcactttgggaggccgaggcgggtgaattgcctgagctcaggagtacgagaccagcctgggcaacatggtgaaaccccatctctactaaaaatacaaaaaaaaagtacattatacagccgggagcaatggctcatgcctgtaatcctaacactttgggaggccaagggaggtggatcacctgaggtcaggagtttgagaccagcctggccagcatggcaaaaccctgtctctactaaaaatacaaaaattagctggcctggtggcaggtgcctataatcccagctacttgggaagctgaggcaggagaattgcttgaacctggggcgggagtcagaggttgcaatgagccaacatcaa

SEQ ID NO: 6779 - DNA, 1174 bp, Homo sapiens
aagctatggctatgccattatttatttaagatgccaatgttagacatttaggttgttttatgatattttttgcttctcctttcccattgattatttattacctcagataaaagttcagtcaatcctcattacccatttctaaaagtagacacaactacatttaggaatattgcttcaaacatagcatatatatctgatgttgatatattgcttttttcatgttttctcttacagttcttatagtcatgaaataccgtacttgatttgatgacagagatcttcattaaacaagatctgggacagtaataaaagattgctgcataatttaaatgaaacctatgtgtatataactttcaaaacttctttttcaagaaactaagaggcaagtatcacttcaaattggaacgttgagaatgtccaattatcttctccctttctaacaaaatgttcttttaataattatgtttaaggcaaagagaactagcctctatttttccatatttcaaggatctaatttgaaactagatacttgccagttcattatttgtgtatataaacactgattataatatttcatattaatattttaatggcataaggacttgcattattgcattagggagcgggtcatgctgggggtcaggaagcctgtgtagagtaccaaattatatgctgaaagagatgcataaccattctgtcaatatttgcagaaatatagttcctttcatattacagttgttttgcaagcaatttccacatttataggtgtaacaaaagctaaatgttgtaaatgttgttgccctcaggtataactaaaaacattccagtaaatatatttttgactgtgtaagagaatgtgtagtaatttttttggcattggattatggaaatggaaatttttaaacagtgtgaaaaaacatggtatggcatcataaaactggagataataaagttattgaagagtgtcattggagtatttgaaaatgaccaatatatagctgccagtcatggtccagtctgttttctgttaaactccaataaagagagaccagtcagtcctaatgtgagtaaatgaaatttacaggtaacttacttactccttaattttattttagttaatagcctctaacttccaactatctcatttaccaaaagtacaaaaagtagcaaaacc

SEQ ID NO: 6780 - DNA, 1244 bp, Homo sapiens
aaaaaaaaaaaaaagtaattgcagtagcctgaatgaggtggtattgacttagagtaggattctaaaagtggagaacagtgtaaacttgttgaattcagaatatttgtaagttgtagaaagataagccttaaggaactaaggttgatctctaagttttgggcttacgtaactgggtggttgatagttcattttataagatgggaaagactgggtaaaagcacaattattttttctccttgaggaggagatagtgtaaatggaaagacaaacaaaatgtgacaaaatgttaacaattggtgagatagataaaggtgtaaatatatttcttgttttatttctaaaacttccataggtttcactcctatagaaagaattggaatgctgcaaagaattttttttctttaatgtcatagtttattttcaaagagcatgccctgcatttctggtctttgaagcacattaaaaaaatacttaaaatgatttgtcctttgaattttagatacccttatatttttcctaatatgatttcctatgattattatttaaccctcttctcatctcaggtttcagatcgacaaagctatcttgtcatatctttggttctttgtgttgtcttgggactgatgctttgtatgcagcgttgtcgaaatacttctcaatttgatggagattatatttcaaaacttcctaaaagtaatcagtatccaagccctaaaaggtaatatcagcattatatttcacaattttattttttttactatgctttgtatatttttgagaaattttaagcaaataaagggagactgaggtaatttctttccctatatgattatcttgaaaccaaaacattaaaaacatcattcgatagtaagatggtcctatgcctaacctggctctgtagactataatagagaaaacactaatagtaagtgcatgaaacccctgaaatatttggttgagaaagatgcttaaatgtggaattcaaaggaagaagagaatactattttaatacagtaccttttagacaaagatctctaaatttttttttccacctgtattagcaataactggagtgttagagttagtcccgtgtggtatgtacagttctcaataacctctgtgtagcctcaacaaaagagtaaattatatgtgctttactcgttgtaaccaatatgtatttttcctaatgtgttaggtgtttctcttcctatgatgatatgaatttgaaaagaagaacttcattc

SEQ ID NO: 6781 - DNA, 1242 bp, Homo sapiens
ctaatacagactaagtcgggatcattgccgagcctgcatgacataatcaaaggaaacaaagagatcaccgtgggaacatttggtgttacagcagtctcgggacatatctaaaattaattgaacttttcatacagaagacttttttgttgttgttctttgaagaacagtctgtagtatttgaagggtttgggggagggagaaaatattaatgggaaaggcattcagaaattatggtttctacctttttaaaaagtagatgggattgtgtcaatcttggttaatgagctacagttttacaaagctgatcacttcctataaggacaatggtagacattttataaagatgttttttcacaagattaattactgggacaaaagtaatttggaagcccagttccttaggtgggataggaatgaaagcctaaacctcttcctttagctttgttcctatttcttgcaccttcccatatttatgtgccttttgtctatttataatgccactggaagaggagggataactttttctgttatttgatttcttttataactttgttaggtttttgaagctgcaaacactacaatgctttgagggggtctgtgcctgaagctcaggagtgtggatcagacagtctaaagatcctaaaaacttgccaactggatctttgtttagcaaactcactggaaatgaacacttaatggaatttttaagtctgttctgttaggtagatggtgatgctcttgttattttcacttattcagactggattacttcttacttagttactaactcaatgaggaaaaatccctacaggatctttttttgcaaacaactgatatatgcagacaaatttttgacaaattcaccttttaaacacacttaaccatttgtgaaggttttctttagcttacattttaaacatacacaataaacactaatcctccaaactttcactgtttttattagtatgaatataaaatttgaaggtttggccaattagtacaagtctcatgatataatcactgcctgcatacatatgcacagatccagttagtgagtttgtcaagcttaatctaattggttaagtctaaagagattattattccttgatgtttgctttgtattggctacaaatgtgcagaggtaatacatatgtgatgtcgatgtctctgtctttttttttgtctttaaaaaataattggcagcaactgtatttgaataaaatgatttcttagtatgattgt

SEQ ID NO: 6782 - DNA, 1537 bp, Homo sapiens
ccttccaaccatccctgaagaagaagccaaaaaacttttcccgaaaggagtcttcaccaaagagctcccatctggcaagaaatacctccgctacacaccccagccttaagtctcttggagaagctggtgctgtgagccagaggatgtcagctgccaattgtgttttcctgcagcaattccataaacacatcctggtgtcatcacagccaaggtttttaggttgctataccaatggcttattaaatgaaaatggcactaaaagtttcttgagattctttatactctctgccttcagcaatcaattccattcatacatcagcactctgctggttctgtttgaaatatgttctgtatttaaaactcaaatcttgttggatctctgcagggcttgtgaccaatgaagtcatatttgttgatggttgacaaagcttgcttcactccatcagagaatgactatcaatttttttttaactgtcctatcacgtcctctcctgtcacccattttgaagagtggcagaacttgaagttcaacttcctctgtaaatatccaagtataaagcccaggaacttctagaataacccagatgcgctttaattttttttaatatgttttgatcacagaacttctagaataacccagatgctctttcatattcttttaatacatcttgatcacagctgggggaaaaaaagctttttaattctataccttcctagtagataagtgaagagcagggaaagagacctttaaatattttgctataaaaaaatttgtgataagtttctatcaaaatggggagattgcagaaaaggcttcccttggctcccaaggaggtgtagcaggtgtgagcaatattagtgccatgtgcctttcacacagggtttgcatttatcagtctgttttccgatgatgtgtacatgaaagagtacaccatgtgaagagaagagagaatgattgaaaatgttttagtatagaactcttcttgcagtgggttgctattttctagattttactttttagggaacaaaataaaatcctttgttaaaactgggtcagagaattctgttgtcatattttgaagtatcagatttatgtcctaaagggcagaggcttccttcttcctaggattggcatgagtaatttcttccaaagacagatacataagattttatataatgaaaatggaggaacagctgaagaacgtgtgatgtcaccacatatcttggtccactttgctccttcatgttacttgtttggatcctacagtcccatgatgttatgatccctggtataaagagctctcttaacctaattccttaatgggattgctgggtgtaggaatgtgaacctcaaagataatggtacatctgtgctttttgctgctctgaactaatactctctcagactttgattatactctactaataagtgccaggtttagaaaagggtgtcccatttacgatgtcttagtctgcttgggctgctatagcaaaaatactacagactgggtggcttaaacaacaaacatttctcaca

SEQ ID NO: 6783 - DNA, 1223 bp, Homo sapiens
tccacaagtgggttcacaagagacacaaacgcacccaggaagacctccgctccctcagacgcggggcgggccctgcgacttcactctgggagggacatttccgctcacccagctctgcgaccctcgctcctgcggagtcagcttctgctcgcggagggggaagggcaaaaggacagtgcgtcccaacccgtccctctccagctgagcctgtcagagaccagcccagctctgaaatcaagccgttgagaaaagggaattcggccctccgccgcctcttcagtttaaaatcgtttcccgactcgctctgcggccccacgcaggaagcctccttggcgcctcgccgattccgtatcagtgaagcaactaaaattgccattttaactgagggcaaggccgagccacttaaccactatcgtcaacctttccaatcgtgctcggttgctcctcagttttcctaccggtgcgaagctttctctcaaatttccgcccgtagtaggcatggcggcggcacctcaccactgattcgttgaattccttcccggtaatcttgggcactagcgggcggagttgaagggcgcttggaccccagcggcgatctgtgtttgggttcgcgctctgggagaattttggctttgctcgccttcctctttcagaagactcgaaatcggccagcaggtctgcgagatttgaaacgcgactgttactccttgttttccggttctggccgcgggagcctctcgagaagcgtggaaagaggagaagggcgtataccttgtgaccgcctctggttgtcttgggctcgcgcctggcgccgctacgtggagtcgctctctcgtcgtcacttttggctgccgacttgttgagtagaagtgcagactgatgctttaagactcagggagaggtctttcccttatctccaccccagcaagcaccccagagaccttggagatttgtcttgtttctagacacgtgtactccaatgttgtgcggaggaggccttaaatattcgagaagagagtgggaactcctggaattttaagggatttctgtgtatttccaaaactgacttttaactaccggcagcgtgggatttcgtgattgtttttcgccatcgtgtggctccaacatgtacttcccttcttggttaagtcagctgtacaggggtttatccagacccatcagaaggaccacccaaccgatctggggttctctctacagaagtc

SEQ ID NO: 6784 - DNA, 1218 bp, Homo sapiens
ggtggtgcgtgctggtggtcccagctactcaggaggctgaggtgggaggatcatctgatcctgaggaggtctaggctgtagtgagccgtgatcacaccactgcactccagcctgagtgagagaccctgtctcaaaacaaaaacaaaaacagatagttctgttagaccagcactgcctaagtatttgattgtctagaatataattgtaagattaggatccagggtatagtataagtgggctcagtttctcctcacattactgtaaaatagtacattcagcaggggtttaataagcatccagtttgtcagccagaaagtaactttactgtgttgttcttttatagtaatggaatagagtagtctcaattttttaaaaattattatggtaatatctttactttttggtaataattttctgtttgatccgccactaaaaaggtacatatatcttagtaacaagtaaaaatagatttgattgcttttaatatgtatgcttaataatatttgttctttcttggttattttccttacctggtacaggtagaagagtcagcaatgatgggagtaagtggctatgtggagtatctccgagagcaggaagtatctgagcggtggttccggtacaaccctcgtctcacctgcatctattgcgccaaatctttcaaccagaagggaagcctggaccgccacatgcgcctacacatggggatcacaccattcgtctgccgcatgtgtggcaagaagtatacccggaaagatcagctggagtatcatatccgcaagcacacaggcaacaagccctttcactgtcatgtctgtggcaaaagtttccccttccaggccatcttgaatcagcactttcgcaaaaaccaccctggctgtatacccctggaggggcctcacagcatctcccctgaaacaactgtcacatctcgaggacaagctgaggaagagtcaccttcacaggaagagacagttgctcctggggaagctgtccagggctctgtgtccaccactgggccagactgaaacatccagggggagggggctgaccctcttcccctatgagccataagcagccagcatcagagccatgggctgatacttagattcacaaaatgccacatcactaggccagaagatgctcccaagatgttgccaaactggaggatcagcaacttacacaaaagcactaaaggctcctcccttcttattgccc

SEQ ID NO: 6785 - DNA, 1180 bp, Homo sapiens
ggtatatttaacaagacaaaaataatcttggttaataaaggagcccatgagatttgagtcaggttgtaagtgaaatcacttacacttttggatagaatttatactcctgctcttataaatcagtggtagacttaccattttttaaagttttcttgcatttttttgtttttttattgccacagctccctattctttcttgcctgcctccacccccctgttcaggaaaaaaaaaaattgagccttaaagtgacagctgattttttaattgctgaattttgtgaaattttactttttccaagtgtttccaactttaaaaagagaagtgaagacaaataggttggaatggtgaagacaaatggattggaatttcacaggctgtgaataattccttaggatctggcaaaccgtgaagtcttatttgaagaccttatctcctgagagttcttttggagtaggaaaaagaaccctatttgaaatagaccgtttttctcttgtttttaatctgtttaatatttctgatttttaagcagctttcaaaacaagtgtggtggaaaaaaagaaatagtagtaggaagatgtttagggcagcagaactctgggtctaaataagtacatgttcccacttgttgccgatttttgagagtactagggccatctttctcaattttgtattatttgtgtgcatgtttatatcaaagatgcccattttgttaaaatgctatttcctttattaccttggaaactgactcagcctcatgttgctcctaattagtgtttaaggctcccatgagttgcagataaaatgatttattttaacaagtagaaggaggtgattcaccttttggattgtaaatatatgaaaatgtctacaaggtctttatctgctttctgtcagcatttatattaaatgataaattaatgaggaacgtgtgtattttgtaaatgagtgtgtgccatcttattctaatcttgagattactttcttacacgtttttaatggagggggcttttttaggtgaaaaataaagaaatggctaatctgcatgagcaaacacatacttggagtagccaattttgtgtggacatcacaggaattagtccaatcttaaataagctacagtcatattccttcatttgtcacacagtgattgcacattaggagtgagggtagtggttctga

SEQ ID NO: 6786 - DNA, 1265 bp, Homo sapiens
ttataaaatgtaaaagtaatgaaaattcatcagtttctctaagccagtgaatgtcgtcttttgtaatattgtgtataagcatttgtgcccaccccagcttctgctatcactgtggtcaagtcatgggtctgagtaaaagaattcttgagtatgtgactggtgagaaataactaactatagtcagtacatgtacagattgttaaaattcaagacaaaatactttcactaaaaaaaaggattcgtctcagtaaagaagtattcagttgctgtcacttacatacaaatggtggtgggtagcagtctcaccatttttctactctctttttgctcgttttaaataattgagtaaaggttttatttgtaaaatctatctgtaaaaagcacctgtaacgatttatatgtcattgaaaggaatggcccagttactttttaggagagattaataacctacctggaaattaactgcagtgtttacttagattttttccccctaataagagtctaagtgtgttaaatttttaactgatgatatggttacagtgttgcaaggtgatctcttcccctgaaaaatctgcctatccttttaagaaaaattagacctactaaactaaagcaaattttactttcatcattagcacctaaacaagcaagcagtctactactgtcatcattttacctgagtgcccattttgctgatccacattcatacctttctaccttggacagctatgatttttatatttatttgttgcttcagctcaggtttatgaaattttcctgctgaaatgacttattgggagttgtaggttgattatagttactattaaacattttctcaatttagcttttctgagccacttcaagaagaaagctgtttttgtcaaaaggtactattaattgtagcaagtaaatcttaagatttgaatttttaagattttatttctgtgttcactaaagatctttccacaagtaatagattataattgataagtaatactagctatagtgttaataaagagtaagactatcaccaccaggaataagtaacaccttttaataataaatctattcctaataggtatgttttcaatactgcactgaacaaagtgggtaaagagccctttgaaatcttattgtaataaagggacttacctcaccactggaatccttgttttcagagcctctggattttcagccaaacactgaatttctcctaaactttatccctgaaacatccctagagaacgaactttattttcacaaga

SEQ ID NO: 6787 - DNA, 1248 bp, Homo sapiens
gcagaaggatggtatattgtcccattgtgcctataatgtattttaaattggtcattccaccttacctaatggaaattcttgcagctttcctagtgctcatcagcggttttaggaattcactaacacccccaaaatttgttttttgttttttgctttttttccttttccttttctctgtgatatcatgagcctgtaaggacaaatggcatatttgggcataactgcttgactctgtaactacttttttaaaatcaaaattgaaaaggtattaattgcttctggctttttaatttttttttttagagacaaagatgaaaccagataggaaatacagtttttatgttttctacttactaaaatattagtttcttctaaatattactttatttgtatttcactaaattccaaagcaaaaatcagatatctgagatgaacaattttgaatgggttaaggtaggagtaataagcattgtgttcactcatacataggtgagggaattttatttatagcgagaaatataaaagtattttgacttactcttttttcaaggagtcgctaggaaagggtagaagaactgagaataagacatctagattccatttctggtttatatgtagctcttttgcctaatttatatataattttgtcataagataagtccagtaactgtcctgtcttagataacgtacagaggctgaagtgaccaaagatccattccttattacttttctaattaaaagaagagttagctagatttctagtagtagtattctagatattgataagacattattcctaatgccaactacaaatattcaactactcagaatgtatttaaaaaattgtttggtacagcattaatgttggtgattcctttctcccatcttatttcccttcccttctattctttcccatgtatttcttttgcctaaaagaatattggtatgattctcatttgctactttgagtatataactccatcagactttccagagttcttcagggatggagctcaaagtttacatttttccatatatgtctttttttttcttgacctttttccaccctgtaatttccccttgacttacccactgccctccccaatctgcaacagtgacagtttgctgcctcaaaacagagcattcaaatgaattcgcttagccaataacttctgtgaagttgccttttctaatggtgttattactcagtgatgcacaaatgtggtatttgccctactggtaggcaaa

SEQ ID NO: 6788 - DNA, 1696 bp, Homo sapiens
gcattctcttaatataatcagaaagctgattcagtgtttaattagatttaaatgttgatcaagaattaactgtaacttactagcactgaaaatacatgtttggtgtttcgcctgcgttcagctcatggttggaaatttgaagcagtgcttttcaaattaaacttttgctgacatcataggatgctaaaaaacaaggacaatcaactatgttttaaaactgcaacatttgatttgaacttaaaatgaatagagccacattattttaatggatgttttgttttacttgtgaactgattgagtcttaaggatagtttatgaattgatcacttgttgctcagaatcattagtataagtaggtaggaaatagtttgaagtcatttttcatagacttaactgtccaatgttgcaaatgtttcttcatgaaaatattgaaaagagtaaggttttttttttttttaattctgctgcacatattctgatgccatgtgtctgtgcttaattaactaagaccctataaaacgtgtttagtggggactgtttgatatagttgccctctccattcctctatttgcctgatttttttcagtttccctttctgtattttactactaaattagaaagcactggttatgtaataagttactacattgctttggttgagtaaaaacaagagtttatatttttcttgtttcttattttcttaacccttaactcctgctgaggtcataacaacctcagtctaagctctgtgtccatcatactgttaacttaaacaaatgggtggtgggggtgggaagggtaatacagtcctgccattgcctaccagtaggagagtccaaacagaacactcttttgagtagcaattatttaatttgcccagtcaaggcaccgtgtttatatactatttcacattgaatttgattatgccctacagacctggctggtcaaggatttgatatacacatattggcttgggattcgagctttcttttttatttaaataaaaatttatatatatattatatatatacatatatacatagctatatctgtatatatattgggtatgttttaaggattttttcgcatgagcgcagctgttgcgataaattgaccgattgggaggtggtagaagcactgaatgaaggtgaggctttttttttttccagttttcttatacatttgtcttctttttttaaaaaaaaaaaaaaaaatatatatatatatatatatatatatatatatgtatgctttttcttttttttttggcttttgtttgctttttgacttttacttaaaacccttttacatttccactttaaatgcctattgtttattgggagaaggaaagaaacttttgtatgtctgacagagtcccaagatttttcatttctctgcataacagtaaaaggcaacattattggcctccaaccttctttttttttttttttttttttttttggagagggagtctgcttctgttgcccaggctggagtgcagtgggttgatctcggctcgctacaacctccacctcccgggttcaagcgattctcctgcctcagcctcctgagtagctgggactacaggcacgcgccaccacgtccagctaatttttgtactacaaccttcttataagcagatttggactgatcttctcctttgggtatgtcagatcatcctaaattttagaagcag

SEQ ID NO: 6789 - DNA, 1193 bp, Homo sapiens
tttttagtagagacagggtttcaccatgttggccaggctgatctccaactcctgagctcaagtgatccacctgccttggcctccgaaagtgctgggattataggcatgagctcaaaattatttcttgtagtagcaaacctgctaaatcagggataagtactcttcttaaaggccaggtagtaagtattttaagatacgggccttacagtttttgtcgcaattctcaactctgctctgtggtttgaaagcagtggataatacgttaaacaaatgaccaggctatattccaataaaactttagttacaaaaatatgcacctgaaaaaaaaaatacgcacctggctagctttagtttgccaactgtgtgctaaaacatggataaggggctgtagattaaaatgtggaagccatttatatattttcaatcatgctaaattatatcccctgttgattttattgtagtaatcatttttctctctctcctttttcaaaattttaaaatgtcagcagtgatgtaccaaatggatcagccttgacacaagagaatatcagcctcctatcaaacaagaccagctctctgaacctgtcagaggaccctgagggaggaggggataataatgactcccagagatcaggagttactcccagttctgctccttaaaatatgaggagtcctacttttatcttctgctcctaatcagtttgtcgggcataggggtaggagaacgcataacttctaaactttttctcttaagagcggtcagagaaatccaggaaattcaccagaggcaatgtgcacaaacaccactactaaaaacaaaccctgcacatagttcacattaatgcatttttttaatttaaagaaaaagaaaattagcagtatctgcaagcaattcagattaaatttgtttttgttctgtgaatgaactttattttaataactttggacgccttggatccagggctttaaaaaaaaaagatattatatatacactctgtttgattaattgtatgatcttaatgaagtaggttttcttgtattttggtattacatacccagtgtataatttgtataattcctcacccccaatccttatcaattctcaccaccccataaacttaaaacagaccaaaaatgtcagctttcagagaattctgtggtgcttgagaaacagacagtactagactgagtta

SEQ ID NO: 6790 - DNA, 1213 bp, Homo sapiens
ctttttggtgttaataagtgataatgtgtcaggaaagagaagctatatgtcttaggatgttgaattctgtattagtcaactttagttactcagaaaaaatatttgcaggtacaatattcggtcttgaggagataagtttttttttgaagcatttagatttaattaatatagcagtgtcagtgaatatggttttgtgtctgtgtgtgcatttgtaggtatttctagtatcatttaattatttcctctattaaaaagaaaacagtatttctaagagaaatgagagtgagtgtgtcaggtaaacagtgataaatctggttgagatatggactggtttgtgtaaatttttaggtaacaatatggctctattagtctggaaacttaggatgaagagagagtacatttccattaagtggctcagtccaagaaggtagcctccctaactttgagataattatctagccagcaggattcttcttcacataaaccatttttaaagctttattagttcatgtttttaattagttcatgtttttaatcagtaggtttttttttttaatcccttttgtttttccaggtggttgtgggaagagaagtttgcagaactgaaatggaggtcagagcttcattacagaaggttagtggatcatctgattctgtggctacaatgaacagtgaagaatttgttttggttcctcagtatgcagatgataattctacaaaacatgaagaaaaacctcaactgaaggtatttttttcttttctacatatggtataatttttaattaaaaactatttgaaacttaggagatgtgtaaaatgcaaaggtttttctcaagtgctgactttcaaaataaaatcaatgtttgatttatccagaccctaattatttggtttgtgtattttaaaaagttcttgcttttggttgtttaccttttgatttggaattttagggggaagaataaaagaagaaaaagaagagaaaggattttttggtgaattagacataatggttaaattttacattactttatctggatgtttttgtttctcttactgctgggttttagaagttaattaaatgttttgctttcacttgagagacttttttctttatgatttttatgttttaaatcagctggtaacgttccgttgtgtgatttaacagtcgacttgtctaaatgtttttaaagcatatcttatatttttagcattt

SEQ ID NO: 6791 - DNA, 1247 bp, Homo sapiens
tgcctcctatttagatgattaaagttaaagctaatttattttctctgttttcattactaacgtaaaatttttaggtggccagtagaaagaattcctaacagccaaaatctctggtcttttagaatgtcattttaaaccacttttctctcatcttcttatacatatttgctccgactctacctttcactgtgggtttcatttaccctggaacctaggttactaggggctgcaggaagtacctggtgcagggaatactagtacccattctttcatagccaggaaaaaggggagagggtgttggaatatacacaaacaagtcaaagttggggagacttgagtgcatcaagtcgataagtctttgccaagtcctgcctactgagggatgctcagtttctacagggcagggaagacacctttggtaagaaaataatttaccttctagcattgacccccttatcaatcccttatcctcctttagaagaattgaattgcctgtggttagcttctaacttccccaaagcatgtagtactctgcagcctgggttgtaaggcttataatgagtgtttgccctagtctggggattctttttaccataagtggtgtgtctgatggaaactgcctccctctggaagatatatatcatgaactctcattgtttcagtgtaacttctagtctcacaaattcatggagtgaaagtcagagagtgaaatttagcttagtttctatggggatgtgagtaatctttagggattattaaaacaatatactttttttccccccaagttttcccttgctcctctttttctagctcttcccccattcacctatggaatcatctgcattcattatttcaggagagaggtagatacagtctaaaatgtaggagtaattgctcagctctgagacttacattttataaaaataaattcttatcttaatgtaaaatacttcttcaggaacaaaattcaaaagatccaaaaggatctaattgtacataaatctcctccttctttctccccaacccaccagcattctttctctttgtcattcagttctgtatacacaaacagtacatagtttacactcttgtacaccttgcttttttcaagtaatacctttgctatagttctagattggtacatattaaactacctcattctttttaattagttatagtaatcatatcttactggtagatattacttcagttcctcatcttatgctttcacaaatgatgctgcggtg

SEQ ID NO: 6792 - DNA, 1140 bp, Homo sapiens
agtatttcatttaacgttgatatatacttgctaaggaaacactaacaatactgtaactttgttaaaggacatagtattgaaatgggaaatagaggtcaggctcacatcatcttagtttaatgctgggcaactttttctgatttctgtagttccctgaaaatgtgtccttcgtacccataaagagatacaaatgcatttgtaacatttttgattgaatataaaacctttacagaaatacttatctcatggaaaggtaaagctattgtttaaaaattagtggaaatattttttcaattatatttaacatgcctataaaaatagtccttgcaggaaattatttgataagagcaaaactatttttattttataaactattttggaggcctctgatcctttcaaaccaaccaaactactattagatatgtacaataacatttgttgatattaatcattggcctcattgttgaacatattatttgcaaagaatcttaaactctgtagtgccagaatgattctcatctgtgccatattttgcaattaaaagtaacacacccttagaagaatcaaataagagccatctacatcccaggaggatgcaccaagttgctcacagtggatcttttcctctaaaatgatcttttatgttctaaaaagtgaaatcccctttatctgtgtttatattctctacagcccataaaactgatgtgattgttatgttatactcatcagataatacttttcttacataaatctttcattgttgttctgacatctttcattacaaaatttattttcttaacaaaaaggaacataacccagcattccaagtgtctgtgttggctttaacattctctacatggtggtctagataagctaatttttttttttttttttttgtaaaatgtaatagctagaaaatgttatcttggcgcttgtttttgtaaatcatttagtataggctgttagctttactggtactttacgctttgattccaagaagccttgtgcagttgccttatcaaatggccagctaaattaaagatgctcttttgtgttgtgaatttcatagttctgtacagagcttgtttcaatttacaaaaataagtacattccacagaatgcctaaagtgtgtaattttc

SEQ ID NO: 6793 - DNA, 1823 bp, Homo sapiens
gtcaggagtttgagaccagcctggccaacatggtgaaactctgtctctactaaaaatacaaaaattagccgggcatggtggcatgtgcctgtaatcccagctactcgggaggctgaggcagacagaattgtttgaacctgggaggcggaggttgcagtgaaccgagatgcgccactgcactccagcctgggcaacagagcaggactgtctcaaaaaaaaaaaaaaaaaaaaaatcatgggaaatccctgtgcctaaaaatagcccctaactattttgatgacctctttcgtgcaccaagtgtgtgcatgcttgatacgtgtgtgttgttttcattaagatgaatttgtgcgtgccgttttgattgtaaatatctttgggtactctgtcttccttcttatccctctacttcctgccagtgttaacaacctgaatgatagtatcttccggtgctttcgtttccccattgttgtatatgttttctttttaaaggaagccctcctatgacactgaaacagatcctagtgagggattgatgaatgttctaaagaaaatttatgaagatggagacgatgatatgaagcgaaccattaataaagcctgggtggaatcaagagagaagcaagccaaaggagacacggaattttgagactttaaagtcgttttgggaactgtgatgtgatgtggaaatactgatgtttccagtaagggaatattggtgagctgcatatataaatttgacagatagctatttacatagccttctaagtaaaggcaatgaattctccatttcctactggaggatttatttaaataaaatatgcttattaaacactcctgcaaagatggttttattagtaccctggtcattttgttcaaggaagggttatattgcattctcacgtgaaatataaaaagcaagtcttgcccaataaaaacgctacattgtgtgtattttttgttcagctaagaattggaaaagtatttgcttgccttttaagttactgacatcagcttccaccagtgtaaaaattgagtaaaacctgaagttttgcataaaatgcaaatcggtgcctgtgcttgaaggttgctgtagagcatctgaccccttattaccaccttaagcaatgtatatgccatgcattaccatgcactaattcaatcacaggtgtttctatctagatttaaatatatttgtcaatgaatgtggaatagaaaatctaaacatgacaataatagacatatctttgtatggtaccagttagttttgccgtggatcagatggtttataaaagtaataaccataaagcaaaaaataatttgaaagcccgtctattcctatgctcaataaagttaagtttttcttcattagaacagttttatgatttatttgtctaggagtatgtcagaaaaatcaggcttttagtaggaattactcctattccccctgaagtcaggaccagtgcctgtgatctccattactttattttcctggaggtattagccaacacagttagatcagagaaagcaattgaagccaggcatgaaggctggcgcccgtaatcccagctactaaggctggaggatcacttcagcccaggagtttaaggctgcagtgagctatgatgatgccactgtactgcagcttgggtaacagattgagaacctgtctcattaaaaaaaaaaaaaaaaaaaaagccgttagacacacaggaaaaatccagaagggtaaactaaactaaagctacaattaatatgggaatttggaagaagtggtaggatttaaaatacagaaacagtttatgtataggatagctataagtaa

SEQ ID NO: 6794 - DNA, 1279 bp, Homo sapiens
ggagttttctaagataatatgtatgtgtttggggagtgagagttttactacaaaataaaagagttttaaataaaaaagaggtttttagaaaaagagttttaagtaaaaaaaattgtactataaaaattctactcctgttgtgcaacaaaggcctgactcctgctttgattctgtttacaggatctagaattaactgtggctttcaagcagattctaggctggggtcacaactctgtcctctgaacctgtttagtttgtcaagttcttcattggtttctctctttactacccttgtcctcaactgaccagtcttctttgtgatattttaggccaggttatgagaattcatatcagagctatcagtctcccacaatgagggaggaatatgcttatggaagttattactatcatggacacccacagtggctgcaggaagaaagaggtatggaaaagtctccaagaagcctctgggatttggggatggggcagctggtctgagaggcaggggagagaccaaaggagccatgttcagaccctcaccttgggcatcctttcttggccagacgagaccatagcagaaacactcctcctagatgtcctgagaagagatataaaggagttgttttcctttgtatgcatagatgatggtactgttactagcactatgggtagtttgtacttcatccatgttttttctcctactttgccttatagcccagattatatagtctttgaccaagtaacagtgaagtcagttcttaaggacatctgctgggctatagtaagagtgtatcacttcaccctgaggacagcagatatgcacccaaatgagtgttctaccgtatgctaataggtatagggtgtgtcttaatggcagcatctgaactgctaggaaagataaatctgtttcaacattgaacacacacacacacaccaatccccatcgttgtgcggttgtatagatccatgctaactagttcagaggggactgagaggcgtcctatggactttctttattagctctcacctatctattttttcaatttggaaaatatgtttttagatctactgtgctccaggagctcctcacagctcactaatatctttctaagaactttcagaaacaggaagtgacctgtcttgattttgttttctctgagggtgcagtgccaaggcaacggagtccttatatctggcacgaagattaccgagagcaaaagtaccttgatgaacatcattatgaaaaccagcacagtccatttggaacaaatagtgagac

SEQ ID NO: 6795 - DNA, 1194 bp, Homo sapiens
ttgtctgtggaaggagacagaaggaaattgacccactctcctatctccagacctttacctagcccctccaggtttacagaatgttgctacttcacaatggcgatgtggtgagaaactcctgaatgaagaaaggaaccttgtctttcagggcataaggcggcgacttccaaggtcaatgcttttcccccacatctctatgtacatagggaacttagttctgggccatgtacagaaaatatcactgtaatataccaaaaggaagttaataatgtagattacctttttgattattgctatttttattattgttttcctcttgttgaaagcactgcagttgttacaggaagtaaagtaggaactgttgtgtgagcgagacatgagcctgtaggttcagtaggtagagaccaagcatctatctgatagaagcacatggagtgcaataggacattgtgagaaggaatttttcagggattcatctactagtttaaaaaccccactctggccctcttgtcctttcagaaaacatgcaaataccaagatccatacaaaacaataatttattccactgatcaaccaagactggttctggttggacagctaatctgatttggggattcactgtttcagaggacacagacaaaagctgttgcatcaaaactggactttaggagtaatttctattgaactcctgtcaatatgtttatttcctctgtctacagcagatgggagtcttctcttttagacaggggctttttgtttttaaccccaattgtaataaagggtgttctttttcctctttagagtttacaaaactataaatatttgtgtctccacataccatcttcatcttcacacattcactgtgctttcctccccatagtgggagctgtcatcaccaacagggtttactctcccctggagaggttatttaaatagctgtccataagccatccagatcaacaccctttcttccatacagaaaagggctaaccataccacagctggaatctctgaatatttcctattaaaaattttttctatgtgttgttataatttttgtttgggataaagactctatccattgtactagcaaatctatggggggtaattttatctccatctttaacttttaaagtacttcttccccttatcccctcaataaagaaaggaaatccaaatttgaagcatcactct

SEQ ID NO: 6796 - DNA, 1717 bp, Homo sapiens
gagagcagagttcttctttggaagtcccagagcaaaataactgccatcaagtgagtttgcattcgtatttgtttccccttccatagagggttagttttagttacctctagcttggagttcctgagaaggctggttataggactgagcgtgggaaaggaaccctcttcaggattacctcagtcccatcagtctaccccattgtgacattgagcccaacacacacgcttgacaccagactagacttgtcacagggccaaacccaacagccacatgccatagcttcactgcattttcagctacacctttggaggccaccttctcctatcaactgtggaaagccagaagggctcccttctccattctccttccctttttcaagtctaatagtgaaatctcctgcttaccccagcagtaaatagttgccttcctaccccttacctgggggccgataatttgagatactttgttttttcaatgcgtcagttgaaggatttagtttcttaaaagcaagaaatgttggagtgttgaatttttaaatagaatctcttttcatgtttgaatgattgttattagttctagaagcattctctttgtcatgacccgattatgtatactcttgggtttaggaaggacaaaagtgatgaaatttgcatgagatagaataaatatcttaggaggagtgaaagaacctgaggaagagacacgaccctaagggaatgaatgcataagcagtcttctcagtagcccagagtttccaggaaacaggaatatttatatcccttgcccactcttaaaatacatagatacataaaaaggcagtctctgtagacaacacatgcacacacccacacaaaacataattcctggggcttcctttttctgaatgttaatccattttatcgagcagtgattcccaaactttgagattttcagattttatgctctcgtctgttagattttatgacattctatcatcctaaaaaatgtactatatgtgttatatgtatatataagttaaagcaacttgaaattgacttggtttggcattgtctcaagaaccctagatatcattattgataccatggggaatcatagaaataaagttgaatatcattgatctgagagtaggatccagaaataagtagtttcagttcctgatcagttaagcctcaagtgtttgagtaaccaacacagcaagacttgggaaatgcagtgagcacccgaggaaaggaaagtggtagtctttgcctgcatttcagcatgcattttcctttcctactcagttgctatcttccacttaaataccctcatttgaccctaggaagttttttgtttttttttttagtttgagacttaaaaccagatttatttgttgttgtagagagatttccacagaagttgtgttttagggacctccatcatctttgtgggggtacagatatttatgtgtaaatatcattttatgtgatttccaaattttcgagggaaacatttcaattcccagttcaacaaaaggttaaatactaattgactcaatgaccaccttcaggaaagttaaatagtaaattaggttaaattttgactggtgcttagacatttcctagttatattaacttaagcagacagcagcacattaacctgagttacacctgtgaggaaatgaccttctaaatttgattttgtttttcatctccagggccttaataagagtgtgtta

SEQ ID NO: 6797 - DNA, 1197 bp, Homo sapiens
tagagacttcagaaaagtcccctaatgtctctgcctgtgctttcgtctcattggggaagggggatgaggaaggggagaagctgtacatgtcacggacactccaaaagccacctcacccaagtctagcgaggattcttgaggaagtaagatgcagaatggtttgcagagaggcaggaggaaggtatttccaaagtccttcaaaatgaagatgctagttctgaattctctctcgaaggaaatgcagaaagatatggatgagaagatggacattttaataaatacacagaagaactataagctgtaagtgtaacctgcactcgtctctcctcatccctaaagggtctcctcccttccctttgttggatccctttggggttcagaggacacccagactcttggaggagttgtctttgctcctactgcccctgtgacttggagtcaaggccttccatggccacccgtgtactggttatctccttgtcatgctgcaaaatgtctccccaactctctgcccctccctggccctcctcccccagtccccttagaagagcaccaaaggagcagcaggaactcaggctgatgggaaagactcacagagaaccacagctcaggcccaagaaaatggatggagccagtggagtcaatggagcaccctgtgctcttcacaagaagacgatggcaccacaaaaaacaaaacagggctcactggatccccttcatcactgtgggacctgctgcgtaagtgaaaccctgcccgagcccagcactggtgccagacccctggctccggctccctggtgacttccccgagcttgtgctgtatcatagtgaagggacaggtccgcccgctgctgacttctgggtgccgcccgagcctgcgccctccctgacctgccttgccttctaggcctgtggagcctccttagctgtgaccatgcaggacttgaccctggatgggcctacccgccagctccaccctcttattctgtccttccctttagcaagggcagataaggtgcctagcaggctgcccttcttggaccaggggaaattgatctttcttgtgccgtttctgtcctctgcaggagaaatgtttgttgtgtgctctaaagaacaactacaatcggggtaggtagattcatacaagatgtgccttttctcgatcaggtgccttgttgtccccaaggccatgtgctc

SEQ ID NO: 6798 - DNA, 1140 bp, Homo sapiens
aacttaaatttgtaatataataggaagaatagtattaattgtactatcacaaacagatcacataactaagaatggattatatgtaactctttaattaacagcattctgaatattttctgataacttgttataaagctagtttgtctttttcttaataaaaattagtttaaaaaattgtaagtaagtgtatagccttctcccctgacttccctttaccttatttgagaatcattgaactagttaaaatcatttatttctataggaaatgataggttgtcaggatgaggaaactgacacacaagaaaatgactcattcaagaacctaaaaatttaaagtcacagttttagatttcaagttgtctgaccctttatctggtactctaacaactaagcagcatgttgtgctcagcttttctgcagcatttgttaacctactgttttgttttctcagtttttaaggccaatctagtttctatcacttgattgtgagacagtatgtaaaaggctgcattttctttcactttaacagaaaagtagcagctctgaatccttaagtgacaaaggctctgaattgaagaaaagctttgatgctgtggtattcgatgttcttaaggttacaccagaagaatatgcggtaagcctcctacctctgtcttctccggttttgcacataatttacatattggtgctattgagttagaatttgtaggtccagcaaaagagacagcttttagaaacctggatatgggaattattggggaaaatagtacagctgtggagcaaacagagggatgaagtgggaaaagtaagaaaagctgtacatttttttttagggcaactttataagttacacttcaatttggtaagtagcaatatgtatttaccattatggtaattgctgtcatccctctataccatttctctaagccaactgtattttgttgacatatctaagaaacattttcactggtttttttaattaaaaaattgaaaaatgaaatatgaaggtgttattagatgaaaggtatctagaaaaacatttatttcttaatataaatttatttgttttctcattctcctttaatttgttaacagaatatattgatttcctaatgttaaaccattcctgcattccagaga

SEQ ID NO: 6799 - DNA, 1203 bp, Homo sapiens
tataaacaattaataaatataatgagagatttgaagaaagcaaagaagacttgtagacttgaaattgttctgctatacagaccagaataaaccaattgctgtgttagaagcgagttgccgctgttttgtcagtttgtattactgctgttcatcactgtgaacttctttaatatataataagataaggcttagattaggattaaggaaggtagagaagaaaagtgttgtttggtagtgtaggtgtatatgacatcagagataggaaaagaaagctcctgcctgtatctgtgatctcattatacggacagctttaacatattgggaggaaggaagagaaaagaggatgtgagtacattagaaaatagaagggtttatatatatatatcttaatacctaggagttagttttaaagtttatattgtgggttaagatataggaatagtagtgagcacttcatgtgtgactgagacttctttgtagataaccatattaggctgaatgctaatggatatgccgtattcctctaaagctgtcctcttttgagcacagagatgtctcagcaataattatcttctctttgttaggatctcccagccccattgccctctccctgcttccagtcatttacagattccatcgctttttcttttcttccctcagtctcttatctacatactagtctatattggctttttctctcttctatctgtaggtatccctacagcatcacccttagaacattccttttaagagtattggaacctacaagatgaaatttagatcaagaatttctttgcagaacaaacctacaagatataaggaagctctgacttctgtgaattcagtaattctttcatagggtaggtggtcatcagttgtgggattttgccctccctgtgcttccaaaataaatgcaagtgaaaattgggcttagtagtttcatagtttaaaattaatcaatgaatattctttcaaatacacttataatgactgttaagaaattgcctttatatatgatttactatttgaagatttctctttactacgtgattttaaaattgcaagttaaatccattgtaacaaattttaaggggtatcaaggctgctaaatttcatttagcctttgctaaaatggaggcttatttacatagtatactcaaaacagttttattcctaagtcatacccttgaaaaaagcatcctt

SEQ ID NO: 6800 - DNA, 1104 bp, Homo sapiens
tgcaaagtttgtataagtggctttattcctcttctagaagatttatgaggagcctaggaagcactattggtacaggaggaaaaaagaatggaaaacatgtttacagactctagctttccttattagcttaaactggggccctcaaagagcagcctgttgatcttttggccaaatgacttgagcataagtcttttatttctttttaaggttaaatcgtaaactgtatacctttactactgaaaacaaaactatagggcatcatactaattgaaaatcaatagtaatgggttccatccattagctttttaaatgaatagatctggtattgatttccttcctgtttttttgaggcacattcctttacaaccagtgtttaaaccaccacgtaatcatcttctgcaaacaaggggtgccagtgttgcctaacagaagataatctttaataaagcaaatcctctgcttcaaaggtttttgaaataattggatccctttttgaaaaggaagatgagtttaactgtgtccaggtggagtaatagtactgctgttgcatgaatagatgatacaaagcaagtgatgaggttggtatgacttctttagtgaccttttagggtttgcttttattttcctctcttttttgtattatttctttcaaacatagtaaatatatgattttacagccaaagtggtattctgttttttctaagctttgagatacaaatattgctatttaatcacattgatgatgaattactttccatgtgaaccttctcaaaatgatttaagtacctttgattttgctcccctaaaaatggcttgtgtctaaagtgacatttttttccctatttggagggttctaatgaaagagatccaggcataaaaactcttttgcttattgaaagcaatttgattacacctatgtttcaggttatagtggggagaaaatttggtcagtgccttattatttgaagagcaattttagggcatcaagtatgacaataatcatgtgccctcttgctcctcttatttcaggagtgtgtgctatccctctctccaccagcttaatctttctcaccccaagtctaacaaagtctttacagaaacctc

SEQ ID NO: 6801 - DNA, 1890 bp, Homo sapiens
gtgaatttttttttaagttttgtaacactgtcctactttatttattagaatctaaggctgttacaatcaagtcgttgcagggtttggatcagctgtaagttaggtatgcctaccaaacatccaaaggtagacgtggagacattttaatactacaaaactaggaaaatcagaactcatggccatttcctgccctcctccaacttgttaaaacatgtttattctaaagttcgaatggataaatttgagtataaaggttttgttataaaactgttctttagtgtaaggctgcattgtgggtttgggggaaatgtaaataattttctgtgtaaaacaaattcataggatctgatttgctcagagtattattcaagaatgtattaataaggcattgccccctgtttgcactcagggttaatatgtcaaatgaaatttaagaaggaaatggaagaattcaggtacattaattgcatattattttgggaaagatgagtcctatacgtggcaatttttcaatgtcatctgaagccagcattatcttccaaagaaatcgatcttttttttctaaaaaaaaaaaatgcttttgccttcccttcccttcccatccgccatatttcttcagcctttcttctcgatcacccgtgtattctttgaccagtaaatgaccacacctcaatgatggtaaaacagcatcatcagtaagctatcttatatgcctcatcctgtgagtttgagcttcaggaaacatgagtaaaagtatatgtaatgtatatagtcgtatatgtattctagcaagaaaaacatatttattttgacaaaggggaacactgactttctgaaggattcagaaagaaccttagtgaaaggttctcagtctctgagagtggaccctaattaacataaagaccattcatcagcgaataactactgagcaactctagtgtgccagcacaggccagacatactagtgagccaggcacatctggccttgggaaactcatcctacaggggaaggccagtttttttcccttcaattcctcaagtctgggtggtgacaaggtaggggctaggtactggactaccacaggtttttaggaactaaggtgtttctcataaacacaaaatgttgggtgaaactgggaacaactactcagaagctcatttatttgcttaaatggaaagtgtgggagccactaccctctcttttgatctgccaaggatttcctctcagagctgttgcacagacagagattgtacttggtaagataccaaacaagacagatatggatctaaatttctaatgtgttctatgggtttcaattctgaaaaaagaaaatgaataaagattttaataaatattgatatctgatcttttcctcttctttcccccttcaggatatttccagtggttcctatttcagttcccttcctgttaggggacagaagaagattacatcttttgtgaccacttaaacttccacagggatagtttcacagtacctggtggattagacctttaaatttcctcaccagtcttcaaacggttcatactagattgtaactataccaaaattttctatgggatcattgttaggtgctttttgtatatttaatagttaactccatttttgcagcttccttagaggtaaagaattatgaatcctgaagaacttgtcagcacactacaaaaaaggcaggaagagaaggccagttgccctagtagtacttcttaggacacctagatttttaacttttgaaatagaatccagcatcataaacctcaaccaggtaactgagcaaagctcttaagatttttattgggccaggcaccatggctcatgtctgtaatcccggcactttgggaggccaaggcccgtgggtcacctgaggtcg

SEQ ID NO: 6802 - DNA, 1765 bp, Homo sapiens
cttcttcatccccatgtacatctctaactttgaaattgtttacctctcctacaaaaatcttaccttttgacctgagcagagtagcaaagccctgttcactctgagggagcagctggcgtgttgaaggggaaaggccaggcacagcactgtcctcagaccacaccatatttggagcagaattgtgatacatgtcatctgtgtctattctggaaggttctttgttcatcactgtactcgcatcagcaaattttcagggtcctacctgtcactccaggctactgagctgaaccctcagaagctgaggtctccgagcatgctaagtaaccttttagaaaagctggaggcaaactgtcgaatgctagcaggctttatgaaaggaaacataaggagtttgtgtagtcagaacttgcttaaatttgcttcggaattaggcaccataaactttagttggagaatgggacttaaattttcacatatatgtatacttaattttcagcaattatgacacaataaaaagaatatgcaaatttattgttgtttcagaaggttttgcaggactgggaacgctttagtgtcatcaacagtaaacctcagatactgttctgcacagttcagaagtaccataccaggtattgtgagtggcaagaacgccaggggacagagatgcttctggtagatgagggccagagaaaccagctctcctccattttgacagcaatttctcactgtggccatttggcctccattatgttttgagaggaatttcttgagatcttgagaaatcaccatgattaggccaattgtcaatcagtattcagaaactagaaaggaacaatgagatacttgtttatggttctttagggcatatgtttgaaaaccctctcatctcagatctgtatagctggtgtgtgtttgtgtccataaatacacgtgcattgctgtcgtgcccattaagaaagggggagtaagtaaaagaggaatcgctcagatctttccttggatgaacagcagtggcgtggttggtgtgttgactgtgaacaggctgacttagctgttgatgtatactcagaacctccatctcctcccagaccctgcacttttccttctctgcagtctgattctctaatgactgtcactggacaaaccccagttttatgctcgcttagtaaaaataagtttaaacatttcatggtggttgacagaactttgtccccaaacatgcggattcaattctttaaaactcgttgaacgtttataccaaaggtcccgccccgcaggtgtgtatgtggtgcacagagggtgaggtttggagcatcgggcactgtgtgcattgctaaggggacatagtgagacaatgtgggatttaactaaaaacacatcaattgtgtgtcacattaccagtgttgtcaggtatttgttcttaattgttattgtaatatattttcagttgtttttctaatttaattctctccgtctgttgtctgactgtgaactgctaacagtgttaaacttgatgtaaataaatgaggcccttgaaagggactgctttctctgtcttctcacaaggtttgccaagttgtgttctgttttaaataaaggttgcaatattttattggcaaagtaggctggagattggagtgtttctcccatgattttagttgacagggagtctaagcagcatttctttctctctctgtaatgcagatgtctataaggtaaagaagctgattttagcaagcatccctctggcacattcttttttttt

SEQ ID NO: 6803 - DNA, 2310 bp, Homo sapiens
tgattgtgctttacctaaagtattttcttaaaaggctttgtgtaaaatttaaatgtatatattttcctgtagacttccatcatgattttcagagattagccttaaaaaatttggccctaagaaattcattcagtgtttttctagatgacctctgtacatagaggtcattatagtggagaccctttaccagcagcattttaagatttaaattagatagaaagtttcttaggattcaactgaaaattggctagtaaaatatgtcccaggtaataaagcatgctgactttgctaaggcactgcccatttttatttaactaaagtcatggagattttgagtttaaaggatgcagtatagatagtggtttagtgtttaggctctaatgccagtctaaaaggcaagtcatttaaccttgggagcctcagtttcctcactgtaaaacagggataataatagtaactacctcagggttgttgtaaggattaaatgagatgatatttgtaagatacttagctcaagtgcctggcacacaatgagcacactctataaatgttctactactactattattaacacctagtctagggatgcacagcagaatcccctagggttaaaaaacaaaacaaaacaaacaaaaaaaactgacggaatagccccactccagatcagaattcccagtgggctggggtctcggccagtgtattctccagtaatctcgccaggtgtttgaaacacccagtgctatctgaaaactatcagtaccccaaccctttggtttatagattaagaaactagcagaagatggttaaattacttgcctattgtctcagaacggttaattagtggcggagccaaggctagaattcaagtctcttgactttatggttgtggggtctttccaccatacctgctgccatgtgagacactgcaaaaaagtggctcagaccgacaatcagcctgtgtggtgctgcacactttctaaagcacatgctcctgacactttgaccttaaggggcttgaatgtggagtaatgggaacacaagccaagcaagcactcagtagaattcagtcatttaaaaaattcaatggggtcattcttttggacagacctcagcaacacagcaatgtgcactttgtagtaaagaaataccaacttgagtttttaaaaaacctagttagtcctacattcccttttctttaaaaaaactttattgttcacattattttaatgactatgagataatgtatatgacagcactttgagaaaatatcaactgtaatataactataaggttgtagtattgtctgtttaaaagataagacagttgattcaatgtggatggaccctgtggggtacctgaaaatgtagatacgtaagaatcacctctgtcatttatcacatttagaaatatgaaactgcttaacaggtatgagcaggtatagcaagtgtttgctaaagttgtagttcagagctgaattacttcaggaaactagggaccaactttttggtttaattccgatctttaaaaagtaagaatgtgtactcactccagaacacagaagctcttccaaggaccttgactcaagaaggatgaggtcctcttactcttctccatttatccactatatgcttggccatttatcctaaatgtggtgggaacagacttgttatctgttgatgttgacagtgtcttttttaacctatgtcctgcatagttttgttaggtttacagggggaggtggatggccataaaaccagtgcactttgggaattacttttctaggatttcctaccagttataaatgacattgacatttgtcatcttttttttctttttctaaaaagaatagctgaatttaattcacctattataaaatactcaaaagtaaattgccttggtggccacttctgaattatagctacatttcattatgaccccttctgctcccttccattttgctactgatgtcattcttgttatcaggctgtgcccctaccaggagttcatattgggttgacagggttatctatatttttgttcttgatttttgagtttcatcatcttgcattaaattgttccacctggatttggggttcatctctgtgccctaaggatctgctatgaccaatcctctttttgtaggtgggtctctggcttaagtattgataggcttcagcggtttgtgtctctgtcttagcttgtatcaagccagtagtagctcacttcctttgtaaattcctgcttcagtctgggatccgtaggagtatgtgagaacttctgaaacgtctccaactcttaacagtcaagata

SEQ ID NO: 6804 - DNA, 1695 bp, Homo sapiens
tgtacctttcccttcccttaccaccttaagcccaatccaggtagagaatagggagaggcattctcctctctatggatttgaagtgaatcacccccacattattctcacatgcttttcttctctcacatattcctccctactcccccacccaatcattgtgcttatttgtacagatcttattgggaatattctttatttattttgtcatttcacttctattttaagaatgcataattgaaggagtagtcattttcagggagcaccaggtagaccctgggaacctaatgacttaatccttaaatatgttttgcccttgaaaaataggccttttccttccttccttagttataattgtggaagctaattaggatggcatggaagtgaatctaatgagttaggtattattaatgttcttggtatcgggtctaattccagttactgcttcattctctttttaaagctttatgaatacttcccccatcctccccaaggagagctcaatacacacatatttttattttattctctcaaaggaatattagcttaggaagataggaattcaacattgagcactgagttttcttctggctctgtcattgatacactgtcaaaccacagcctcatctcttaatctatttaattaaggtaacagtacatgttctcaagggtgttgcaagtaagtgtgcagctatcccttggagagcctctctggaaagctcttttagtgcagtgttgttatgctgaattgttttccattatcttatttgctgagtagaaaatattaatgaaattaagaattgttgagattatatgaattgggctagaatactaaggggaaaactatgttttgaatagagtttggcatttttgaccaagaacaaaattgagttttcattggaaagaaaggaaaccttgattcttaccattgctgctccaaaggaggcccaggttaagaggattagaggagacacgcggtgctgggcattcctggcaggtgttgggtgatccccgcagtatgtcacctgcagttgcagcacaggcagctagtgattgggttcatctcctcctagtggttggaagagaactcagatgtaaaaaccagcggtccttctcccaccttctttcctgccattcttgctcatcatacatgtccgtaaacttgaagaactcgttttagcagctagccttttaaggtcgaggatgggaaagctaaaactgtagaatattattatgctgctttttaggtttatccctgttgttgtgggatgcaagttaagggattgtaattgtttttcagggtttttttgttttttgttttttaagcaagggctctattttcccttgagagttctggaactaagccttggagaaacactactgagtgtatttaggctccctggttttcttgcccaacaacaatctgaagggtagggggtgggggctgtgtcttactcaggggcagcacctagctgtcttgcctacagtgggtgcacgatatataaatggaattgatttttgtcaacactgtcaagagtggcattgactattggagcataccccgtccacatgatgcttgaactatgtaacttcaggggttgagggctcaaggttcaggttaaagaggcactgtcaacttactatacaagcataatttaggtttttcctttttctacttgaaaaggaccagcttaaaca

SEQ ID NO: 6805 - DNA, 2026 bp, Homo sapiens
aacctgactttttttctttggaccaaatcaggtttgaaatatcgatgatatatatgagaattttttttaaattctaaaatatagcaacattgcacaggaagatactcttacttcttagagtaactacagagtgattttttttttttcttgagtgagactctgaagaaccttttcgataatgtttggacttggactaaagcaattagaattatgaagcaatgataacctttagaaaatttttctatcacatgttgaatattttcaaaccttactttaataatctaaagttacgggattatatcttatattaattttgcagttttgagtagtatgataaaagaaataagaattcaaaccattaagtacctacctaaatactacatgtaaggcactgtgcttttatttcattcagctgaggtataagcagctgtactcaaatgttcttaaaaatgagaaccagtggggaaattgtttataatcattggaaatgaagaaattccaattggctatatctttacttcagcttttcttgaacaatttacagcattgattttcaaactgtgtctactggcacccttcccctttgtatcagagcagttctgcttttaactgttttatatgttggggttctctatgagatttcattggaacaaagagtttcactgatattcgagtttgaaaaccattgattaagtgaaaaaacatcttagaagataggaaatatgtttaaaaaatgaatgtattaaatcttatgagtaggaagatgaaatacaggtttattgtatagatacattatttatgaaggataaagatctatacatgaacagcagaatgtataagctagcatttactagcatgtctctgatgcttttgttcatttctgttaatcgtcatttctgtcccctctgcatggaattttatacttgtctagggtaagagtttgtagactctttcagcagaacagattttaataaccaatttatttgttttattttaaaaatttatttttgaataaccaatttaatagtaaattttatatgaacatttggcataactttaccagtttatttctatgcagtgatggaacattatgtaatgcagctcatttcttgaccaactagttatagaagtaccattaggttaaaaattagagaaatctaagagatgttatacttagtgagaggaagcagaaatggtgggtagattctcagaggttttgatgttcagtactgacggaccatgttctgtgattgtaagaaagattgaaaacagtttgtatggagatagagttgattagcatttgagctctgaaagcagaactctagtaaaatgatctcgacctaacaaagggtctgttccattatatagactattaccataatcctggattatttcaactgggttttggcctctccattatatgagatcatatgtatatagctaagaagtctgattaaagtatggaaagattttaggaaacactaagaagatacagggatctttactgatacctaaaaagattacaattgagtaattgctcaattgagtgtaggggcatacctgaaggaagaatttgcatttgggacttcgaaggaagcttccaagagatttgggaagagacctgaacaaaaagttaaagcatggtgaatgtgatatcactgtcaatccagtataaaagcagaggaagttgaaggaaaatctgtatcccatatgcacattttttctgtctttttagatcttagatgctagcgttacatccacaaaaccagtgttgccttgtataactattatattggcctgctgacctgtgctacctcagatctgtcaaggaaccagtatgtcgcatattcttgtttcttcattcagttgaatatggtttttcatcatttctcttcaaaataatttagaaaaataaatttctaaagtcataatttttaatttagcctttttaaaaacattttcccttccatgtatagtgcaatcaattgagggtgttgtcagttttctgtctgctatttcaaaagtc

SEQ ID NO: 6806 - DNA, 1543 bp, Homo sapiens
aaactgttttggaactaacttaccactcctaaaaaaatttctgcaacctaatgagtgtcatatgacaaagtagtcctagaggggaagtcctatactgtgtgcttcatagtggtatttctaatgataacttttgtgggaaagcagcctcgttatagctggatcctagattagtccagtgaattttaataagaaattacactgttgtaaactcacctcttatgcattggtcagtgatgagatatatatataaatagatagatagataaaatttgctcttatatagccatttattcatcattggccctgtttggcccatcctcagtgtggctgtgagattattgataactggtcactgtcagataaatcacattctattaggaaacacctatataggttatgcagaaacatgcagaaatgccacctgtccatacttacgtggctttacataaacaaaagactgtcttgtctttgtggtgactgaatttacaacgtcctcccctggaaatggaaaagtacctatcaggagatgtatgacaaaagaaattatcaagcctgacttcatatatattatgaacagtctagaggaagcatctttcttagaactaaggaggtctgctgaacattggccacattctggactttcatgaaaatcatggacccagagttggggttaagccacttagaaaaagctgttgaaaacatctcaaaggccactgaacaatttttaaattacacttaacatgccaggtatctaggtatctagtgcttttagcaatattatcaatattatcaaggtcccagcttctttgtgtccttcccccttgcgatcctctttttttttttttttttttttgctttttaaaaaatagtgacagagtcttgctgtatgacccaggctggtctccaactcctaggctcaagccatcctcccacctcggtctcccaaggtgctgggattacaggcgtgagccaccctacccggcctaggatccatgtttgctttttatcgttaggtttttttttctcaatgagtacaatatgacttcttgttgtaacagacattttaatccctaggaaaggctggaagtagagagcaaaaggctttctttcaagtcagtgttttatttgggaatcaagtctttcccaaaaatccctagcaaatttcttcttacatctcattagaaagtaccagtttacaagggagcctgggaaaccttggcaaaggggaatagggttagcattgcctgggtaggccacattgcctccattgaagaaatcagggcttttttttttttttttttttttttgagacagagtctcactctgtcgcccaggctggagtgcagtggcagtcttggttcactgcaacctctgccttccgggttcaagcaattctcctgcctcagcctcccgagtagctgggactacaggtgtgcgccaccacacttggctaatttttgtatttttagtagagatggggtttcaccattgttggccaggatggtcttgatctcttgatctcatgatccacccgccttggcct

SEQ ID NO: 6807 - DNA, 1123 bp, Homo sapiens
tgccaaggccttaagacttgggtacgtgtgttacaacggcaagagtgccagcgccaacaaaagacccattggacctgtcagctcctctgtttcaccaagcagacacaataaccttaccaacaaagcagagtaagccaagtgcctctgtgtgacaccaccagcagctgatgacgcataagaaaaatataactaatttagactagagccctatctcttcttgagaagctgggatttgaaggagctatcctgagatctgtactgctagtaagtgactgataacattataaactggatcggtccctgagttcagagactgagttgcaattgagtgaaaaatagacaacgaaatcttgaagaattgcacggaggtgcaagccaagtttatttggctctccaaataatattggttgaactaagaaattggtaaacgaaacctgtaataggactggtgtttgggcgtctctctctgtcactgttgtctcttgctgtcacattgctgtctgtgttgtctttctaggtccagatgttttcagataattcacattgccctgattgtggacaacagtggttccctagtttagaactaggccactggttgtaccaaactgaacttgttgaaaatgaatgttaccaggtattcttagaccgtattaacagagctgattattgtcctgagtgttatcctgataatcctgctaatagaagccttgttcttccttggtctttcccacttgagtgggctccccagaatctcaccagatggacctttgagaaagcttgccatccatttcttctgggtcctccactggttagaaaaagaatacatgactctcgagtagctggttttaaccctgcattacagttaatcttgaccagaacagataaaaccttaaacaaaaaactgggccaaaacaaatagcttctataatagtcaaaattgtcaagtctagaggcttttgtgtaggtagcccaaggaagatggaaaaataattcatttctaagtctgacccagattgtcactactttgggaactgcttaaattgttggatctgcttccgtggcctatacatattttattcacatgaatttagttagtattccagccagcctgttcatctagact

SEQ ID NO: 6808 - DNA, 1183 bp, Homo sapiens
tgaggtgtgtggatcacctggggtcaggagatcgagaccagcctggccaacatgtggaaactccatctctactaaaactacaaaaattagcccggcgtggtggcgcacgcctgtaatcccagcctctagggaggctgagggagaatctcttgaacccgtgaggtggaggttgcagtgacctgagatcacgccactgcactccagcctgcgcgacagaccgagaccgtctcaaaaaaaaaaaagtcagataatttactactttgaaaatactcaacaatttaaaaaatagatcaacatgtcaaatggaaactctttgatattcttcagaatcttactgattttcttgtctaaatttggggagcattgtgccagatgttattatagctaaagtaaaaaatgatgaaaaacaaatattataagaaaggattcctgagtttttttctactttggaaaaaggtattgggcaatatacttttaaataaccatgtaaattgatggtagctggattatttacagaattaacttatgtcttatgatggtgtttaaactttagctgagacacattgaaaataaattagaagtagcccctacaagtacagctgtgtgtgattctgtcatggataccaagaagtcttctacaagtgctactcgaaaaataagtagaaaaggtatgtatgaagttacttccaaatatatacatatattaaatataaattttgacaaaacagacagctagatctacaggggtgtgccaccacacctggctaatctttttttatcttttgtagagacgaagtctctctgtgctgccccagcttgtcttgaactcctggccttaagtaatcctctcatcttggactccttttaaagtgctgggattataggtgtagctaccacactctaccttaaatataagttgttgatgtaatagttttatttcagtttgatttcttcttacagtctcgtgttgtttgcttttttgtcagagacactggcatttaatttttttcctttgatatttggtagctatgaagcagcctcatgttcagtaaccgtagatggtgttttcaccatcttttgaccagggactttagcactattgcatcacccttgacaatgagttttcatttgtttttagtgatgagagtttcattttgaggttatatatgtctgattttttttt

SEQ ID NO: 6809 - DNA, 1183 bp, Homo sapiens
gagacagtcagatcaagatatgaatcatagtccaaacatccaatcaggaaaagacattcacgaacaaaagaacacaaaggaaaaagatttgtcttggtcagaacatctttttgctcctaaagagataccatactctgaagattttgaagtgtcttctttcaagaaagaaatttcagctgaattgtacaaagatgattttgaggtgtcatctttgctgtcactcaggaaagactctcagtcttgcagagataagccacagccaatgaggagctctacaagtggagccactagctttggtagtaatgaggaaatcagtgagtgcctaagtgagaaaagcctttctatccatagcaatgttcattctgacaggctgttggaactcaagtcccctactgagctgatgaaaagtaaggagcgcagtgatgtggagcatgaacagcaagttactgaatccccttccttggcttcagttcctactgcagacgagttatttgatttccacattggtgatagggtgttgattggaaatgttcagccaggaattcttcgattcaaaggtgagactagttttgctaaaggattttgggccggagtggagttagataaacctgaaggaaataacaatggaacatatgatggtattgcatattttgagtgcaaagaaaagcatggtatttttgctcctcctcaaaaaatatctcacattccagaaaactttgatgactatgtagacattaatgaagatgaagactgttactcagatgaacgatatcagtgctataatcaagagcaaaatgatacagagggtccaaaagacagagaaaaggatgtcagtgaatatttttatgagaaatccctacctagtgtgaatgatatagaagcctcagttaatagaagtagaagccttaaaatagaaacagacaatgtacaggacatttctggggtacttgaagcccatgttcaccagcagtcttcagtggattcacagatttcttcaaaggaaaacaaagacctcatttctgatgccacagaaaaggtttccatcgctgcagaagatgacactttagacaataccttttccgaagaattggagaagcaacagcagtttacagaagaggaagacaacctatatgctgaagcttcagaaaagctttgtacaccacttctggatcttttaacaaga

SEQ ID NO: 6810 - DNA, 4234 bp, Homo sapiens
gtaagtagaggaacatttctgtctaatattttgtgttttcctcccattaaattccttattctcttatgttatggaattccttatggaatacatattcccttacgttgacattgacaacatactggtaatctttaatatatatgaaatacttgaatattgtcaaatgttatttttgaagtcattttgatatttggcaattgaggttttttcaactttttgcaattttaaaaggggtattgatatcatatgaattatcttttttctctggtttatttccttgggctgtattcctatggataggactacaaagtcagcaattatattttctagcttttgtatgacaggaattttctaaccttattgtcttctaaatcctaggttcaggagctccatgaggaggaggcacagtgggtgaactatgatgaggatgagttgtgtgtgaaaatgcagctagccgacgggatctttgagaccctgatcaaagatactattgatgttctgaatcagatcagtgaaaagcaggggagaatgctacttgtgtgacatcttgcaaataaatcgaacgctgagtgctaatgtgagtcctgggcctttctgcctcctgatgtacacccatcgccatcatagcaagagtgcttctggaccttgtacttattcttaaagactaccagtatggagttcataggacaatgtggtacacctggtattacagcctttgcctttcgagactatccactggattaatgggttattttcagtgggcagggttgcacagtgtaatcctacaccttttgctaacacccctactaggtcccagagggccagaaacacctgacttacctctgagtttagactagggtatcacttctttgagtctgaagtcaagtgagagaggtatagataaatgcatcacatcacttttgaaatgtaattctggtctataccatggaagtcataaatggacattatagtctctaaacagtattaaacccttaaccacttctaaaataggcaagctcaataatgtctgccaacttcacattctggagtttatttcatttctttttgaagaccattttcttccattattgtagttgagcagcaccaagtggactgtcaggctaacaggaataagtggtagccttgctttctgagcaccatctaaagaattttaaacctctgcattatgtttagtgttctctgtgtgggcatgaaaacaaagaaatgcccctactgaagactgggctcaaaggaccaatgcagggctggttcttttaccccttggtttactcctgcacttgtcttactcattctgaatctctaccagctgctcccagaatcacagatactcaggaccatctcaggcatccaggcatggcaaagtggaaataattcattttggcctgcaaaccttcaactcccatctttccccaagaagtcagagatgctgttacttgaatgatttaggaaatgagtgtgtgcaccaaagacaaaaagatattgtctattgtttgtgtgcttgttttgcgctatggaacattttttaatttattttaagataaattattaagttgaaaatgtgtgtccctattcagaagtgaaagattcatcttgtaatagttaaacctccatcttgaagcttctatggttcatagtctttgcacaggaacctgtggttttaacaaaccaatacacatattgaagaagtcattttaattcagtgaaacgaagatgggcttttccagatcacctgcaatagcagcagtgggataaaatgatttaaaaacactgtacaatttaactctgcctctcttgcagcattgcttctcacaactattacctgcatctgaaaaaaaatctatagactccagctgctacattagagcataagagatgctctcctgggacctcagtaccctgccttcttgactggtttccgttcatcagtcctgtccctcttcaagtaatctagaagaatgtggatactcttaggcgtgaatgtaaatgccttaatattgaaggtcctggttagaagcatgatacaagacatctactggattcatatttacaaatatcctggaatgttatagcttcaaagtatattagaaaaaccccaaagatggtataatctttaagtgtgcacgttcgtttatttctgcatcttccctccaaacttgcctttgcatcttaaatatttcactatgcacactcccattcctcttgggtttcatcttgtcgtttaagaaatgtactgaaataatcattggaatatttgcattttgcacaatgactggtatgatagctcttgacaaataaggaaagcactgaaatgttgtgattgggtctcgggaaatgctcagattgatgtcttaccagcatttcttctgggcttgtgatgttgagctgtagtcttgtagccataatgagcaaattgactaagagaagcaaaggtttcttggggttattaaccagtagtgtggaaatactagttttatgtggccaaggaaaagcaaaggcttttcttttcagtttgtgttatttggaagacagaaaaacatcttgtctacatcctttggctgtttgtaggatcacgttgtccttacgatactgaaactttacagctgctgtaaattttttataaatgaatttcaaaatgttataatgggactgtaggttgtttttctacatcttcattatttggacctaaaaccagtttttaataagaaagtttatctttactctttctgaaattatgactccagaaaaagaaaaaaaaaatacaagtcatggaatcagcaatctggtaagaaatgctgccaagaatgtggcagtagctgtcctgacagactccaactgtctttactatctgaagaatcctaggctccacatgagaggcagaaatggatcagtcttattcttttctagaaatggttatctgtagtttggtagcaaaaaaaaagaaaaaagaatccataattagcagatttcttattaactatttggatctaattgaaatggctttattcttaggattaagaaagatagatgtggatacccagccactcgttccatattggtatctttttaaatcagctctgcctcttaatcaagaacctaaatattccctctttctaatctttgttccttctccctacaccctcatcctctttcactcttccttcataattcctctaagaaaaatatctttgcatcagcagtaatatcttttagaatagcactatcagaatttagcagtaaaccaacatacaggcttcagatttacttctgagtccaaaacaatttgtgctatccagggtagttaactctgggttaaacaagtacagggtatagattccctcttcaggtctacacaggaatttttaccatagggaaaagtggggagagctcaaacgtagttaataaggaaggtaatttgtttttcttttacctaaaagaaaagaaaattccttctgtgactacaggtctctgagaaattatctttcaaaagagatttcattgctcataagagtgttgtggcctattgataaaaacaattttgttcagtttcttgtcttgaaaaaaaagtggccttagctttttgcaatacttgaataaagtgtgtactcgcaaaagaatttctgtagcacagcattagagactcataacttttctgcaagaaatacaaacttacatcttccttttactaccttaagaatactagtgaataaaacattaattcaaagagcaaattatagaaactacaatgacatttaatgcaaattgtaggaatttacatgtttacaaatcatcttcaactggttgtgcagcaattcaataaaatatctttgtattataaaaatgtgaagaaaaaatgtaaactgatgtaaaggaggtactgtcattttaattaacctatgtttaatagcttttccttctggactttgcaaagccttcttggcaaacacattgcaaagcattctctgggaggttcagcctccttgtgtgtactgtactgtgcagacatgaaaaaataaacccgtttactgtgtgcgtgtaaatagcctggtcatcaggccattttcagccaatagtcacatccagtgcaattttgcaccgaacacttaagggtgtggtttgtaagtacgatctgtaaaataactgggatgaattcccatgtatacctgtgtaaatagatttgttaactgaaatatactttaagaaagataaaatctgt

SEQ ID NO: 6811 - DNA, 1127 bp, Homo sapiens
gaaagggaaggtggatttcttgtatcttagtaagaagtttgatgcattttccttgggaatattgttttttatgtgatgattagtttctgtacgaccaaaatgccataagcacagttaatttatgagaataatctctattagtctgtagatcatatatcctcaataggggtgaaattttgtttgaggaaattataaaatcttagattacagtggtttgtggtctttcaaaatttaatagctatgcattgtatctgtgtttttaaaatttcacggggaggacgattaggaaaaaaaatgtctgaaaagactgcttaggtagggcaataaggtctgtatagctctagaccaatgtaaatgcaaaaagacagagcttctctatccatagcttattatctctatattcagagacccttgaaatgtgcatacagtttttttaataataagaaaaatgctgtttgtgttatttgcataatgacaggccattttggatattccatattgtagggaagcttggaaagcacttggtgattcaagccccagccaagcaatgcaggaatatatcgcagtagttaaaaaactagatccaggttggaatcctcaggtaagacttaatgattataaataatactttccaaaaacttatgatccttctctgaaataaatgtctaaaactaaacttagttttaagtaacatgcttaaagttttactttcttgaaatattttaaagttattgtaatatttatctaataaaataattgctggccaggtgtggtggctcatacctgtaatcccagcactctgggaggccaagccaggtggttcacctgaggtaagagttcaagaccggcctggccagcatggtgaaatctcatctctactaaaaatacaaaaattagctggacgtggtggtacacacctgtaatcccagctactcaggaagctgaggcaggggaatcaattgaacctgggaggctgaggctgcagtgagccaaaatcaggccactgcactccagcctgggtgacagtgtgagactccatctcagaaaaatgaaaaaaattaataataattacttaaatagtaatataaccagctactgatgctgagaacttctctgagttgcagagt

SEQ ID NO: 6812 - DNA, 1284 bp, Homo sapiens
gtaaacaataaatggttatttaagtatataaattagtatataggctgggcatggtggctcactcctgtaatcccagcactttgggaggccgaggagggcagatcacctgaggtcaggagttccagaccagcctggccaacatgatgaaaccccgtctctactaaaaatacaaaaaattagctgggtgtggcgtcacgcatctgtaatcccagccactcaggaggctgaggcaggagaatcgcttgaacgcgggaggcagaggttgcagtgagccaagatgacaccactgcactccagtctgagcgacagagcaagactccatctcaaaaaaaaaaaacaaaagtttgtatgtaattaaattccaaatgagcagtactgtcaataaattttatagttatttggaaaatcattagaccaaatggaagtgtttctcatacagtgggcttaaaacgaaatatgttgattcagtgaatttatgaacaggtaaggatccaggatctgtctcttaaatagtaagtagaatttgaattagtggagagaaagaacaaggccattttaagtagagggaacaacataagtaaatgtgaaaaacaaacttattaaaaggataataaaattcatcacgagtcaagagttaatattttaggggtgctgcgagataagtttgggaaaagtgagttggtgattagattatgaagaatttgaattgtgaggctaaggtatctaaagtatttgaacattataattactggcgagccatagaataatgatattgaacatttgtgtggacataatgggcaatagaatgtagtgcttaagagtatgaactttggagcaaaactgggttcaaattctagcttaggtcagtaactaagcaaatgacaacctctctgtgctctagtttcctaatcaaatggagataatggtttttaactcaaagagccattgtgatggttaaatgaattaccaattattctatgtaaaaatactgagaacagtgcttagcacatagtaagcattccgtaaatattaactgttgtcatttatatgacatttaaattttcacactactttcatgtgtactgttccttctcattttcatggcaactctgtgaggtagatattactatatccagtttaataatggagtaaatgaagccaaagagaggttttgtcatgccggatccccaaatgacagaactgatcacatgattctaagccacttcaccatgattctttgtaatctaaaaaactaatagaacaatgggatgacatgctgaaagt

SEQ ID NO: 6813 - DNA, 1514 bp, Homo sapiens
tgttataaactttaggaatcctgccatctatgccttgaccaaatgacttaatttctgttttctgcccccatctgtaaattgaaattaatatggttcttgcttatagggaggttaagtggattatattcattattacatagaacttggaccagttccctcacagaaagagcctactaagaataaactattactatttttatcttcttattaaatacctacaacaatatttttatcagtcattgactacgtatgttgctaaaagttaccataaatgtacagtatatggtgactgcatatgaaatttagagacaatagatagcacagtagattggaatgaaggaggcttaggttgaggatgaacggttttctaaaggataagggagtgaatagactagagacacagtaaagaacataaaggtagaaatgaagtgcagaaagaaaaaccatgtgactagaattatagtaagaataattttgctgaatagatgaagtatgattgtaaaaggctgaaaatgcaaacttgatcttgtaggcaggaatgagtcacagataattttttttttttgagatggagtctcgctctgttgcccaggctggagtgcagtggtgcaatctccactcactgcaagctgcacctcctgggttcacgccattctcctgcctcagcctcccgagtagctgggactacaggcgtccgctaccacacgcagctaattttttgtgtttttggtagagatggggtttcaccatgttagccaggatggtctcgatctcctgacctcgtgatccgcccgcattggcctcccaaagtgctggcattacaggcatgagccaccgcacccagccacgagtcacagagaatttttctgtagaagaatgacattgtgaaagtagtatcctaggaagttttaatagcactgtgtaagatatattaggcaagggaaaaactgaaggccagaaagccagatgaaaagctatgcagtacttcaatgtatggggcagtgaaaattcagatcaggatgcttactgttggaccagaaggaacataaggagatgttttgaaggaagtaagaaacaggaggtagtatcagtaactcattggatatagaggagtagagtagaacctgctgaactttaaatagagatttggaagttctctgaagaaggcagagaaaagcagagagcagggaactgagtcttaatccctggctcaaccatagtagccagggaacaaacacagacaagagaaaaaaagaaaataaacaaaagaggtaggaatagtcagggaggtaataggaagagcatcaaaacaaagcatggttggtgctgtgatcccaaggaagcagagtttgaagaagctggggcaggggagcactgagtgggtcagtgagataagtgccacaaagggctggaagaaaatgctaagtgtgattggtgacctcattgagctcctgattttgaagtctaattatccttgttagttaccagcagagggcaatctaaacatatactat

SEQ ID NO: 6814 - DNA, 3711 bp, Homo sapiens
ccaccttacaatttgattggaggctcccatacactgaaactctcaatagaattcttaaaaatgaacatcagctgggcgcagtggctcacgtctgtaatcccagcactttgggaggccaaggtgggcagatcacgagctcaggagttcgagaccagcctgaccaacatggtgaaaccccgtctctactaaaaatacaaaaattagctgggcgtggtggcgcatgcctgtaatcccagctactcaggagactgaggcaggagaattgcttaaacctgggaagcagaggttgcagtgagactagatcatgccactgcactccactgccactgcctgggcaacagagcaagactccatctcaaaaacaaacaaaaaaaatcacagactcattttaaaggagcagcaacctaaccaaatacaaacttcatttgattttaggtttagaaattctagttttattttggagaatcactcagtttttaatatcaattaaaatagtcctcaaaggaatgaagaggaagtctaaataaatgaataaaactcatttttcattttatggtagtatagaaagcattgatgtgtgtagagaaattaaaagacaagagtggtttactgtctatgcacaaatgagtgcctatatttaaggctgcctataccattacagtggcgtaattggtgatttcatagcatacagagaaacaatgaaatcaaagattaaatcattaggttatgatggtcatttgtaagattggaaagtagtcaaaaacccatgtgcaactttttttcagcactctaccattaggctccttaggcaagctgcttaacttccgtcagaagcaaaggtgtgggagaacaccattcacctcagtagtaacttataaaaaccgtttaaagaaggaaaatgggccccagcccctaggatccctgacttcctgatattctaaacatgagagttctgtgactttaactgagctctttaccagaagtaacgtgttgatgtatattatctttccaccatgctttgaccaaagtacattcacagtaactagagaaagcagatcatccatttctggataggtgaactacggcaaggtaagaacagaaaaaagtaaagtagtattgagtcatgcaggtatcagattaacagacattcattgaagataagtgaaataactttggagatagcagagaagagcaagaagatgttggacgttggcagtaagccgcagcaaggcagttaggaaagtacgtgagcctgatgacgcgaaggtgatgcctccatctgtccgcttagtggttattaaattgctgggaaagacctgcctttattttcctatcatcttttccccattactttgcattattcaggaaataattatttattcccaaatgcagttttctaagcagtgaccacaaaaatttcttattctaaggaaaataattaagaaaataaccctatctgtggcattgttttaaaatgtgggatacaaatctggtaagcagatttcaggtcattattgttttcttttaatggtttacatgaaattttcctctcaaaaaacaagtacctcttactgtataacatttgagtttttaaaattgagatagcttctgagagaaaaaaagaaagttgaatttgtagctctctcaactacaaaatcaccacacttttctcaaatctaataggaattcagtgtcattacagatacggtctctagtgaccaggtgaagacaattgaagctttggtagaacttctgcaaaagttaggtaaagaagaataaatccaatttatcagctttgttcatattctttttctgagtgatctaaatttttcttgcttgtgatcattagctaagacaaggagtgttaaaggttttctaaatgcaaacacatacgtttctgcatttcagaagtcagtcttgatagtaaatcctacaaactctcaactttctgcattgtattttaagtctatacaatgttagagcacatggtaatgtgggacagagttgattatatgatagcatgagaaatttgcactggttggtgttacaaaccaatgatctaaccagcatactctccaaatatgaaaaagtaaaaacatctcattaggtttggaagagcctaaggtagtccatacaggaagtttgcctgagaacagagaggagcctgttgattggcatggctcatgatgcctttcttgtatgaattatcaaaactgatactgagttgcccctagaaaacagccttccagaatatgtttgcttatttatggtggaagaggaagtgagaacaagatgagagtttcccttaaagtgaggagaatcattatacaactttgcaactgaagtatgtttccttgtagcaaacctttggtttattttatcgtcaaatcaaagccaccctcagttttttgtatggtgccatcaacctaaggaggacaatcaaataacctattgtttgccttggattcagtatatctactaagtacacagtctcgtataccttcaaaccagttacttgactaaacttccaccatattaccttagttcttcctatgccctttcctctgtgccaccacaaatcagagggaaagactgcagtacttctagaaagttgtggacttctaagaaagagccaggcttccatctcactatcccttgatcattatctctgaagtccctacctgcacttccctgattgccctgtagcaacaccagcatggtgggaattggagggaaagattgtggaaaatccctaaagggtcattgttcatgacgttattttgaattgtaaaattgtgagccactcacatttcaattacaaaaagaacagaactcttaatcacgttgtgaagattaatttcttgccattttctggattagcacagaagcttgtatcaatgaagagtatttaggaggggaatagggggaaaattgtatttttctgttcaaactctctccttctatttgtgtttccttcacccctctccctccaccacactgtgttggtcaaatgatactattctatgaaaccctgagctatagttgtcaaaagtaactatggattgtgattagtcctctgtgggtgcttccttccctcttttttctccctcactctctttctcagtctccactctggtaaatggaaaaggtgatgtcgaagaattgatgcttgcttggactcatgttgtatctgtgactatgctattagctgtctcctttttccttcctatatgggtagaattcttatgacttatgaagttcccttcttgataagtaggttaaatgcacaatgtggtactgttttatagtttctagatggttgtataaagcaaaaagttaatgtggttatgtgtttttaaagaaaataagtgattggtcactaaactctgtccttttttcattattacaatttctctctgttttccaacagtttgctgactcctttgtcactggtgaatggtttgtgtgactgtttttctctcttggtttcttgaattcctgaacatagttccccttaggactaattttcatatggggttagggcaaacagactacagtggtgaaatttttaaactatcctactaagttaaaagaagtttaaatggcttttatcttcaggtaatatgtgaggtgtgactctaaagcaatgggattgttgtaacaaatctttcttttactcgcacaaagaatctcaaatattacaaatatgag

SEQ ID NO: 6815 - DNA, 1609 bp, Homo sapiens
ctgacttttctccgtgtgaccccacaattgacatggctcctccatcccagcgctggaagggccagtgggaagaggaaatagatgtctgcactcctggctgcagctggacaacagaagccccatgccgcctgtccagttcggaggagaactagctgctgccttgccttccgggacctcgtttgctgaggagggacttacagactccactggtgttttgctgttgctcattccatgcatctttggcagctcttttcttctgctcagacccttccccgtgctcagacagtgcaccgctgtcccatctaaagaaacctgtcaggaatacgagcttctgggtatgtttcgtttcccattgctgtagcatttcttatcccctgagagctgatgattattgaggacagaaggctcagaaacagtttgtgacagaaaatgcagtgtttcatttttcagggataaatgctaagataaaattgcttttccaggtcatttttttttgtggtaagaataactaatggaaaataatgaaacaccctggggtttgggggtgctaacaacttgtggctttaactgacaggagcaattaaaaagagcaagagggttctgcattggcatagcttagggaagggttaatgatgtcgccacaggtcagctcctgatccttgccgacttgatgttgctgtaccagggcttcctccccagaggtgcagcttgcgttttgagggtgattgctacatatgttgttgctaaacagctcagtaacacacttgaatgaatttggataccagattgtcctcattacagttcttttactcttagggcactctacactgggggttggggttgggagtggttagtacatttattacatttattaagaaacgtaatgacataaaaggttagctctgggccagacttctcttactctgtgggtaatggcaaggatgtgtaggtaaacttggttcttttttttccctaagatgacagcttgattttatcatctgcagtcaaataactgagccaatccaaatttaaatgatagatgctttaattgagtttaagtagctgaaactgctgagacactaaactttaaccttctgatgactttttaaaatgcctcaaatgtgcacatgtatataggatatttttataacttccctgatgaataatctgatattaaagtagtatttggacccagagccagaactcggtggtggaggctgctggtctctcctcaccaccttcttttgcacttggaaagaacagcaacatctggatagagttctagctttgacttctcatttccttgtctttttgggtgcattcctcagcacactttttttttaaacctttttgttttgttttgtttgtatttcatgtggttttatttgggggttttggttttttcacccttttttgtgatttgcaatgatgtgcttgcccagctaacttttgaattgcactttttaataaatattcttaacaatttttgaagaaggatattttatctcatttgagatcatggtaggttaagaaaatatgcctgttgatgaaagctaaaagcaaatttatgaaactaaaagggtgattgacatccatgtttacactccgc

SEQ ID NO: 6816 - DNA, 1171 bp, Homo sapiens
cacagggaatcctttcgtttgtccttgaagagagaggaaagactgcatagtttccccacatccagagatttgccagactctcttgtatttaagctgtggcagtctgttgtggattgagaccttgatcttggcaatgggcttcctcctcccaaacatccccatgtctcaatggtcatctgcacgtgtgctttcaaccattgtctgctccattattggacgtcagccaaccagagtaaatctctcttggtggtttcaagccccgctgactgttcacaagttggatcagcaggagatatcagtagcttaacaatccagccttttgagcagtgtgttctcagaggcaacggtctggtcctttgatttctgggctttgcttctgaatgtgaattgtcccaagttggcaaagaaactagcagctgctagagtgctgggcttggaaccaggtaagatggattttaattgcttatttcccatttctctggcaccagttgatcgtggaacagcaggatgagcagttggagctggtctctggcagcatcggggtgctgaagaacatgtcccagcgcatcggaggggagctggaggaacaggcagtgtgagtattgagacacccctctcgcttcagtgaaattgaggggcagagccatcctatgacacccctaaaaagcctggcagctacgtggctggtaaaatcaaaagctattttattcatagctgcatttttattctgttttacagattagcctccccaaaagaagcaattctacttcgtaaattttactacaggctttaggtgaagttgttattatttttaaacacctccaaaaacagacacagatgtctctgagcagatactcgaagtatagttatgaatgggaatatgaaacagagaagcctctgtaacctgtgggaatttttgttccagagaggataggacatgagctgactttatcatcccatgactctcctgctatattgaacagacacgttttgctttgaatcttaaattattgtaactttgttttttttttttaaaaaaaacttacaaatttaacgccagttaataaaaactctttcctctcagaaaaataaataaaaacaaaacataacctcagtttgtttttccttatgaacaatcccttttgcacccagaagttcgatggcaaaaact

SEQ ID NO: 6817 - DNA, 1177 bp, Homo sapiens
aagggctatggcttaccttcttgtcattccagggaactctccctttccccccaccaaaaaaacccacaacttcccctgggtcacactttttttaaaaaagtactctagatcttcggaatcaggttgactggaacctatgggttgctgaagttccacaggtaccaggaagagctcttttacaagagattgaatgcttttcaattataacacagtatatagatgggtgtttgttgatttagcagacgtttatttgcactttaaggggacaaagcccattgtgaggcctattgggagagcttaaagacatagagggcccttcctggaattccttaaatagtaccacccaggcaccaacctacaccactacataaaagccttgcccaggggaaaatagacaagaaatgtgaaaactctttatatcactcttgatgcatcacttgttcagagatagtaattgtttgtttctcctgactcctctggttgttcttctcacacaggcactgctgggagacagtggcagccagaactggagcactggaacaacagataaatatgggcgtctggaccgagagctccagagagccaattctcatttcattgaggagcagcaggcacagcagcaggtaccccaaggaccccagacttaggacgggccagtgggaaacaagacacccccttagttcctttgccagccatggggtcttgtggcttagtgacaaggagggtaagccagagcttgtcctgtgttgattgtgtttaataattgcatatgtaaagggtttcaaaatcttcacagtgtgactgcttcaagagaaccaagctcagccaggcgtggtggctcacacctttagtcctagctactgaggaggctgaggctggaggatccttgagcccaggagttcaaggctacagtgagcttcgatcatgccattgcattctagcctgggtgacagagcaagaccctttctctaaaaaaataaagaaccaagctcagttagttctcttagaaaaaacagacctttgtccatctcagcaaagacactttcagaaagatctctcatttttttcttcgaaaattattgattggtttcttttttttttttttttttgtgagacggagtctcactctgtcacccaggctggagtgcagtggcaccatctcggctcacggcaacct

SEQ ID NO: 6818 - DNA, 1227 bp, Homo sapiens
ggtttaagaatttctcggattaaaatacttaacctataataaaatggtagctatgtaagagtaaccttccctccagcattctcattcctcccacaccaagaaaagaaaggccatattaggacttatcatctgagtataaattattaatactgtcacaccaagtggaagcatgtgggaatgctcattgccctttagttaatttgtaggattgcttcattatacttttacgtatagtctgttcagagaaaaatattaaatttgtccttccccaacaaacttgatattgtagctgcttaaataatggctattgtattccaagcatcagctgagaacataatactcagactgtgtatcaaagttttgaactttgatatttgtctgtgaagagccttctgtgggaatggtggttgctgaggatggtgtatgatcataaatgttaacctaaatcatgcagtaacttgaccatggaatgttgtctgtgatttctctcctttgcctcatcttgattacagagaggtacagaaagcagtcaacactgcccagggattgtttcagagatggacagagctcctccaggacccctccacagcaacaagggaagaaatcgactggaccaccaacgagctgagaaataacctccggagcatagagtgggatctagaggaccttgatgaaaccatcaatatccttttctgtggtgtctgtgccattcgggataaatagacaaatggacaagtttttctccagttgtttccagtatgtagatgaaacattttataatcgattaatgtttgttgctcttacttgtaccatgacatgtttaaagtatttgcccagtaacttaaggtacagtagccaaattcttatacagtgtgtgacaaatcctgtactataaatgtatatatatatataaaggcagcatagtgtaatgattatgactgtggaccctggagtcagatttctggtgttcaagtcctgcctccaccaatgtaaagggaaaaaaaaaaaaccctttttttcttttttttttaagtctctaccctcacactcaagtcagtatgatatttctgacactgtctacttggagatagcatcaggtccacaggttaagagctcagtcccacaagactgcccccacttcagatgccagttgcaagccctaggttgtgaccagcgcttccaactgaccacgtataaattggagttcccacgaccccctccatagat

SEQ ID NO: 6819 - DNA, 1163 bp, Homo sapiens
ccagttaatcttgctttctttgtttggctgggatagaggggtcaagttattaatttcttcacacctaccctcctttttttccctatcactgaagctttttagtgcattagtggggaggagggtggggagacataaccactgcttccatttaatggggtgcacctgtccaataggcgtagctatccggacagagcacgtttgcagaagggggtctcttcttccaggtagctgaaaggggaagacctgacgtactctggttaggttaggacttgccctcgtggtggaaacttttcttaaaaagttataaccaacttttctattaaaagtgggaattaggagagaaggtaggggttgggaatcagagagaatggctttggtctcttgcttgtgggactagcctggcttgggactaaatgccctgctctgaacacgaagcttagtataaactgatggatatccctaccttgaaagaagaaaaggttcttactgcttggtccttgatttatcacacaaagcagaatagtatttttatatttaaatgtaaagacaaaaaactatatgtatggttttgtggattatgtgtgttttgctaaaggaaaaaaccatccaggtcacggggcaccaaatttgagacaaatagtcggattagaaataaagcatctcattttgagtagagagcaagggaagtggttcttagatggtgatctgggattaggccctcaagacccttttgggtttctgccctgcccaccctctggagaaggtgggcactggattagttaacagacaacacgttactagcagtcacttgatctccgtggctttggtttaaaagacacacttgtccacataggtttagagataagagttggctggtcaacttgagcatgttactgacagagggggtattggggttattttctggtaggaatagcatgtcactaaagcaggccttttgatattaaattttttaaaaagcaaaattatagaagtttagattttaatcaaatttgtagggtttctaggtaatttttacagaattgcttgtttgcttcaactgtctcctacctctgctcttggaggagatggggacagggctggagtcaaaacacttgtaattttgtatcttgatgtctttgttaagactgctgaagaattatttt

SEQ ID NO: 6820 - DNA, 1246 bp, Homo sapiens
tgagcaggcccgccctggggcctcttcctggatgtgccctctctgagttctgtgctgtctcttggaggcagggcccaggagaacaaagtgtggaggcctcggggagtggcttttccagctctcatgccccgcagtgtggaacaaggcagaaaaggatcctaggaaataagtctcttggcggtccctgagagtcctgctgaaatccagccagtgttttttgtggtatgagaacaggcaaaaagagatgccccgagatagaaggggagccttgtgtttctttcctgcagacgtgagatgaacactggagtgggcagaggtggcccaggaccatggcacccttagagtgcagaagctggggggagaggctgcttcgaagggcaggactggggataatcagaacctgcctgtcacctcagggcatcactgaacaaacatttcctgatggcaactcctgcggcagagcccaggctggggaagtgaactacccagggcagcccctttgtggcccaggataatcaacactgttctctctgtaccatgagctcctccaggagattatttaagtgtattgtatcattggttttctgtgattgtcataacattgtttttgttattgttggtgctgttgttatttattattgtaatttcagtttgcctctactggagaatctcagcaggggtttcagcctgactgtctccctttctctaccagactctacctctgaatgtgctgggaacctcttggagcctgtcaggaactcctcactgtttaaatatttatttattgtgacaaatggagctggtttcctagatatgaatgatgtttgcaatccccattttcctgtttcagcatgttatattcttataaaataaaagcaaaagtcaaatatgacatcctgtcttcaagtgctgtgtgggtcaggggaaaaggggaagtgttgtggagagctctggggaggagctggcttttgggaattccacaggacaggcgagtaagcttccatggcacaggcagaagtacagggagagcttgatattcacctggtacctgccagagtcaagagaagggataggttctaacgaggctgctatgatcagtgactttttaagctcgtgacagccccacttgtgttgggctgttgtgtggattggactgggctcagcccactgtcatttcagagcccgtatcttttgcccacctggctgggactcggcatgagccatttccaattctgcctgtaacagt

SEQ ID NO: 6821 - DNA, 1287 bp, Homo sapiens
ttaaatcagggagcaatgagggatttcctaggagaaacaggaaagaaaagactttgtagtgcttgagagttggacgacgatagtatagaaatggattatctggaaatacagactgagacagccagcaatgcagaatttgctagaaaacctaagattatatctttttaatcaaaagatctgaagatgtaaatgaacagcagattagaaaatttagaaaaagaccaattgcaacaactgtttctcaacttgctttatcattgattcaaatgtaaactttttggaaaatacattatttcaataatacaaagaaatatactcagaaggctccatgagagttttgagtcaaatttaagtttgtgtttgaattttagtcctatcctgtgagaaatactaattagtggaaaagttcagtatattgatgtaagctctacatttttggaaattaaatttcttctgtattctatagtgtgtgactagtcaactagaataaataatgacattacaagtaattagagtcactagaagaaatctagaagacttacctcatgagtaactgagacaatccaaaaatatgtctccctgttttttacaggcaaattgcaacttgatctgtggtgatgaatatggtccagaaacaaggttgagcatgtctcaattgaacgaaaaggaaactccttttgaactcatcgaggctctacttaagtacattgaaacccttaatgttcctggagctgtgttggtttttttgcctggctggaatctgatttatactatgcagaagcatttggaaatgaatccacattttggtatgagtctttgaattctcacatatttgagagtgaaaatgaatgtttttgctagtgccttagccagtatgtgaaaacaaaattttgtattgtttctactttcgaataaaaatatgtataatggagagctgtttgaaaccagctcctgtttttagtccctgattgttctttattgttatataggaagccatcggtatcagattctacccctgcattctcagattcctcgagaggaacagcgcaaagtgtttgatccagtaccagttggagtaaccaaggtaaatattaaacattagagtgatgggattggaagtgacgtagatactaaacaaatgttacaggctttcaaagagctacccaaaaaattgtaacccatctaaattgaggaagaaaaaaggagtcttctctttctgagcttagtagattgttgttcattaatcagttattgggtgatctttttaggacttctgtaattttcttg

SEQ ID NO: 6822 - DNA, 1124 bp, Homo sapiens
aagtcaaaaagttttggattttaaagatacatctataagagcctttctagtggcactaaaattacatgaactaggaaggtgggaggttgtagagaaatgttagtatgagttatcatcctacaaaaagtcttgttgtcgtttttaacccatgtttgtcaacaggcaaggcctgaagagaccatgggtggagctaataacattcgcgattttggataattttttcatttttcttctcagcctaaaaggctatcaagctgtgaggataagtcagaaaccactatgcaaccagattaaattttgtcaacagtgtgtatagtgaacgataaaaggtccgatggtaattgtaaaataaaaggatgaggaaaaggcagctctgtatccctgattaccttgctgcaaaaagtttattaacatctgtgtatacacaaggaggatggttattttatgcttattttctcttagacttgaaacccacatgacaccagagatgttccgaacaccattgcatgaaattgctcttagcataaaacttctgcgtctaggaggaattggccaatttctggccaaagcaattgaacctccccctttggatgctgtgattgaagcagaacacactcttagaggtacttacaaatacaaacctacttgacgcagatattaatcataccatctgtcttgttctggcagataacacttacaaatgaatcaagatgatgaagatgtagtcaacagggctgtgataataatagtaaggcctccagtcttaccttagatagttagtatagtcactgttctaatgagcaatgagaaggaagaaagggacaatgtgagtctttaaaaaagaaaagaaaacttaaaaaggcatctcttaactatgtactaaagatcagaacataacttactcatgatacccacagtatttcatatgaatctcttacaactttttttgtttttttgagacggaatctcgctccattgcccaggctggagtgcagtggcgtgatctcagctcactgcaacccccacctcccaggttcaagccattcttctgcctcagcctcccgagtagctgagactacaggcatacaccaccacacccggctaatttttatattttactaaga

SEQ ID NO: 6823 - DNA, 1163 bp, Homo sapiens
tatctgggcccaatatggggaaaagggcactgatttctcaaaagttaaaagcaagcaggccaggcaatgtggctcacaccttgaatcctagcactttgggaggccagggtgggagggtcccttgttattaatagttggtcttgaaagagcggtgtcaggaaaagaggtttattttatcagaaaatgttgaagattaagagatttggtatgatggggaagagagaatataaaaggaaaaatatacttggtcataatttatgataaatatgtggccattagagcatcagagcatttttttctttctgattctgaagagagcagctataaagttctttgttaagccagtttcattgcaaataaaagtagaatcatagccataaagactgcaacccacagtcgacagtcctacctgagctgctggcaacaacattgtgatctagtctggatttaactgtctttgtgtatttcagcgtgggagatgctatctgtaccattgctgctgctacctgctttccagagcctttcatcaatgaaggaaagcggctgggctatatccatcgaaattttgctggaaacagattttctgatcacgtagcccttttatcagtattccaagcctgggatgatgctaggtatgagtaagatttgggtgagctgtctgtagtttctcatttgtatttagttctctggtcttagagaatgatttctcatgccaatttattttagaatgggtggagaagaagcagagatacgtttttgtgagcacaaaagacttaatatggctacactaagaatgacttgggaagccaaagttcagctcaaagagattttgattaattctgggtttccagaaggtaagacttcttccattcttaagatatctttaaagtgacatttatatagtacatgcaaattgacagcaaagtgtattttagtttcaaattttagaccctatgatttttatatattcccgactatttcttagttctcgtgaacactggtctagttcccagaatgagtactttgctgataaccttatagtggtttgcaaagtaatttattagcatttagacttgaagtaaattctaccacattaaattttaaatgactttaatttatactttcggtgtacagatgattaaaggactttatgacatctaaca

SEQ ID NO: 6824 - DNA, 1202 bp, Homo sapiens
ggggcggacgcgcagtccatggggcgcggtgggccggggagttgccccaggggccgcgggagttgctgagaggagacagggttgggctttctcctcgcccagaccccaccccaccctgccgaccccaccccctgctccttcctccccgggggcgcgcactcgggcacgcgctcggaagtcgggggtcggcgcggagtgcaggctgctcccggggtaggtgagggaagcgcggaggcggcgcgcgggggcagtggtcggcgagcagcgcggtcctcgctaggggcgcccacccgtcagtctctccggcgcgagccgccgccaccgcccgcgccggagtcaggcccctgggcccccaggctcaagcagcgaagcggcctccgggggacgccgctaggcgagaggaacgcgccggtgcccttgccttcgccgtgacccagcgtgcgggcggcgggatgagagggagccatcgggccgcgccggccctgcggccccgggggcggctctggcccgtgctggccgtgctggcggcggccgccgcggcgggctgtgcccaggcagccatggacgagtgcacggacgagggcgggcggccgcagcgctgcatgcccgagttcgtcaacgccgccttcaacgtgactgtggtggccaccaacacgtgtgggactccgcccgaggaatactgtgtgcagaccggggtgaccggggtcaccaagtcctgtcacctgtgcgacgccgggcagccccacctgcagcacggggcagccttcctgaccgactacaacaaccaggccgacaccacctggtggcaaagccagaccatgctggccggggtgcagtaccccagctccatcaacctcacgctgcacctgggtaagcggtgacagccccgtcccctgctactgctcgccagcagcccagctcccggaccggctccgtcccagtggccggcctcacgggcgcagacggccgcgtgtttgctctctgttccccggcatgggccacacagaaactcctttctccaacttcttaaatagatactgcttttaacatcccgtgagggccaggatgttccgcacgagtctctctgctttcctgttctttctgacttaacgggattctggctctctgattattctgcatttcggctgttaggattgtgatttcccccttttttttctgaagcgttaatcagaaactcccat

SEQ ID NO: 6825 - DNA, 1348 bp, Homo sapiens
gtgagactccatctcaataaataaatatatatataaacaaacaaataaattaataaataaaataaaagtttgctataccaccactccagatacttagcactcagtaccacatgattgttctaaatgctgttttctaattctcttctccagggtgtagacgtggatatctcgtttagtgtatcagagcccagttaagcaaatggctaattttctctggaatttggggtctagttactttttagtgttactgactttacacaaggtttggaaaacaagccagttcagtgattttcttttcctcactatacacaggtgctggatatttggatgatgtcaccctggcaagtgctcgtcctgggcctggagtccctgcaacttgggtggagtcctgcacctgtcctgtgggatatggagggcagttttgtgagatgtgcctctcaggttacagaagagaaactcctaatcttggaccatacagtccatgtgtgctttgcgcctgcaatggacacagcgagacctgtgatcctgagacaggtgagatgatctttggcagctcttagacctaacttctctttagcaattgtgtagaaagtgctcattgtcttatatacttgtacatttgcctgttttctcacgcctgccttccaaataggtgtttgtaactgcagagacaatacggctggcccgcactgtgagaagtgcagtgatgggtactatggagattcaactgcaggcacctcctccgattgccaaccctgtccgtgtcctggaggttcaagttgtgctgttgttcccaagacaaaggaggtggtgtgcaccaactgtcctactggcaccactggtaagtctgctcgcttcatctgctttcagtgttcccttctataaaaagacctaggggaaaggggcttcggagttgttttggatctttgtgtttggttcagtttcagtggttatggttttcctaataggaagctgaggctcactctccttgtttccttccatctctcttttgggtatcccctgattgtctccatctgtcaaccaagggctttcatgtcaccttgatctaccgtctcccctttaggtgatcaaatctcatcttgaggcttcaaaagcctttctatatctatgatagctaagtttgtatttccagccctggcacctctcctgagctacctacttgccatttccacttggatggtgggctagaagccttccacttgcctttccacatccctgttcacctttctgcaccctgactgagacctgcatgcactacatcaaatgtcaggctccatttgcattcagacagcagaaagcacatatgggagctcacagagaaggagga

SEQ ID NO: 6826 - DNA, 1248 bp, Homo sapiens
gcccttttggtatgattacgtgtaaacatctgcttctccttggcataaacacttgcctggaattgggcctcagaacagattggcttttgctttctgaattccttcatttctcctgtggaatgtagcataagtaattgactcagttcagagaacacagtgaataaacaaactataagataatgcaaaagaagcattagcatttgggttttctagttccttagagaaatattaaacagtggagaattgaaggtagagatgaatccttgaagtgcatgaaacgagcactgatagtttcataacttctctaattgctaagtaacctgaagtgtgtcccaaaggttgcacgttttactttaaagctcattttgacttttaaaaatgtcagttttctctgctaaacagacttagccatttaagatctcataaatagtcctgtttttcaaaaaaattatgacagtatagtcagcttatagtcagcttattgttatcagtctgaattaagagatatactcttccttcttttgctaattatgtattattttctccttattctgcagcctgtgactgtcatcctgagggatctctttcacttcagtgcaaagatgatggtcgctgtgaatgcagagaaggctttgtgggaaatcgctgtgaccagtgtgaagaaaactatttctacaatcggtcttggcctggctgccaggaatgtccagcttgttaccggctggtaaaggataaggtaagctgtcaatagtgcattcattcattcatccagcagacgttgagtggcaacttactgtgcactaatctctatagaaaaagtggtgaacaaggtagatgtggtccctgttcttaaagacttatgttccagttgggaggcaaataataaaaaataaataaataaacaaaacaaacactgagataagtgccaggaagaatacaaatggagaataactgggggaaactactttatgtaaggcctctctacagaattcatctaaggtgagatctgatggatacaaaggaatgagccgagtgaaaagtaatggtaggtttgttccaggcagaaggaacctggtatacagaggcctgaaagctggagagtggctggagcctgctgagtgcagagggtgtgttctgttttttaagacgggagaggttggtacggacaggttatatgggaacatgatgaccatagtaagaagtttagattttatcccaaatccaataagaatgcattgaagaaactct

SEQ ID NO: 6827 - DNA, 1184 bp, Homo sapiens
gaaatgatcacaaaattccaaatgaatgacgttttctaatatttgtagaattgttgcccatgttagtatatgtacatataataaagtaggccgggagcagtggctcatgcctgtaatcccagcactttgggaggccaaggcgggtggatcacctaaggtcaggagtttgagaccagcctggccaacatggcgaaacccatctctactaaagatgcattagctgggcatggtgtgtatgcgtgtaataccagctactcaggagactgaggtaggagaattgcttgaaccgggaggcggaggttgcaataagccaagatcacgccactgcacaccagcctgggtgacagagcgagactccatttcaaataataataataataataataataataaagtaagcattacctgaattttacttatgtccctatcagatggttgtttcatggcttattttttgttttatctgtatagtcataaacaggaagctgatgacattgttcgagtggcaaagacagccaatgatacgtcaactgaggcatacaacctgcttctgaggacactggcaggagaaaatcaaacagcatttgagattgaagagcttaataggaagtgagtataatttgaaagtggtttacaccccttcaggtgttctggtaagtaacactagttcaatgaaaaattaaatgctggtgcattcagggcatacattcatgcagtaagatttcctttgttaatcatgcttttgaaatggaaaagtaagtagagaagggcatgtgaagccacagagatttggtttgattcaattactgtaactacagagaatagtaacaagatgagccatgatacttaaaattgtgcacaaataaagaagaaaaaatataatagagtaagtagaggaaacataattgaactacaaatctttaaagggtgtctgaaataagaaagtatatggtaagccatacattatagaaaattttttcttttttttgttgtttttgtgagatgaagtctcactcttgtcccccaggctaaagtgcaatggcgcgatctcggctcactgcatcctctgcctcccgggttcaagcgattctcctgcctcggcctcctgagtagctgggattacaggtgcctgccaccacacccagctaatttttgtattttcagtagagacggggtttcactat

SEQ ID NO: 6828 - DNA, 1175 bp, Homo sapiens
gtcaaaactcatcaaactatatgtggattctgtgaacttcagtgggtgtaaagtatatctcattttttaaaaaagtccataaaatcttgatctgtgcagttcttttaaaaatatcattgagtattaggtgttacagagttcctaagcctaccttttcattagtttaaatgttttatccaaagtgtagtgatcttacttgcttttcacagaatgaagcaaataacataaagatggaagctgagaatctggaacaactgattgaccagaaattaaaagattatgaggacctcagagaagatatgagagggaaggaacttgaagtcaagaaccttctggagaaaggcaagactgaacagcaggttggtttgatttgcaggtcgcttcatttcttgaggcaacatttgaacagtccaaatgggtctgtgatgatgccgtactttcagagacagcagaccccagtgctgagagagcagcctaacagattttatgctggcaagtctcagggtggcacctctggagagccttgtctgtccaggagacagaagggatttgctttgagggttcatcctctcatctgccatgtgtttgcagaccgcagaccaactcctagcccgagctgatgctgccaaggccctcgctgaagaagctgcaaagaagggacgggataccttacaagaagctaatgacattctcaacaacctgaaaggtagaaaaggctgagataacaggggcaaatgcttccgccactagagtgatttttttttttaatcatgacttttaccatatttattacttcatccccaactccctactttttttatgctaaagtatttcaaagggaaatcccagagctcctgtcattttatccctgcatacttcagtatggatttttttttaaagatgttttcttattaggcaaactcacataaccaagatgcctatttagagaacttatataggtaaatggagattatctttcattttctctgccagtggcatctgattctttgttgttgtttttttttcttcaccccagatagaagagaaatgtgaccaattcactgagcaactgtgaattcttgtctgataaaacagtcataggttctataaatagagaagctttacaggatgctttacagggtactagttgaaaatatgggccaggcacggtggcc

SEQ ID NO: 6829 - DNA, 1190 bp, Homo sapiens
aaccttgtctctcaaaaaaaaaaaaaaaaaaagtagtagttcaaaatatggactctggtgtcagtgggccttggttcaaaaccctgcaccctgcaccacaggtcatgtaacttctttaatcctcaattttcttataaaaatgatacagcctattttatgtcaaagacacaaagctcttaactcagtacccgacacacagtaaacactaaataaattgcagcttttaataatggttgaggtagtggtaatgggatgctcagcgctctgcattttaaagcacattgttgaagtaagaattctatttccagaaacggaacatttctataacactaactgggagacctattctgtagagatgtgtaatttctaaaatttcagcccatgctctcttccattttttaccctgacttccattgttcataaaacaaaatccagttggaactccctgaaaggccccctttttacttgttgggagtttagctcaaatgtgtccttgaacttgtttcagattttgataggcgtgtgaacgataacaagacggccgcagaggaggcactaaggaagattcctgccatcaaccagaccatcactgaagccaatgaaaagaccagagaagcccagcaggccctgggcagtgctgcggcggatgccacagaggccaagaacaaggcccatgaggcggagaggatcgcgagcgctgtccaaaaggtgtgcgtttcctcttctccaagagtccctgcccatatctttctctggtcactttccagtttctttccagaccctcagagcccttgcagatttttttcctgaacttcagtaaaattgtcttaaaccatatttgtctttttttttttcttttgactaggcatgagagtaggtatccacattgaggaggggaactcagtaaaagggtgctttactctaaaatttctactatgtctcagtgtgaggtctggcttcagaggtctatagagcccattcccacaaaaaatcagactttttctaaataaacattcttctttgacctagacaggtggtatttatttcaatactatgtagtgtgccttatcaatataactttcaagtccccctttcaagtatattgccatatgtaagccactcctaggagagacttcccatagctgccattgctaggattctttgaagtcatcttcaagaataatgttttt

SEQ ID NO: 6830 - DNA, 2836 bp, Homo sapiens
ttgataggaaagtgtctgacctggagaatgaagccaagaagcaggaggctgccatcatggactataaccgagatatcgaggagatcatgaaggacattcgcaatctggaggacatcaggaagaccttaccatctggctgcttcaacaccccgtccattgaaaagccctagtgtctttagggctggaaggcagcatccctctgacaggggggcagttgtgaggccacagagtgccttgacacaaagattacatttttcagacccccactcctctgctgctgtccatgactgtccttttgaaccaggaaaagtcacagagtttaaagagaagcaaattaaacatcctgaatcgggaacaaagggttttatctaataaagtgtctcttccattcacgttgctaccttacccacactttcccttctgatttgcgtgaggacgtggcatcctacgttactgtacagtggcataagcacatcgtgtgagcccatgtatgctggggtagagcaagtagccctcccctgtctcatcgataccagcagaacctcctcagtctcagtactcttgtttctatgaaggaaaagtttggctactaacagtagcattgtgatggccagtatatccagtccatggataaagaaaatgcatctgcatctcctacccctcttccttctaagcaaaaggaaataaacatcctgtgccaaaggtattggtcatttagaatgtcggtagccatccatcagtgcttttagttattatgagtgtaggacactgagccatccgtgggtcaggatgcaattatttataaaagtctccaggtgaacatggctgaagatttttctagtatattaataattgactaggaagatgaactttttttcagatctttgggcagctgataatttaaatctggatgggcagcttgcactcaccaatagaccaaaagacatcttttgatattcttataaatggaacttacacagaagaaatagggatatgataaccactaaaattttgttttcaaaatcaaactaattcttacagcttttttattagttagtcttggaactagtgttaagtatctggcagagaacagttaatccctaaggtcttgacaaaacagaagaaaaacaagcctcctcgtcctagtcttttctagcaaagggataaaacttagatggcagcttgtactgtcagaatcccgtgtatccatttgttcttctgttggagagatgagacatttgacccttagctccagttttcttctgatgtttccatcttccagaatccctcaaaaaacattgtttgccaaatcctggtggcaaatacttgcactcagtatttcacacagctgccaacgctatcgagttcctgcactttgtgatttaaatccactctaaaccttccctctaagtgtagagggaagacccttacgtggagtttcctagtgggcttctcaacttttgatcctcagctctgtggttttaagaccacagtgtgacagttccctgccacacacccccttcctcctaccaacccacctttgagattcatatatagcctttaacactatgcaactttgtactttgcgtagcaggggcggggtggggggaaagaaactattatctgacacactggtgctattaattatttcaaatttatatttttgtgtgaatgttttgtgttttgtttatcatgattatagaataaggaatttatgtaaatatacttagtcctatttctagaatgacactctgttcactttgctcaatttttcctcttcactggcacaatgtatctgaatacctccttccctcccttctagaattctttggattgtactccaaagaattgtgccttgtgtttgcagcatctccattctctaaaattaatataattgctttcctccacacccagccactgtaaagaggtaacttgggtcctcttccattgcagtcctgatgatcctaacctgcagcacggtggttttacaatgttccagagcaggaacgccaggttgacaagctatggtaggattaggaaagtttgctgaagaggatctttgacgccacagtgggactagccaggaatgagggagaaatgccctttctggcaattgttggagctggataggtaagttttataagggagtacattttgactgagcacttagggcatcaggaacagtgctacttactgatgggtagactgggagaggtggtgtaacttagttcttgatgatcccacttcctgtttccatctgcttgggatataccagagtttaccacaagtgttttgacgatatactcctgagctttcactctgctgcttctcccaggcctcttctactatggcaggagatgtggcgtgctgttgcaaagttttcacgtcattgtttcctggctagttcatttcattaagtggctacatcctaacatatgcatttggtcaaggttgcagaagaggactgaagattgactgccaagctagtttgggtgaagttcactccagcaagtctcaggccacaatggggtggtttggtttggtttccttttaactttctttttgttatttgcttttctcctccacctgtgtggtatattttttaagcagaattttattttttaaaataaaaggttctttacaagatgataccttaattacactcccgcaacacagccattattttattgtctagctccagttatctgtattttatgtaatgtaattgacaggatggctgctgcagaatgctggttgacacagggattattatactgctatttttccctgaatttttttcctttgaattccaactgtggaccttttatatgtgcct

SEQ ID NO: 6831 - DNA, 2358 bp, Homo sapiens
tgtccaggcagaacagtcataagccaggaaatgaaacaaaggaaaacaggtgcctgaatttcctggggaaacatggcttgtttaaggacttggagttatggatggaatttatgggacccacgtgagcagacctgaggaaggctcgatttcttttgtttcttggtccactctgtcactctgctctggtcaagccccatttggtctacagcccatgagaaggaatgaggctggttctgcactctcagcatgcagtccgaaagcatgtgggagtggggagggaaagtgagatgaattaagacaaagaacaggtgccatagaagtagatttctaggaatgaagtggggcagatcttatctttgtggattacaggcactgtactaaaaacaggtttcctatttaatataaaaagaaagtgaatcttcttttggatagaatcatccattcccatcgccgcaccccctaccccccaaacacacacacacacacacacacacacacacacacacacacacacacacacgccctactcttcatttgctaggggaaggtcacagcacaactaaatccaggacaggacattgtgaccatgacccagccacagtcaataccagaaagatgattcagagtctgaagtggtgccccaggtgccaacaggataacctctaccccccgactttgtctctggggtcctgttccttcctgcaaagcccaatccaagactggcatggctcagaggttgtgagaaaggcatggactggaacaatcatgtccagaggggtctggagctttgtttcctgttcaccagcaaaaaatgtctctcccatttttctgaaagtggctgatgtaagaacaggcagaaggaaaaccctttttgtcaataactctgtccttaaggaatggtcctctgggagggctgtgctgctagtgggtacctcagtcacacacccccaaccccaggcagcctctagagccttcttgctttcattttccttgaatgtacataggaacaagggggaaagtctcttactgaagtgcctgaaacccaaagctagagcttctagagacgccgttcttcctgtctcagcttggccagcctttcaacaatgttctctagtttcaagctccagcttctcagaaagaattaaagaacttgctgttcaaattaagtagaaagtgagactcaataataactgaactacagcaaaaggcagagaattacagggagaaaaaacttgtacttaccagcccaattctactctcctcaaactgacacacacacacacacacacacacacacacacacacacacactcttttaggggactaagagagagaagcatgttattacattttactcatccaaacagtaatgcaaaaataaaacggtagaatatgaaaagctcaggatctctcccaaggctacctactgcaggagggccaacaggtgagatgggaagaatggaaacagggaccgattttgtagctcatacaattaggacaccttaggaatagcattgtagtaatggtgatgaatatgctctgccaaattcatccagtctgcaccatcttatagctgcccagcacactcgactgttcatgtggtctctttgtagtgtgagtttggagtgtcctattagcctgttctggttaggaatgagttaacggctctttccctcaaccttagtctagtcccagggctgaggattcagctggatccacatggtcttgagggttggcatgaggagggggaagcttttttgaatcgctttttgatcacataatctgccattttaagagtaagatttgctttatggaaatcaattcattaataaaaaatgatattcaagttgcaataccatttcacagtgaaatattttgagtacaattttgttgctagaatagtcatgggcaagagttttatgcaaaatgtttcaattatgttaataaataagacaatgctacaagagtcttgtgtcttggtcaagaactttctctgtgaattgcagcattaatcactttttcttcataattttacttgacaggagacaacagttgtaaaaatgtacttagaacaagcagtttcctgcctggttcagctgatgccacatgtgttatataaaagtatgtacagccacatccaaggatgataaagggaagaataattagcaaatttgtaaattgtgcctccgttttcttagttttgaaacattaaatcttacatcttgactaatttgcatagtccagtgttggttaactttggctcctcaatgaaattagtattttatgaaataaaattatatttgtgaaaatgaaaaacttgaacaactttttagcttgaaagatcttaactaaaacaga

SEQ ID NO: 6832 - DNA, 1169 bp, Homo sapiens
cagaatcttaactttctcctgtaggtcagccttataatcagttggctatcttagcttcttccaaaggagaccatctgaccacaattttctactactgcagaagcattgctgtgaagttccctttcccagctgcctccactaatctgcaaaaagcactttctaaagcactggaaaggtagggttgtttggttttttttttctctttccaagaggactttgtaacctggagccttaattcctcataatttggtttacagaaaataacggcctatgcttctcttatttctaaacatatagatttttcataatttgtgtatagtcactgaatttcatccaatcaatatctgattcagtcccagtaaaagagtacacaggctgttaatactgactcatcttgagtgtgttgcagttgaaaaatcagtcaaatacagctcttttgtgtatcaagtatttagcaagccagtgcctccttaaacagttgtagccaatttgctgcttatgattcatggaatttttttctttcatttcagccgagatgaggtgaaaaccaagtggggtgtttctgacttcatcaaggcctttattaaattccacggtcatgtgtacctgagtaagagcttggaaaagttgagccctcttcgagagaaattggaagaacagtttaaggttagatttcagaaatagagaatttttgtcttgtctaaatcaggaagcataacatttggaggaaactgactcccagtttttgtagttacttaactgtgtgaactattggtaaaaattatattcgaagtatgtgaaatctttgcatttatcatcccttcaatttaaactgaggtacagtctgtataaacaaatataatatagcagtgttttcacttgagtagttgccatttgacaaaaattatcaaagtggaaaaaaataaataactcctcagttttgaaactactactacttttgatggtttgtgtattcttagatatgattatgttacctgctttatagatattggcattctccaaaccaagttcattatttttattgtgcttgcattcatcaggattgtggtagtttgaatgaaaggaatgagagtttcatttaacagggatatattttactaatttgaagagataacattaaccttcattctatttatatatgtgaaaat

SEQ ID NO: 6833 - DNA, 1185 bp, Homo sapiens
aattgtgtattaagaaacagagtttagagttaaggcttttgtaaaaatgtggactttttgtaccataaaaaaagaggcattatcactttgaacagggaatgtgatttgtgtggtataaccataccctgtcacagattaaagaactaacagcggcttccacaactcataatgtatgtgaaagctctataaaaacatagtatgttatttctttgctcagaattttctcagcctatttcagttttccatgtttaaaactgacaaattattttcaccatttgttgaattaggagcatgggaaatgatctacagtggtagtaggtctctgtcatggaaatttgtcccttttgttgtatctttatcattatctagtgtatctttgaaagtacatttttaaaaattatacagcctttgaaatgctgaaataagggaaaaatacataaagtccaggacctatagataccattttcatggcttattagtgttctggtttctcttacataaaaataaagtctgaactctttctttaatttacagcatttggccctggttgatttctcttctgaatagtttccatccccatgaagaggacctctcaagtattagtggtaagggctaccctaaccttgtgttgttgatgtggttctccatcattaatggtggcttaatgccagagaaaaagaggtttttggtgatgaatgattgattttaaattcagtatctcagaagtgactgtgaactctacataagtgggtgggtggaagtagataatgttctcccagttcttctggcagcttattctcatttagcatcattcaaataggagttcagagagtgtaataccttcagattctttcattccttcctcctcattcttactattttaaaaaaagcaattaacatgaacattgctctgtcaaagtaatacttactcatcgtagaaaatttggtacaaagaaaaagaacacaaatctcccatacagagataccttttactagtcacgatagtatatcttcttcgggcctttttcttacgtgtgtacacacacacaggaaatgattcatatcaaataaagttttgtgcctgattttgaaatttagtattatattgttagcattttcttttgtcattaagcattttgaaaacatgacttttactggcttcataatattccatcctatggaagt

SEQ ID NO: 6834 - DNA, 2924 bp, Homo sapiens
tccatgatgcatcctggaccttctgctctggagcagctgttaatgcagcagaagcagaaacagcaacggggacaaggcaccatgaaccctccacactgaggccaaagtggcaacctgggaatgaaggctccataaaccatggcatgttgggtttgcaggactggcccacacagtcccctgcaggtggcagccctcttttctgtttctcgctgtcaagagggtgtaagtattccaccagcccgctgagtgtgcacgaaatgttcgcagtgcaacaaaaagaaaaatccatcaggaactctccgtccccccggggccctccggagggagagagagaggaactgctgtttatctcactcagttacttggtatcaccgcctctcaccttctccatcgtgcatgtccccagccacatgggaagtgaaagctgagaagggaaggcagatgggagaagccaatgggaacttctcagtccttttttcctctttggggaataaaataggaatccattaatgattgctttgctgactgagaatgtagttgaaattattcttaaacatcttttattattattactctcagtagtaaaatatcacactgaattcttccatacacaggtgtgcttctagtcagtgtgtagcaaggaaagccccgttcactgctcctgtgagaggttggtggtgacaggatggggaaccgacctcttcagccagtggaaatgttccataagggagagttcaaggcctgtcagaaggctctggtaggccttcctctggccaggagactccagcagggaatgcccttcactctgtaggtgctcgagccccaatcgaggatacagtgtgggtggtggtgctgggctggactagcaggtagactgctgtaggatttcaaattacgtttttgattcctgtacattttacagtcgcacagcaagcagtctcacagaaggcaggctagtccattcacagcctgacacgttctaataggtagaagctttcagtgtggttattttttctttggttggtttttgtgcccccattctacttcccaccctcctgccccatctccatcccttcttttacccaatgctgtatgctagtaattgtttttattcctaatgtgtgcaacatcacatctccccaagaagcaacagcatggggtccagcagttggggcccaaaagacagtctgaagaggaaggaagcagcagtatctgcgtagcccacagagggcccaggcccctgcccagctgcagtctcccagcctccactttcagagtgaaattcaaggcagcacggacatgtgcccatcaggcacagaagaaaacacgacgtcgtccattttggaagagacgaaagaaaggaaaataaactctttgtatgatatttattaggaggaaagaggactgaaaatgttcttgtgtagaaacagaaggacagcatttctgttagtcatttcctggaaaagtaatattttaaggggaaattatggaaacaatctaattgttcaattgctgtgctagtggtagggtttattttctgggaggtctctcctttgtgtgtctgtatgtttgtgtacacacacgtgcccatctgctgtcccagaggggaggggttgtgtgtgcgagtgtatggagttagtgtggaacttaagagctggaagacagctgtagagcaaagcacatccaggagccccagttgtcactgcagtctgggcaaccccagcaatgaaaaggggtgagataacgctcattgctcttcagagagagtggttggagccccccccgccccgtatgcttacattattgctcttttagtttgacatggtgtttgggttttgtttttttgaaaggtctgaaaaggtgaagccccctacccaatggcaatatgaaaccttttgtgcttctcttcagccccttccctgtgtccacctttctctcctcttcccaagcctttttcctactacctttacccagtttgtgtgtttgagctctgcattcaggcagctgcaacattccagtgtttgaactgtcactgattcttgcgccctagacaagctaaccaggtttaccatctcactcccagtaatacccagctcctatctaaagccccattctgcatgagaatttggtgtttggaatgttttctgactcttggggcgggattcctcgccttatcatcctcactgtggagtaatgagggggaggagaatctttatcagaaactggttttgtgtagtaaactttcttttgtggttttttgttttgttttctgggttttgttttttgtttttgtctgtgcaagacctgcagctgctgaaaatcagctttgcctttaattaaaccatgttctctccaaccagatctgtgtatcgattctttcttttctatcctaaaagatataaaagaagtattgaagaaaatccaacttaaaaggcaagaatttcaactactcacaggtcatccagggaaaggcataaatggtcagaacttgaatatttttcagggttaattttgcttttagtagcattccaaaccaatgaattacggaaattataattaattgtaatggaaaggcatgagtagtaagaaatcgattatcaaaattcttttatttaataaaagaatgccttatgttaaggaattaagagcccatcatttttatttttattcctattgtagctgttactgaggcagttcagagagtttatccttttggcctgtaaaaattcactgaatctgattagcagcaacattaattaattcttcttcttagctttggggtttcttttctttgagttgtgtccaaagtttccagtgattggtagcttgctgggtcttccaactgtgtgctggaagccagtggtatagctaaccttaatgcctgtgtgctcaccctgaccggctatcctttcacctgcatgttg

SEQ ID NO: 6835 - DNA, 1208 bp, Homo sapiens
ttgcctcctgattatctgtactgtgggtttaagtatgctactttctctcagcatccaataatcatggcccctcaatttatttgtggtcacccagggttcagagcaagaagtcttgctttatacaaatgtatccataaaatatcagagcttgttgggcatgaacatcaaacttttgttccactaatatggctctgtttggaaaaaactgcaaatcagaaagaatgatttgcagaaagaaagaaaaactatggtgtaatttaaactctgggcagcctctgaatgaaatgctactttctttagaaatataatagctgccttagacattatgaggtatacaactagtatttaagataccatttaatatgccccgtaaatgtcttcagtgttcttcagggtagttgggatctcaaaagatttggttcagatccaaacaaatacacattctgtgttttagctcagtgttttctaaaaaaagaaactgccacacagcaaaaaattgtttactttgttggacaaaccaaatcagttctcaaaaaatgaccggtgcttataaaaagttataaatatcgagtagctctaaaacaaaccacctgaccaagagggaagtgagcttgtgcttagtatttacattggatgccagttttgtaatcactgacttatgtgcaaactggtgcagaaattctataaactctttgctgtttttgatacctgctttttgtttcattttgttttgttttgtaaaaatgataaaacttcagaaaataaaatgtcagtgttgaataatttatttttctctgactttaacaattatgaatgtatggttaattaagaggaaaggttttctgcttctaccaccaagtactgtactcttaacaagaacagtttggtagggtttttataagactatatagatataagatgatagagaagagagtcatgaatgatgtcagagcactactgaagcctttggagtgattccatagccttctggatggcagctgaatacctatatgtagtatcactgcccaaagacctagactagaaagtgcaaagtagcttagcagctgcagtcattcactcccagcctccaaaattctctttctttcacctcaaatctatttcttgtacttacctactcacagcgacttctgtttgctttcgatcttcacctgactagattcccactttaaaacacttccaggcaattc

SEQ ID NO: 6836 - DNA, 1204 bp, Homo sapiens
tatttaacaattgcaagttctttagagacagagataagatcttatattgccttttaacttccactatacctagaagaattttatagattatatatgcttgatgaccacttgatgattggaagaaaatattaaataattttttcttctcaatttgacaattatattttaattttcagtatctagaaatgatggaattagatataggagatgccacccaagtttatgtagcgttcttggtttacctggacctcatggaaagtaagttgtttgtttatattgttttgttattgggactgtggtagagatttggggggttggattgggatatagcattcttaacataataagcaatcttttatgcatttgctgttaattttgcaatttatttatttacattgggaattactgagtaacagaagctactagaaaagcaaagacaggaggtagtgttacgagtgatatttgctcagctgagtattaggtagaagtttggagtttttattttttgtatttaataaacattattgtccattcaatgatgctctttcaggcaaaagctggcatgaagtaaactgtgtaggattaccagaactccagctcatctgccttgttggtactgagatagaaggggaggggttacagactgtggtgcctacccccatcactgcttccctcagccataacaggtgagcaggtgattttggtctaagttcctttcccgagtaaagcagtaggaaacattaaacatagtgatgtaatacttttaatgaaatttgggatacagggttcatagctttactcttggctatttgaggaataagttaaatatgagtgttgtattcggccattcttgcattgctataaagaaatacctgagactgagtaatttcttaaaaaaaaaagaagaggtttaagtggctcatagttctgaaggctttacagtaagcatggtgctggcatctactcggcttctagggaggcctcaggaagcttataatcatggaggaagttcgtgaagcaagagcaggcacatcatatggcaaaagcaggagtgagagagagtgttgagggggaggttccacacacttttaaatgaccagatctcacgagaactcattgtcctgaagacagcactcagccatgaaggatttacccctataacccaaacatctcccaccaggccccacctccaacattggggatt

SEQ ID NO: 6837 - DNA, 1128 bp, Homo sapiens
ctagagatggactgagccttgcttctcactggcagtgttgagctttggagatgggatggttgctatgccaagccttgtttctctgctcagaagaagtagagaagctattatcaattaaaagcatgctgtgatgtgactcctggaagtgacgtaggagtgagtggcaggttgtttgatttaataggtatcttaatcaagaattaagcttgcaacattggctttgctcagatgcagatggaagtgtgatcacaatcattttgaatccctcttcctcacttttttttctaagaaaataaacattttactgtttttatggatccttgtcttctcccattcatccagctcagtgttttaagatgatcctgggtgcagaagttgagccctcctttgcattgacactgataattagcctatagggctccctacccttccattaagaatctaccaagcattagcaaggctgaaagtggtctaagaggtgaggggacatcctatgactttttaggaaggcctgaaaccaccttgttacctttcattttgttagcaaataaaccatcctattttgtaactctcccccttcaaaatgctacatgagccttgccacttcctttttctcttacttccagcacactagacatagcaaaagtgtttgcctactcaaaaacataatacttttatgctgatgatggtatttggagatgtgaaagccaaaagcccctggcagtggtggggaatgttgactgagtgttcagcagagtttatttttccatactatatgaagagaatgatctcttctcaaagacagaagtgatatttttaacaaatattgtcacaagtaaatagcaatcaaaaggagaaaataacttttgtatttttttaatgtgtttgatagctttgacgagggttctctttgttactttcaggggagggcatcctattaaatgccacgccagcagtccgggtctgggtttgtcccacaaaatcacaggagcactgtatgttcctctcttttggagttgtgactttgaagggcctcaatattagccacactgccgcctgcagaaggtggagagttaagatgttctatgtcaatttgctcttgccgaaaagatgagcctcgattttaaa

SEQ ID NO: 6838 - DNA, 1205 bp, Homo sapiens
ttcagcagctccactgggatgctctaaccccagtgtgtggagttggggtcccttcatctaggttgacccaggtatagcatttttagcattgcctttccagtcttgatgattcattcattgaactcatttatttctggagcccctggtacactccaggcactgcgctaattgccagcaaagcacaactgaactaaatccaccttcaaggaacctagccataacgagggaggcagcatggaagtaccctacaggggaaagtcctgagtgctgtgggagcatctcaccgtggcagccagcccagttttggcaatcaggggcttcctgaaagaggtgacatcaaagcccggatgtgtcagaggactgagggagagtgttactaaaggactttcaggctgagaggatagcacaggactcagcccaaaggagggccagtgtggactgtccagggccagcctgcagtacagaggctggagcttggacttgtagagggagagagaagagcaagggacgtggacggggcagtgagccaggctagccacagagggttcccggggctttgctggggattcagggagcataaataagagctttaggtggtgctgtgtcctctgcagcccactgctgaggtcctccagacaggtaaggtgtggtcacaatcagggccggggtttccctgctcactgcggcagtgcaggggtgcttgctgagatgattcatcccagggtgtcctctgtcccttacccagccccaactcctcttcctctgccaaaagctatttgaattcaaggactttaacctgggccggatctggtttggagacaaaggggacagctctgggtcagcatgaccttctttagagccactaaggcgaaaaataccgtttgggaccaggctggcctagacccagggatgagaatgcaccctaaaataaatatacgggaagcagcagagggcttccctgtctagtgtgtgatcctaactaaaggcagctctcttggacagccttcccctggattaggtcacatacacctggtggccaagcctctgctgggtcccaaatacacacccgagtcctgccaaagaaaggagatttttaaaaagcacagacaaattgtatgcaagtggaaaatacccataggcctagacagctgtggagggaagacctcgtgggtacctggaggctgccagagctgggagctctgcag

SEQ ID NO: 6839 - DNA, 2939 bp, Homo sapiens
tcccccttcaaatgcagcactgcaccaccctgcaacacctcaggccagggaaagattactgagcattcctgcgaaccagatttctgttgtctctggatagacaagaaacaaaattcatttagtagtggagtggggaataggagtttggatagccttctaattaaaggaagctcgcctttcttggttttgggggttagaggctcttttgggaagatgcatccgagtattgtggcattctgattatgctgccttcacaaaacactctaagtgacctaagtggttatgaagcaaatgcatttatggtgaaaacagtctttgctcattgctttctcttgtttcatttagtgacaaatgatcaagatgacttgattttttttccttcttaacaatgtcttttttatttaaaccaaaggtgaagccagtgtactttctcagtgagttctctgcataaagactaatcagtgggaccaggtaaaaaggtcatataatacattgtggagattgcttacttaatacttctgaaaaatggagtaagggagaaactgtaatgttgcaatatgaacctcccattgggccttccatagggaaagctgtgactactctgaaatggaacctagcattatatccttgtagggtagattataaatcatttccagttcatttctcttagaggtgattacctctagccatcagccttactccatcccatgtttggtatgcaatttgagccacaaggctcgtatcgccaacagctatatacattttgttccatttttctgtcttacagagccatgatagaactgtggttagtgagttaaaattcctggagtaactactgtttttctcctttgaaacttaggtttctaaagttgcacctaaggaatctgtcacattttctgttgaatcatggtttttgtttttgtttttaacagatattccttctgatacggacttgaaaattagtgtatggtgacctgtgtttaaaaaaaaaagtacaatacaactacatatagctatatagcttaatgagacttccaccccccccctttttttttttggtttgttgttgttgtagtagtctggtgctggccacatttaagtcttaaaaatttttaaattttgttgttgatgtttgtagacagccctgttgttgaaatcatggctttattcattttatttattttttaaacttgcctgaatttgttctaaaggaatatttaagagacataattttcttctctttaccataacattacacaaaactttttcctaaaacacggttgtgaggtactgatgaggtgtaagtggagctgttaaaaacagcagtgctgtattgcagttatgtatattcgtgtacagtatgtttagatcccaggtaaacatattcttttctgagaggataaatacctgcattcagatattccaggtaaatataattgagtcagggagtagtaaatctgatggagaattcactttggggaggggaaaaagaatagtatgcaagacccttattggcttttaattatacctgaaaccaaaatggatatttttagtctctctgcatgtgagatttggtgtaacaagatagaactataatatatacagtatatggaaggatagatatagtgctttgttcattttaattgcaaagctgccaaaatagttgaagcttaattacttgacttgccttgatttataggactggggcttggagaaaatgagcagatgttcctctaagacatcgattacagaagccttatatacatggatttgattttgtatttgtagctgaaagtcactgttgtctaaaactaacttttctaagttatcaaaacaacctaatttcttttccaacaaggagaacttaatggcatgaaggattgtgtgacacattggaaaagccagcttactgccactctcttcctttggccattagagggaggtgttgcctttcattgacgcttagaagcaaattgttcacttgttaagaaaagtaaatccttaaaaaaagaaaaggaaaaaatttaaccaatttttcttaatacccagaaggaattatactcaatatttccctagttaagaaaagaggagataatgttcgtctaaaaaactccaacgttgtaattacaactctacattcatttacttacttgacatactgccacaaagtagtttttgagttcattaaaaattccaaaggcattagttgttttttttttttttagtgttttgttttttagttaacttttatagacattttagtaacttgctaaagattcaggggattctatgaaaccccgaatttagaaacatctggtctacctcagttaaatgttgactgcttagaaatatagctgaagtgatcaccacagccataaaattgtttaagaaagatttatataatgtttacaaatctggaatcaaggattttagctgaaatcctttaagagatattagagcaagtatttaattcaggtattttcaagttttaaaacttaacctgtttacctactaaaaataaaatagctagtttttttctgcatataaaagttcattgaaatgatatgcccttatttgcaatacttttcccataaagttttaagtgtgaaagaattgtaatttactagatatgtttggtatgggatattttgttaggcaagttttcttttttcttcttaaattgcaataggcttccaaaaagagtataattgtttcagaacaaattaactcttggcattatacgtctccctttttctttacagtattagtaaaaagaaaaattgtacactttctgattttaacttcactaatgtaattactctctcaagaagcttttaaaatttaaattaccatcacacaaccttttttatagtaaagccaacatttgttctctcaccaaaccccatgccaaattcatcatgaagaaagctcagcataag

SEQ ID NO: 6840 - DNA, 1423 bp, Homo sapiens
gtttctgaggaacaagaagagatgggagggcaaagcagcgcggcccaggccacggccagtgtgaatgcagaggagatcaaggtagcccgtattcatgagtgtcagtgggtggtggaggatgctccaaacccggatgtcctgctgtcacacaaagatgacgtgaaggagggagaaggtggtcaggagagtttcccagagctgccctcagaggagtgaaagggacaatttggctgaagtctttctctgaaaaaagccaaagggttataggggtacacttaggggttgcatgcaagctgttaccaaaaaatttttaagtattttcttaatttgaataataaaaccagaggaaatgcatacagggcatgagcaactgaggcaaacctttgtggacatgaattgttctacgatgaatttttgctttagtattttaataagaattacaaagacaatggcatacttggggtgagagggagctgaggatgtctgaggagggaatagtattgcagggaagactgagaaaacagtaggatgacagttttgagtatactctgcacttttcaattgtgcaatcttcttgtgcactttaaggctttttaattttgtttgagaatgcaaatgtatactgtaagtctacctttactatctactatgcctacttcaccatctcttaaggactcggcatttgtccacagtcagactgcaagagagggtaggtcatgaacagtcacccgtgctggctgtagcccccacagaggcaatcatgcccaatagattcaagagaagctaagcggaaatggagggtggaaggtgtgatctgtgggactgtctgggcctgttactcatcctgctatcaatttcttattaattaatcttgatgattcttattaattaatcacatttgcaggaaattcagatgaggcaagaaaattttattggcctgggtaagactgaaagcattccaaattaggcttagactgtgcaaagggcttagctaagttatcgagcttaaaacccgtcaattaaacaaacattatttgaacagttactgcatgccacgcactgtgttgggcttagtaataaaaaaaagaaaagataagtgcttgttctagcataaattaaaaggtccaagggaatttaatctggaagagaacatatgccaatttttaaactatgacagcttttttttttctctttccattcaaatagtcctggttcattcccagaagggcacaaaatgaatgaataaataaataaatgaataaagacaaaagccaaggtgtatgctctcaagttccaaagatgttatcaaaagctgaaatcatttgtttggtcattcagcaagctaattgagtctctgttatataccaagcactggggataccatggcgaaaaacaactttgttccttcctcctagaacttaca

SEQ ID NO: 6841 - DNA, 1488 bp, Homo sapiens
gtatcttcatgaagacccaaggctcaaatttactgtccttaaaaacaattctcataggattattcttttcatggtattttcttccataatatctcattttaaaaagaagttctttatgaacttagtgtccattgtcatgcaatgtttttttttttccattctttttccctgtaattttggaatttctggtcctgggaagaatcaaacaaaatcttaagttctatgagaacttggttcattgacatattctgctgaagaaagaaaaattaaattggtagtaaaatatagtcttcaagtatacgtttgagagtgcttttttttgtattagttctgctgtcacttcatttcctgtattatatgtgatgtttttccccattaaaataccagagataatggagatattttgcactttagccttgatgaaaagtacaagatatgttcaaagcttccctaatttttttcttatttgtagccacataagtttcaagaataacatggcacacagaacaatggaaaaaagtttgtttccattggaaaattatatcattttgggttgccacatcagtttataaatttggcgctcttttaattacactctgtagaaggttaatagagcttgagccctgctttaatatgtagtgaaagataattctgtagaaaaacgtcagccagtagggtaaagtcattctactgttcttaatttttatattgaggaacaatattgggtgtttgggagccagaaagctttgttgacagatcagaaataagattgacttgggtgttatatttcatctctctccagactctaggtatatttccaactttatatatcacagtatttaaaaagacatgtttgcattgagaaattaaccctaaagggttttcaatagggtgtagacctccagtacctttgtaactaaagtctgtctagtcattgtaaatatttatctgtcagttttgacagattggggccagcttgatgttttaaatcttcagcccggtatgaaaacttaaaggtatatattcaattttttaccattttatggaaaatatttaaaatctgtttttacagggttttttttttttttttttttttgtaatctgtgccatgaaatttgaaaaccaccaaaaatcaagggaacttttatatattcaattccttttctggtgtaatgttaaagttgtatagattattaatgcatgcccactgaatataaccctggttttgtgataaaactgcttagattttgttgatgacattagattagtagttgcattaaataactaaattcccattgtgattaattgaaattttgtctttaagcagagagttatttgtgactataagctttgtgcttagagaatgtatgtgtttttatctgtcagtatgggaggatataaactgcatcattagtgaaattattggttgtgtaatcctttgtgaaatataattctaggtatttgatagggtattgagtgtattttgtg

SEQ ID NO: 6842 - DNA, 1306 bp, Homo sapiens
atttctttttctcctagggaaaagttaaccattggatgccgccagctggttgagatggaatataccatgcagcagtgcaatgcatctgtttatatggaggccaaaaacaggggatggtgtgaagacatgctcaactataggatataagtactgatttgtaactttaaaggaattgcatttgtccttaagaataacagagtagttttcaatctggtcactcttttgggccaaacccaagagaattttaagaaatgtttcataggtataaaaaggtgatcgcctattactgacagtctcattgtagctctaaaaagcctaatgtatccactgtggaataaactccatagactcaactcttctggagttcacaatgcctccctacctctattcttgatagtgagccagtatctctaaggaaaggagagccgtatttttagtcatcctagggcaggagccactgtggcatctgaggaagacccagggtacagtattagcatttctttcaaccctaagtatgggcatgtgaccagagacactgccaaaccctaagaaatcattagggcatgatcatgctcaccatatttcacaaatgaaatcttaatgtgggctgttttttatgatcaaactgtcatccatgttgacctgatgaaaataacaccctccttcacctccctcagggtaatgaaagtagaaatttgactgaagctcctacttccttatacagcctttccttctgtgggcttgtcacttttcagtacatttctagtggggaagagcagggcgacccctctgctgggtttctccttaaatgtgaagcaaaataaatttatataatggaatttggtggcagtgactgatgtttgtctctagctaaaaccaactgtttagttgactttttagttataggataagttggaagtccttgtttactggaatatattatgcttttgttaacacattagattaaatagaatttggtattctattataaatgtttattttttaaagcaataaataacttatttttggtaagatttggctttttacttccaaattgtttctgatatgtacataaggtatgattataaaagtgactgtctgcaataaaagagaacttgttcaggatattcactagttggtgtagaacctgttaagctttgggtttgccagattagggaaccacaccaccagccgcacagatggggctcaaagtgctgtcagagattatgagcttctgggcaaatggggaagctttaagagggcatctctgctctctgcctctttccttttctttcctgagaagcca

SEQ ID NO: 6843 - DNA, 1345 bp, Homo sapiens
aaagagggtgggtgggtatagatgttgctaacagcaacacaaagcttttgcatattgcatactattaaacatgctgtacatactttttgggtttatttggaaaggaatgcaaagatgaaggtctgttttgtgtacttttaagactttggttattttactttttggaaaagaataaaccaagaattgattgggcacatcatttcaagaagtcccctctcctccacatttgttttgccaatttgcacattaaatgactcttccctcaaatgtgtactatggggtaaaaggggtagggtttaaagatgtagacagttgggttttttaagggccctttttcaataactggaacactctataacaaaggatacttatttaaatagatgacattgactatttttgtttttattaaaaggaagcttacatgcctaccaatatttaatcttttatgattgcctttttataactttttatattctcagcagagtgctttaccaattgaagtaaaatgtggcaggctggagttattgaagcagagtggcagtcttcagtttgcagagtaggggtctgtcttttaaactctgagtgcaaacttcagagttcttgccttggctgcagtttttttccttcaagaatgcagtactaacatttatttgagtggagttactgaacagtaacatagctgtgatttttggtatttgaaacactggttttaaatattttgacttgttgagggtatgttttatatagcaagacattatatagcagtaaaaaatggtgttttatcttctatataattcctgtttttattattaacaaaacagtcctaaatagcagccctcaattgtgaaaaaatttactttaaactacattaggttgtgaatgcaggttttatcagaactatgtttttgttcagtttatctgttcatatggataaatattggttgggatgacttggtgtctaatgtgtagtgctacacacctaacttatggggccaaaatagcatgtcctaatgcttgctgctgatttaaacacattaaaggtactttgcaggaaatccttgcaccatgggattaatatccaattgctgcttgtacactcattcattactaaaagttttgagaaatttttttttccagtaatgagcttaagaaatttgtggaaaataactcacctggcatcttacatctgaaataaggaatgatataaggtttttttttctcacagaagatgaagcacacaggaacctaatgggccaactgggatgaggtgactattctgagatgactattcagtggctaacttgggttaggaagaaaataattaggtattttctccaaatgttca

SEQ ID NO: 6844 - DNA, 1159 bp, Homo sapiens
ttgagcaggtgatatttaccaatctgtaaacttcatgtagacagatttgtataccttagatatataataaatatgtgcttatattttatatttattgatttcttccttaaatccaaattaagatttggaaaatatgaagtgttatagtgttatattcatttgttgtatctctacctattgccattatattgttaatttttttatacaacacgataaagctttgtgattatgttttagctagtaaaagtgtaaaattttaatatttccatgttttccaatataacttttagattgtacttgtgtcacaaaaagagggattaatctgcttgtaataatttccattgaagttgtagaatacccaacagttttatatccacaatgcctagatattttttataatgaactagggtaagtgaatacactagttttgaattcttaaaagatatattcaatttgattcttttttcttttacaggtgtgagccatgcaatgggagggagaggaggaataaacagaggaaatattaattaaatggtctgtaaacaataacaactgtgaataagattatcaaatctgttttagtgtaatgattgtcaagtttaaaaacatttttatatataaactggtatactcatgtcaatattctttattaataaaatgtttttcagtgtcaaaatttattattcatttcttcattagttgactcctcctttgctcatcagtctaaggacagttgtaccagactttggataaggtctgcccagaacgagtagtaattgctcttgctgttctactaggcacatcaatgttatagtattgatctaaatggaagagaaaacatttttttagttaaaaagaaaacaatgcccaaactaaaaaataacttatgttgactattatgctcaaagacaatgtttatcattttaatagagatgtttttactaattaatttgaactttataacaaaaagaaaaacaattgcctagacttttcagcttttttgatgtttcaaaagattgacatttcaccatctttttgtaaaatcaggttcagctctcctttatgaagtaaacattaaagagtaaccaagtttgaaaaataatttacttggggttattccttttaaaaaatacatgccaatgtcattcatattatgaaa

SEQ ID NO: 6845 - DNA, 1298 bp, Homo sapiens
gtgcctcgtttggtggaggacccctctagcttttcagggagagtatcatgtcaaatttatgaagaacctagttcttcaaggctcagggctttattcagccttgcctatcagtctgctgagtagttaaataaaatgtcaaatcagttggattttgttacaggcatttttttaaaatgatctctaagacagtgtcctaacaacttacttgattttaaaagttcttgaattatttttaaacagtgctgtagattatatgaaataaaaattttgcaattcatagtaatgaattgcatgatacattgaaatataaacgggcttctgttaactaggatctttagctttttgagattttagttaggaaaaagtaaatttttatgttggagtaagtatattttatattctagtaataagttaaagcatgaatgtacttagaactttgctcattgagatgtatgatgtatcataactaatgtagatgttatagtagtagaatctgatgtgaccatgtgccaattaagtgcataaatgctgttttaaatgtttgattataatattaatataatcgcctggttacttctttaggtgtaaaagatcagctaactaaagaaaatgaggagcttaaacaaaggaatggagccttagatcagcagaaagatgaattggatgttcgcattactgcgctaaagtcccaatatgaaggtcgaattagtcgcttggaaagagaactcagggagcatcaagagagacaccttgagcagagagatgagcctcaagaaccttctaataaggtgattagctaattctgcttaagtaacaaattgtttttctttgtacattttacttgaaagtgcttggtgatataggagcctttgtcagtgaattttggctaaaattcaatatatgcggagagaattaacaataatgacaatttttttgtggcatttttagtggactcttgtgggctaggaacaacaatcaagagctttctctttataggtccctgaacagcagagacagatcacattgaaaacaactccagcttctggtgaaagaggaatgtgagttttagttatttcatagtctgttatttttcttttaaagctcagggaatatctagtgatctttctgtttaggaaaaagaaatctgtgtattctattgtaaaaacatacactaaagagttgttttctctgcagaactgtatcatgtatttgccagcttgttttcaccatactttcagtcctatcagatgaagctttgtgacagagaaaacgtctctcatcttttagtttacagttgg

SEQ ID NO: 6846 - DNA, 1158 bp, Homo sapiens
atcgaaaaattaagtgacaaggtcgttgcctctgtgaaggaaggtgtacaaggtccactgaatgtatctctcagtgaagaaggaaaatctcaagaacaaattttggaaattctcaggtaaatcatgttcttactgcttcatttctgtggtataacaactatgaaatgaaactacaaatatataaattagagaaggagattatacacgattttgatataaagttcattcttttatttgtcaaagaactcataacttttaacatttacacatattaaacaagtgactttaaagttgaatctgatagtaagaactagagcagttttctcttgaaaaactaaatgcctttcagatcattttagagataaacattctaaagccagtgtctataaaagaaaatagaaatacatctcccattattatttattattaatgaaaacgtgtaatagttattaaagtcaatgatttttgtcatcttaccaaattacctacgttttgtaatgttggctttttaaaattcacataaaattttaatatctgtatttttgtagatttatacgacgagaaaaagaaattgctgaaactaggtttgaggtggctcaggttgagagtctgcgttatcgacaaagggttgaacttttagaaagagagctgcaggaactgcaagatagtctaaatgctgaaagggagaaagtccaggtaggtatactaagctttaagaaagcacttgttaaatcaaaagagaagcactcatttatatctctaccatttaacgtaatgtaaaatttaacttgaagtaagcattcttctaaacttgtaaattcattaagcatttgttaaacactaatatagtatagtgcttaaaagtaaaggctctgtaaccaaactgcctggtttcagattctagcttcataccattagctgtggccttgggtacattgtttaacttccctgctcttagtttcttcatctgtaatatttggataataatgaggtttaattgagtttgtgcacatgaagcatttagaagcatgtctggtatgtagtgggtgcttaataaattccagctatcttaatttattatagttatggattatacgtgtggatagtcattctaggataaagtgatttaaactgctacagaatatctttctcacccaa

SEQ ID NO: 6847 - DNA, 1404 bp, Homo sapiens
attagtaagaaatgacataaaatacgtgctttctcaggttactgtataactgttataatatatttaatatataaaattaagacttttgcttccagcaagtatgttagactagatattataaaacaactagatcctgaataaaatctgcttttaataggttcactggaagtaggagaattttcaagaaccatacttcgacatttcctctgccacaaaaaatgaacgcattttaagttaggagtcatgaatactgtattgaccatacaagtggattatggttgtctggatggcagataccaatagcaacattgtcatatgcagtttgcctcaaatcagaaacaagaagacatcggaatctgagatgctgccctagagaggacagttaaagaaggttcagtggtcctcagtttgcagtgctctagctcctggcagaagcaagagggaaacattcctaatttagttccaagattcctacagattattatcaagtagtagtattttatgactagagatcacaggcacaagttgaaacaaactaacatgacaagaaagctatagaaaaaataaacattgaactcagttcttcaaggtttcatcaccaacataaggaatgaagttggaaccacaggcagatctgaaaaagaaccaaatagagctcctaaaaatgagaaatatttattgaaataagaaaaaagccctcagacatgttgaatattttattagactcagctgaagagacaagtgaactaaactataagctggatctaaagaaattacccagtgagcagtgaggagaaacaaggagctagaaaacattggaaagttaagagagttcgagggaagaattataaagactaggagtcctagaaagagaaaatttagagaataaaggagaggcagtacttgaaagataacacaattttacaaatttgttggaaaaacatgaattcataaattcaggaagcacaatatataccaaacatatatttaaataaaatccaggcctagactcaaggtattgtaaatgacaagataccaaatacaagattttaaaagcaaccatggggagaaaaagatcagtgaaagcaagacagtcaaatacttagtaggcttcctaacagcaacaatgtacccaaaagagggtagaattctgagaaaaactattagcttagaatttgcaacaagcgaaactgaaacaaacagatgctcagatgaaaaacagatgttatcctcagcacaaattcagtaaagagactacaaaaggatgatcttcaagaagggaaatgattctaaaaggattatctgaaattgaaaaactagtaagcaaataaatgataaacataagtaaatttaaactgttgtttgtataaaacaattataatgaagtgtttataagaaattgta

SEQ ID NO: 6848 - DNA, 1220 bp, Homo sapiens
aattaattaactgaaggaactctagttaaaggagaagtcagagaagctcaaatttatatgaagtttaaatgaatttataagagatggaaactttctatggaagggcaatcaattatacttctaccaggcagaatatataataggtcagtggcagtaaaagcctagaatcacataacttgagaggatgttatctagacagtgcatagttttccactgaagtagaaattttttcctgcagtgtaccccctttcgataaaaaataatctgaaggaaagattgtgcttgatcacaaaataaagctggtctcattagactttgcctgattatttgcacaggtgaagtagcaaatgttaatttagcttgtagatgtttagttgtttttataaatgacattttcataagtaatgttagattggacttttaaaggcctctattatttgctaagtcaggggcaggaggcccttgcccaagaaactccctccacatgttttattgtgttaatttttattctcagtgggaatggaatctcattatttctaaaatcattttcttatgagaatggatataccatttctattttgagttggatgcaaagaataaaatatcaaaattagcagaaatgtagttagtgtggattgatgttttattttcagattgagaatatcagaaggaagcataattatctgcctttcattatggaattgttaaagactttagcagaacaccagcagttaataccactagtagaaaaggtaagtattttattggtagatacttaaattaagtttagagtctccaaaaacataaaatgtattttttattttttgcttgaatagaggtaaaatttttggaagcttgtacgtttttattcttttgcttttgcctcttgttttctactctgtaagaattagttcaattgagactgtaaaacaaaaataaagaattaccccactgctttaggcttccagattcttagtgtcaagacctcaggttatgctgtattaaaataaaatttaaaacacttcctttaagcaaaagtagatttttaatgctgataattgaaataatattttcctatttagcaaaaatttgagttgatataacagaatttaaaagtagaatggacattgttgggtttaaaaaaaaaatagcctgtactacgaaataggttttcttatttctaatttagtatccattccactgagggaaaactagcataa

SEQ ID NO: 6849 - DNA, 1154 bp, Homo sapiens
caatgtaaagactgtagatgattgagtgaaaaaaaatatgtggacattgtataccctgtttgggaatttaaatgagggtggaaactaatgtgagttgggttcagaatttctctacaatcacacaggtgaattgaagcttatgctcggttataaaatactaattgaatttgaataggtagaaatgagtctaggaggaaatgaataggagagggggacaagctctgttggcttaatcagctatgttttccatcaggatgattgatcttgttaccctaactggattggtttttggtaatattatgagttcattgagttcatttggtttcctagaattttcaactccagaagtgcagcaaatttctgaaaatagattaggatagaaattaaacatatttattctgtttatgctgagacttcataaaatataatttgaaaactgttcatgttttggggccattgtcaccagttaaaaaccattttttatttttttaaacacattgatatcttcacttttatattttataggtaattaataatgcttgtgctactcaagccatagtgagtgtgttactgaactgtacccaccaggatgtccatttaggcgagacattatcagagtttaaagaattttcacaaagttttgatgcagctgtgagtacaatcttcttattcctaaaatgtcatatttgtgaaagtttgtatattaataggctactttaaaaaattattttagatgaaaggcttggcactgagcaattcagatgtgattcgacaagtacacaacagtttcgccaggtaaagagactttatgttaaataaatactgtttctttctttgcttctttgagtttcactatttttttatttactgtagacagcaaatgtttgaatttgatacgaagacatcagcaaaagaagaagatgcttttcactttgtcagttatgttcctgttaatgggagactgtatgaattagatggattaagagaaggaccgattgatttaggtaatgcagttcctgttcctgatatttcacttttgacaggggaaaatctgttgggtatttaccctcattcagtgctgcttaaattttcaaggtaaaagtgactatgaggtaacataatataatgaaggccttaagctcttcagtgtgtta

SEQ ID NO: 6850 - DNA, 1172 bp, Homo sapiens
gattgggaaattttcatgtgaataaaccataactgctgtttcgaataattgacagtcaaactataatatggtgtgttaattgctatgttagagtatatacaaaatgttaaaagtacacaggtcatggaggagcacagccagaaggaaaagcataaacagtagtgatgttaaagtatatgggttagccaacagctagcaaagtgactagaacataatatagcagactggaggaatatttatttggatctgaaactgaaaagataaactgaggacagattgtatgccatgttgtatagtttgaattgccctgtagtgactggggatttacctatcaaatatattttaatgctgaaatgacattattttcataattaaggtttattgtgcttttaagtgtgcagggcaggttggaataaagtgagagaagctagacatctcttaaaatggttggagtccgagatgattggctaaactagtgggttaggaaggaggagttagattcaataagtttgctatatttaaatcaacagttgcatgtggtaatgtctgctcttcattcctttgggagcagaaatacatccataacacgctaaattaaaaaaggagttctcagggctgccaaccttacagtagaggttgagtggtagtatattactcctacataagagaaaaaaaatcaaaaggactgcttactaaaagttggggaaaaaaagaggcaaaaataactccctggtttctagcctgggtggctggtgaaacactcttacaagtgaagagcaggcttgatggacaagaaaatggattcagatttggacagacactgagtttgacatgtctgcagatttagtcatatattttacgttcaaaaccttaacaatatgttaaagttaactttcagaaatgttgtactaggtaagtttgtttttactccttcaatttcatatgtgcagaaaacttggagatcatgcatgaaagaatgatatataaattcatcttctgtacatgcacatatgaaaaatcagcagctattaataaattggcttcattagcagaagaacctgcaaacaattaaatggtggtagtttatgtcaccatcagatgcttcaaagagaaaatcagtttattccaattatttccatcattttcattttttcacccaatttatagattta

SEQ ID NO: 6851 - DNA, 2202 bp, Homo sapiens
cttcccagctaatctccacccaatgaatgatgatggtatagtatgtgcataatggaaagttaccttactgaaaaaaaaaaaagaaggaaaaataagatgggcccaaaggtctatctactaaactagctcttggggaaatagcttcaggatactgtagtttcctctatctaatagagaactttttgttaacagacactgtaaaatagttttgctttgttgaataatacgtgtgtacctaaaagaggtaagagcaaaaagtgtaattccacatcatgttacttgagaagtgcttaacgttttcttaaatgttttcattgggaaaggacagctttgataatgtccaaatactctgaaatgcactagaccatataactgtgatgaaatatgaaactcatctgtaaacttttataccaagggggtaaaaaaaaaaactaaggcatttgattaaattatgaatgagttttacaaattcctttcagagttttactaagatcacacaaataacagctttcttattcagtgaaaaagatattttatttctgatgttttatttgcacttgtggaatatgttaccattaatcagaaacatcatggcaacccctaagaatagactaagtttgtgttggctgagggattctatttggtttgcttttttttttttgctttgttatattttattgctacaaggggtgtgacttgataatgatttcctctgaattataataacatagccagatgtagtctcacactgtttttcatactcttaagtgtaaataatataaaatgtttcaagcgcttaactccccctcattcacaaagtataacaattaaaatctcaactataaccagtttagctttttccttacttttaaaataaaattttttacttttaactatttttttagttaatatttttaaaagtatacatgtcaatggcctctttgtccattattcattttgtggcaaaatattcttctttgatagtgtaaacaaataataaagcaatctaggtcctttaggtttgaaaggcaatttttgagtagcatattaccagctagccagtcactaggaatttttttcagtattatttgtatgtattaaacttttcattacactaaagtgcattattttattgagcaagtatccttcattgtgaggtttaacattaaagcaatctgttgaaatgccattatctttgctcataattttattatggccgtctaaggtagcttacacataaaacctgtttgcgtatctgttgttctctaaatattaattgaagatttactgaggatttgtaaggtccttctcgctgttatgtgaaaagtcaaactgtagttaatgtaaattatagccttttaggtgcttgggggttagagggtttatgttttttgggaaagggggactttagtagtctgaggatttctgtacatattttcttctgttttatgtgaaatttgggctctgggaataagaaaatattcctttcaaatttatttgacatattaatgctggttttgatatgtacccattccttcaaggcaactggtatcagtttttaagtgtgatttacctgagatatttttgttcagcaaagctcatagcaccctcacccccactccagacatgcattgcttctgatgttgttcacgtttttaaccctgtcaagcattgaactgaatatattagctacttttgacacattaaaatattacgttcagattgaatttaaagtttaaagaaactaatagaattacgtaatagttattgaattgtttaagtaaacccaagatcttaaaaattataacatgatcattttattcctaatagaaatgttaaatagaatatagtacaaaagtgcattaccttcagttgtgtactatttccataatacttttagacaaatatatctataagttaatattaaatccatcaaggatacaagattggatggatatgacctttctgaagtatttaggtaggtctaattaaatggactagggtaacatttaagaaagaaaggataagtaggagaagctaccacagaaggtaacttttcaaatcatggcatatttgagctggaagaaaccttagaaacctaaaagctaattttttaaatttttgttagagagctgaggtccaagacagagtgtgattttgaagtactataacctagaaatcttggtctcttcattcctgtgc

SEQ ID NO: 6852 - DNA, 1823 bp, Homo sapiens
gtggatatggatatgtggataaagacagtaaatgaaattaaaaccctgctgttttaaatatcattaccagatataattgagggaatattatatcaacaaacatattgaaacttggctttatttgtaacgtaaactatatataatccatacgtagccaaattagatttaaaatatacaattaatgaatagtactcaaagtgtttttgttgcactgttactctgaatatggactctctatatctggtatggcgtgactgggcataacttctgtaatgtatttcagttatatgtttttccttttattgccagcttctgataatgaaattttccaaagggatgagatataagaatcatcttttataaaaaccagtggggagtggggtattataatctagttctaaactgtccatttgctttatataaaggctttgatttcaataactgaccatttgatgaatatttaaattacacagaataatgtctacatagaataaacttaagtattcaagagccttaaagtgaaaaaatgaaccttttgactgccttaaaatactacttgctctgtaattcaggcatactagttactttccttggggtctgtttaaataatgccttaatagtgttctaatgtttctgaaatacagaactcaaagggtcttttagagcttttaattttacatagtgaatggaaatttaagtattacattttaaaacctgattgtacattggtaatttaaacatccaataacaggaaaatctagatacagtgatgtgttatacatacatgactgttaacatcagtaatattttatgatagtttaaggttttttattgttttctataacaagttatccaacaggttggactttgtaacatgatatccaaggaccaagttgcatatttaacatcgaatgaaaatgtagttgtacagttccaaaaataattaattttttaagggaatttttcaagacaaaaggcaaatattttgtttcaaacctacaagcaaattcattccaagaagtgaatatagtagtaaaacataaagactattgcaataaaaagtttccaggccagtgacttgtttaattacattcacatttttacattcactttgcctttcaaagcaggagtattttataaaactgaaataaaactttaaattgtcaagctggtgcttaaagttatgtaaaatctgatttaagtttatttcatttccaaggaaaggaccctgaaaggaggggacagggagcttcctaggtctgttgataaactaactgatgctttgtcaagtcttccaagttttcactgtaaataatacaactaacaatgtaattttgctgttttctaatagagaatgaatgaatatattaatgtattacatttgtttcatgataaaacagttttcactgatactgtgaaatcctttctctcctttctagccttgcaaaataccctactaaataaatcattttagacatggagtgcaggtggacactgtgtgaactgtttttggtcagttattgtagaaattgatagatgtaccaaataaactctatgcacattaaacaagtgtctgtctatctctttcaagaaatacgaatgttaaggttataatatgccttaaaaaatctaaagcctttagtaatcttgtatttgaacaaggtaaaatttaagttttgataattaatattgaccttttaatgtatctagttttatgtaagtattaaaagtatatgaagttaaagattctttacccatggaattcaattataacaaaatgattagatttaatgaaaacaaattatttaaagttttaaaatagg

SEQ ID NO: 6853 - DNA, 1163 bp, Homo sapiens
agaaatgtcaacttgtttttacatgcattattctaaaaattctaaaattcctatagtcattataacctaccataatatttttttcaggtacatggtaaagcataaatcgcacttgagattctgaattatttggctcctccatttctggaaattgagactcaagctttatgaatttatcaagaacttaaaaatgaagaaggtcacagattgatcttttataagaccttatttgatgctttgtgcttcaaggagatgatacctgtcatccatataagcaaactttttggcttacaactatttttttaatattagccttctagtctgtaatggaaattgtatattttgatagaagttttttctccattggttaaattagcattacttaaaatttgtttctttagaaaataaatgcaggttataaatgtgtgtatatttagagattataaggctctctgagccatcttctgatttttcattgctctataattctttttactgaaaatactatgttatgaatggtattaaattttagtctctggaacatccaaaaccaagcaaagggatgtgactattttgaatgaatcagaatgtcaacttgtatgtacactatatctacacttactcattatttaaaaagaataatgaaaaatctagatcaattcttcaatttgattgaactgttcagccttttcaagatttctttatttacaaatgattacatttaaatgaatgtacattcttctcactgactttggtgattttgaaacctagaatgatgtgtttctatctgtaatatctttccatttgaaaaaaatctcaaaacacagattaaaaccacaataggctgtagtattttttattttgggagccagagtatgatttgggggaagaatatgtatcagccctattgcagtataactttaagctccttttctctttagtccacttttgattgtaatttttatggtataggattttgaatcttctattttaggcttgtcagtcttggagttcttatcttccattatccctaaatattgataaactcccaggcaccaaagaaaacatttgcttaattgtctgaaaagaaacaagagaaaaacactggtatttttatgtctgtattcaatatggtataaaatataaaaactatattttaactt

SEQ ID NO: 6854 - DNA, 1615 bp, Homo sapiens
tttgttgaactaaagtatataaaattttttgagactagcagtatattttataatattacaaatacaacaattatttataaaagctagtcaaattaatggcttagaaagtagctgtaaactttgtgttttgaaattgcttgtttaaatgcaaaattatgagtaagataagtctttttaaattttttatttttaatttttttggaagtttattaaagcccttcatatacacatactttttaaaaaaagattcttaataaagaaattattggtttgtctggttaaagtccatatagaatgctgagaaataatttataaaataagaactatagaaatttgttctcagctgaaaagttggcagctgctctgtttctttaaaaaagtacaacatgaaaatttaattacattagccttaatattacttgactgaatttctactatttattcacttgtgtttgagattcacccagctattctaatgatagaaataaaaagtggagaaatgactaaagttgacttaagttaagaattggagtgggaattttgaaatgccatgtcctatatattctggcatatttgttggcacatttgcaagtatgttgatcccagcattgtttatatctgttggaataataactaaggaaaaattgaaaatgtataatagatgtataaagatttatatttagttagtatataatagataatacttgcaggttttttatgtgttttgggtttctgtgtattattttaggtaatctttataagggcatcttggaagttataaatatgtgccatttactgaaaagtgggaagcatttttatatgagtaaagctaatgaaataaaactagttttattgccaaaattcaaaaagtggggttcatgctatgtcgaatttaagcaaatgatctgtctgaggattttgtttgccattgaattccatttctgtccactttaaatttactaaaagctatttaacctgagtttgattataatgcttcataagtaatgcagttcatgtacatagagtaagtgctgtaagtgattttttaaccaccagttggtgctgtttctcaaagtggttcttaattagagtttaagtttgggtgccatgtgaactcataaaatattctactcattctttttgtttttctttgttttgttttctttgttttatttttcattctgtttgtttttctttgtttgtttttgagatggagtctcactctgtcacccaggctggagtgcagtgctgcgatcttggctcactgcagcctccacctcctgggttcatgcagttctcctgcctcagcctcccgagtagctgggattatgggtgtgcaccaccacacctggctatatttgtattttttagtggagacagagtttcaccatgttagccaggctggtcttgaactcctgacctcaggtgatccacctgcctcggcttcccaaaatgttgggattacaggcgtgagccaccatgcctggcctgttctgttcattctgattccagtttggtgggctcttaaattttaggttcaattgtaaataaaacatgttgccctattttgttttaagagcactagggacatttccattctccctttgtcctcaat

SEQ ID NO: 6855 - DNA, 1156 bp, Homo sapiens
agagggatgcaagccaggaaaatgtatattcacatcctcacatctgttataaagattcaatcatattatcgtgcttatgtttctaaaaaggaatttttgagcctaaaaaatgctacaataaaattgcagtcaactgttaagatgaaacaaacacgtaaacaatatttgcatttaagagcagctgcactatttatccagcaatgttaccgttccaaaaaaatagctgcacaaaagagagaagagtatatgcagatgcgggaatcttgtatcaaactgcaagcatttgttagaggataccttgtccgaaagcagatgaggttacaaagaaaagctgttatttcactacagtcttatttcagaatgagaaaggctcggcagtattatctgaaaatgtataaagcaattattgtcattcagaattactatcatgcatacaaagcacaggtcaatcagaggaagaacttcttgcaagtcaaaaaagcagctacttgcttgcaagcagcttacagaggttataaagtacgccagctaatcaaacaacaatctatagctgctcttaaaattcagtctgcttttagaggctataataaaagggtaaaatatcaatctgtgcttcaatctataataaagattcagagatggtacagggcgtacaagactcttcatgatacaagaacacattttttgaagacaaaggcagctgtgatttccctccagtctgcttatcgtggctggaaggttcggaaacagattagaagggaacatcaagctgccttgaagattcagtctgcttttagaatggccaaggcccagaaacagtttagattgtttaaaacagcagcattagtcatccagcaaaatttcagagcatggactgcaggaaggaagcaatgtatggagtatattgaactccgtcatgcggtactggtgcttcaatctatgtggaagggaaaaacactgagaagacagcttcaaaggcaacataaatgtgctatcatcatacagtcatactatagaatgcatgtgcaacaaaagaagtggaaaatcatgaaaaaagctgctcttctgattcaaaagtattatagggcttacagtattggaagagaacagaatcatttatatttgaaaacaaaagcagctgtagtaactttacagt

SEQ ID NO: 6856 - DNA, 1223 bp, Homo sapiens
ggtaatatatgagttataaatgttgtcacttttccagtatctagcactatttaatagaaaggggatgttttatattaaactatggtgaaggataaaattgaaatgaatgtaatttaatactgtagatagagactttaggtagtatcctagttagtagcactctggttatattatacatgtgactttagccaaaaggccaagaagctttggttgttataataatgaatacatcaactttttttcttttagaaaagaatttgaggaaatgtagtctatcactttaagttttatgtcagtacatgtttaatttcaagttgtctaatatttgctaggtaagataattcttggaagtgtctgagatgaactgttctaatgtaaacttttcagttgcaacaattaagcttccaggtaaattgaagttatgaaattgtgaaatatattctaccacatataatgataaaaaaaaattactgcaatctgacctggtagaaattacttacccagtttaatatatccccatatgtcttacagtgttaacttacttatgttattgatataggcggaaattggttttttaaggaattggtgatcatttgctgtaaaaagatgttgcattatacgctgacataacagtggtatctgctttttgctttttataatgttttttggaataattttctctctgaatcagaatactttggacaatctaatttaataattattaatattttaactgaggctgtgtgtaaacatgaataaaataacttcttcagtaacaattccaagagcatatgtatacaagtaagttgttaaagttagactggataaaatgctgttgtagaactgtaaacaaatactgtgaagatatgtatagaggtgagaacagcttttgggttgaagtacctgagaacattgcatctttccaatagacttcttagactttgtactcttagtgcatgcttcctgtattctgccttaattgtcttaatttgacttggagatgagtgaatagggatgagttcacaaatggtattgtaggtgcaacacaaatatctcaaactgtcccactgaacattagtcccgtgacatgctatgtaagagaaggcttctgtgttcaagtaagattgggaactacgtaattcacaatcggttttaactgcccaattctttagtaaagaaacctgttgattttgcttaacccagtatttccttaaatcatttta

SEQ ID NO: 6857 - DNA, 2145 bp, Homo sapiens
tttaaggggcagatttagagactcttttagaaactgagtgtctttatcttattatcagataaccaggctgcacagggctctctataatggaatgatgctccttttcaatacttagagccactgtactcagtttaggagtaactgaaggtgtggatgcatgttaatgggaatccaatttttactatttttatatgaataacagcgttctgtagaaacagtctctcccttctaaataaaaactatgtgactgctgttactagtgctattctatgcgaatatcctaataataggattcaggaattctaatgaattgtttcttaattaaggtgaacaagtagactcctgatcaagaggagaacactgtgaatgtctcataatcaatagaccttcattctcttgtagaaaatgtggattttcaggaaaagactgattattttcatgaataaattttcttatacaaattccattttgtttgacataaaagaccctgaatcttaagatatttgtaaatcagaatatttaagaatgtaaaatgaatccccaaatctagtttcctccaaagcacttcttaatgtaggaaatagtttttacaaaccctatgtcagtactaatgttcctgggtcaaacccagtaatattgttagtgtatgttgttacaccttatttaagaggcagagtggttttgagcaagtcagttaacgtgatttgatgaagaaataaggaattatatacatttagacagaagaatattttattttgaaaataggatttcgtgcaataatttttcttgcataacttagttcatataaatatgtacatctgtttttctggcagatgccttaaggtcatgtttttcagtatttgagtaaatctgtatgtagcaatgttctcattgatttcagaaaaaaatatattctttatattgttgccaggagaaatgtttttgtttatttaaaattattatggatattgtgttgttgtatcataactaactgcctcagcaacaataaatatgcaataagaaaatcctgtaccttagattagattgacaatactgttactttaaaagaaatatatacggtacaaattgctgattctacatgtgtacatttaacagatactcagttctgcaccacctaaatcaaaatggcatttgtatgctgatgattacatatgtggattgtagtatcctttgtgatgaatctttgataagatttataaagggcattgccaatactttttgactgtgtaaattaattttttgtatgatgtacagtttgtttaatcttagagcttctatagatttctactttattatacttgaatgaggcagaaaagcactgtggaaaatctgtagctctggatgcaacatgcagacataccaaaaaaataataataaagcaaggtactgaagagcaatgttaacagaatgctttatatccagaatgctatgtttttttcaagccacattttagttgaatgaagtaaagttattcaatcttttattttaaaatattggaaagtcacaaatgattacttctttgatatgatgaacctataagtctattcatctctgttatttcatttctcaaatgtgagccttgttgaggtccattatcaaatctacactttggttgattatatgatgtttaggacaaggcagaatttaaaacctgcatgtttagtgcatcacatgtcaagtcaccatccttctgacagtgtaacttccataacgttattttgagagccatttaataatcatatttgaaaaagtggatttcttgagtctgttgtagtttagtacttacagcagtgcctaaaacagcaactaatatgaactgcctgagtcctacaacataaatgcataaagcttttttatgtaaaagccacaggaggggttcaaaattgaacttttccaaagtttatttctcttgcgttagatgaaaaactatttaaaaggactgaaaaccctgagctttttgctcgtcttggtagcagatatctgtaaaaacctacccagaattgtgattttacttcattgttcttgcatccttgaggctacagtataaatcatctccaaacttgactactattgggaagatgtgtataaaagcatcgctttgggaatttttttaaaaatatgcaa

SEQ ID NO: 6858 - DNA, 2323 bp, Homo sapiens
taaagtttgaaggataagttattagtgttctgcagagcaataatgcctttttctattcatcaaatcaaggtcaaaattcatcttttcaagattaaaaagctctcttaatggaaatatttaatttgcttatataaagcactatagccatgttttccaaaaagtataaaaatatacacttacctttcattcagtgaaatataggaagtgctgaattacaatgtgaagttaatgacttctgtttacaaatgagacactctaacgagttttcagtctctctgtatgcctttgctatttaggggtccaccccaagaaagccaaatacaacataaaccgtcctgacaaaaaaaaaaaaaaaaatctttttttaactaataattctctatcaaaatgcttcatatcatcatctcaaatttactttttaaaataattgactttgtattttagaagttttagatttacagaaaaattgcaaagatagtacagagagttcccatctacccctgttactaacatcttacgttactatggtacatctgccccaattagtgaaccaatattgatattccatactttattcagattttcttagttttctcctaatatccattttccacatcaagatcctattcagaataccacactatattgagttggaatgtctccttaggctcctcttgcctgtgacagtttcttagactttccttatttttgatgacattgacagctttgaagagtactgtcagataaattgtagcatgctcctctcttggagtttgttgggtatttttttcatgattagactgggattgtgggttttgaggagatgatcacagaagtaaagtgccattttcatcaggtcatatcaagggtacgtactgtcaacatgatttgtgaatgctgacagggaccttgataacctggctgaggtagcgtttgtcactctaaagttcttcctgccctttccatgctgtcatttttggaaggaagtcactacatgcaggagtgaggagtcataattccccttctttagggcagagaagtatctacataaataactgggaattctgtatagaaaatttgtttcttctttctcaaattcactgttgagctttggaattcatctgagaaggaatcatgtactaattacttcatgatagactagattaccaggcacaatcagggaaaaaagcagtgatagtatggttaaattgttattagcattttcagtatatccactttatacatccccaatcatgattttttttacatttctttttagaaaagatgttcaagaaatcattaaagaaccccaataagactatattctaaatatttattgaaagaatataatttcagctaaaatcctagaagagggtttgaaataatttaaagaaaatgaccaagtttttttaaaacctacgtttcaaaatctaaatggatatgtgttatttgggacacttattcattatgattatataagaagacaattcttgtttcccttataagtatggactgtatacattaaggaaaacaatgtttaatccttattttttaatacagaagtctcaaggttcttgtcaaattttgcctttataagcttattacaaaattacaacttactttactgaagtttataatggaagaagtccatatagcaaaagagctgttttaaatcagaaggaaaaaaggttactctggttgttaatctgcttggcaaatattccttcataatttgtgaaaagaatgcaaatcagcattttaatatgaattttgaaatgaggtatggttttttgtttgtttttttcagaactcagtctgaaaaacaactgtgagtgtagcatgggtcaaatttggtttttagtccatttgctttatcaacatcacggcttcagaaatccaaattttgttctacttttcagccacctttcaaggtgtttggttataatactgtgttgctttgaggatatttagccactcataaataattgtctcaaggtatttaaaagtgatttgtgccttattttaatgcaaaattagcagttttattctattttaaaaacaaaggcagaaaaacaattctgcatgttattctttaaaaacatccagaataatactaccaagtatttgtatttcaaaccagtaaaattttgaatattcaaagtctgctcttaaacttagacttcctagtattatggtggttatagtgagaatgaaattaaactgggtgagttccgaaataaaggaaagtgttatattctacagtgcccatattttctatggtaactaaatcaaatatttgtaagttcctctgctttttgaaatt

SEQ ID NO: 6859 - DNA, 1168 bp, Homo sapiens
tgaccttacctaagagcttgttagaaatgcagaaattcagactcagaaacactatagaaccagaatctacacttttacatttttataagtccctaagcgatttatacgcacattaagatttgagaagcacagctttaaaatacttggggtggaagagagtgtgggctggggataaaagaaacaaaattggcaaatactgttaattgttgaaactgtgtgatgggtgcatgagggtataattgagtataagtcaagtatccctaaatcagggcctgaaagtctatgtgactgtgcatatgtattcaatccagtgatctgttgggttttttttttttttattggtttgagaagttagtaagtgttgagataaatataccttattgcttccctttcttcctgtcccagtttgtcaagttattggataatattcaaaaaccctgaatgcatatttcttgcaaaagtgtttcttatgaaatcacattgttgctttaaaatttgctaaagagacttattttaaactgctaatgccaatttattgtcaatctctctctccaggcacgcttaaaaaggcctcttaagagccttgatggtgctctatatgatgatgaagatgatgatgacattgaaagagcaagcaagtaagtaatggattttggtgtcctattaagtggaatggcttaacagcagaagtttttggtgataaagggtatttcaaagagtatgcactcttagagctcagatgttgcccttttacagtgttcttcagcaaaaggacccagtgctcctggaatgttatgggggatatcttgggacaggaaactaagatggaccttaaatatcttgttcttggaaagcaataatgtctacagagatatctgggatagtgttaaaggggcaatagaagcccatctaaattaggctcttactcattctgaagagaggaaggttaaatatcaggaatggtgataatagtcaatagaaagaaatggaattgagggtacagtagacttaagtctatggtgatatcagaagatgaaaatttaataaaaagtgttaaaaattaattttaatataagggaaataatatatgtttagcttcttacaattgatgtatgacaatgacaaaatgaacattcttttttcttcattaactatatctctgtctatg

SEQ ID NO: 6860 - DNA, 1209 bp, Homo sapiens
aggagttcgagaccaacccggccaacatggtgaaaccccatctctctactaaaaatacaaaaattagccggatgtggtggcgtgcacctgtaatcctagctactctggtggctgaagcacgaaaatcacctgaacccgggaggcggaggttgcaatgagccaagatctcaccactgcactccagcctgggtgacaaaaaagaaaaaaaaaaagcagattcttggggacatacactaaagatgacaattcaacagagcagctctaggttgggtcccaggaaattagcttcttttcaaatacttagcgggtaagaaagttgggaaatctgtgatctgatcatcctctgcaaatacttaccttgagtagggttatgtttcaactaataatagaatattatgtactttatgtggcagccgactagtattacacttaattattttaataaataccattttaaataataataccctttgaacttcaagactttctggtaagtgtgtaaaatgtttttcttcacattcactatgagctgtaacttacacaattatcttttacttgtacagagaaatcttacagaatattttgttgccgtggatgtgaacaacatgctgcagctgtatgccagtatgctgcatgaaaggcgcatcgtgattatctcgagcaaattaagcactgtaagtacttcacacttcttttaagtagcaggtattgagtgtttcacaaaaagacctaaaaacctttgcagatttagaaatgtgctatgtgtacttataagacaatatctacatacgtttttgatgtatggttttaatctggctcttgaagtacaaaagtctgatttataggaagccttctcagatgcattaagtcaggttaattattttttcttatcaggagatgagagtttttttttctttttaactctccagagttcattttagtgccttctaccatataaagaattcttaagagctattatgagatttttattattcacttgtggctttttccattggagccacttgaaagaaatcaaggggccatgataatagctgctatcctaacctggtaataggtagattcatctttgttgccaagtagtggtttgggagtagattgtataatagtttgatttagagcagctctttgggctgataataacttaaaagtcaaagtagcattttttataaatcacaggttttatgacat

SEQ ID NO: 6861 - DNA, 1321 bp, Homo sapiens
ttattgctatttgctaaataatagggtggttgatgtttacaaaagagatttcttgtgacttaccatagaaacccagcccaggaatcttagtagattttgatatatttggttagcaagctttaatttttccagtccacctcaactaaatgtgttttaataatatatatgtttatatgtatgtataggtgtgtatgtctctatatactgtatatatacacatacgtgtatatgtatatatgtacaaaataaacctttcagcaatatactctttttttgccttaacattttttccctattttaattttaattttagggtcaaatatttttaaccaagtcttaactttttgtatggcaatgtaattgttaaatctcatataaacccgctaactcatttaagaatctctcaaattcaacaaatcctgaatgtcagtccatggcattttttaatttactcaatatatttttttctgattttcattacaaattatatgttaccagttttaattatctttttcatatgtgatttatttgtattgattagcattcctacttcattgcccctgatgtaactggactcccaacaatacccgagagtgtaagtttcctattttctactttaattattcttatattattaattttgtttattttggtctcactgtttatgcgtttttatatagagaaataggatacattgtaattatctgtgtttgtgagaaataatgaagaaataagaaataaagatattattttcttttcttctttatatatctgcccctttaccttcttcttaatatctggttgtggataaggaaaattaaggacaataatataaggaaaactatttctatcatttgtagtaattaggtaggatcatatatatattcaattaggtcttcagcttcactgtatatgatagaagagatacctcaggagatggcttctacttgtggagaagaattctagcaatgggaaatgtcttcacacaaatcattattttagtgaaattgacatagtattttatattccttgtatataatgcttcaaatcgtagatgaactgttcttaatttcctgattttaatttaaagcaatacatatcttgcaaggtttgatggctattgtaagaaattttaaaaattgctaaaattttcattttatttagagtcctaattctagccatactagaactattttcagtattttaatagttattacacattagtattttgtagaaatgtttacatagacaagtagaagtaacaaatatgcttttatgattttggataactatgtgaaaatgaagtattcccttacgtaat

SEQ ID NO: 6862 - DNA, 1105 bp, Homo sapiens
aaggcacaatgtttcctaatgttactatattttagggtgtctcagaatcaagttggacagcactttacctttgtactgacagacattgaaagtaaacagagatttggattctgcagactgacgtcaggaggcacaatttgtttatgcatccttaggtgagtatttgtagtaaaaaaaattagatgcaaaataggtaactatctctctattgtactttgttatgcttgggatgaagaaaaacttgttttctttaaaaacaagttgaaaaataattttcctgattttctgtatacagaatcagttaagtttaaagatttaccattaacatagtggaactttccttgaaataatcgattttttaaagattagttttttgtagagttatttttgaaaactaaatataaagagatgtattcaaataatatgagtttcacctattaaatggaatacaaaaaaaaataagttaaattaatgtatgcccttttctgtcactgaaccagaacttggatttttaaaagtgaactgctgctttaagacagaggttgcaaactgatgaacctggtagaagcgtttagaggttttcgtttggctactgggtgttttaaaaattttaaaggacgttaaccttatgaatttgaggaagttttgtatatagttcatatttcgaattccttttgaaaagtgaggctatctactaattctgccatggcaacaataagctggaactgaatagcagatttttagttgtgtcatgagcttgctagtttccaaaggtcctatctgtcctgcctaattgcttacattatctgccttgattcagtaggtagtttagagtatgtctcctgcctgtggacttgggatctgagttgctgactgttaggaagaaagggttctaaaggttagcattcttgcaatatgtcctgatgaatcagaaatccagatgtagtctataaaaataggactccaaactattattataacatggatattggtcaaactggatttcttagaaatgcttataggaaaagaaataacaatttatgaaataacatattacaaagaaaactttggtataaaatcagtcttcctgttcatttgctattca

SEQ ID NO: 6863 - DNA, 1175 bp, Homo sapiens
cctttagaatttcctttaaaagtttcaaaggccaggatattgtgtaaagagcaaaagagcaagtttttgttttgttttgttttgttttgtattgttatttgccagttatcatacaggctggcaaggaatgctgagacctgctttgcagttctttgacctactggattgcctacataactagctacagaagtagctcaaagatacaggatggctggtgcatttgttgtttggcatacttggtaaggatgtacaaggatgtgtgggccccatgacagacagtctttcctgacagtccaacctttgcccatacacattcttggttgaactcaaattttcatatgagtataccaccccatcagcaattcagattagatatgctgtcaggtgctgaggaaaaattcatccagtttatctcatacaacacttgatgaggacaattatcaacagaatgaggccaacctgcagtattcacctcaaccatgtaccctaggattctggactcaacaaattaagtaaagtcccagacagtactagtagatattatttcagataatcatttagctcccttccttatgggaagtatggattgttccatctgagcagtggtattaattcatacatatcttggtcagccagcatgtagtttaggccagtatgttatgcattatgacttgtacaaaggaattttaagctgacctgctgatattccagagtttgcacagccccattgcctgtggtaactaaagttaaggatagatttctgaccatttgctctgtggcatgaattccactgtcagggaaaagtacttgcactgctatgtggaatgagaagcctgcatgtcctctgggtagtttagcctagatgaggcacatgttgtcttcaatatctaaacagtccaattatgtgccaggcttcccttttggtaggtggggactgcagggtaagtaatttttcctttattgtctcagggcagtcagcattgctcctgagaatttgactccgatggctagtccctatatctcatcaggattaatgaaccacccctgggccctcatgtgagtcagcatctcttccaaagccattgccaagggagaaaggcttgttccacatctcagcattgatgcaaacagcaggagaattcagatactcccgtggctgctcagtaaatctgttt

SEQ ID NO: 6864 - DNA, 2056 bp, Homo sapiens
tattcataatttcttcctctcagtaaactaaccaaaaatagttgtcttaatcaggttttattgtttttctttcttcacagctccgacagttagttaatatgtgcatcaacccagatccagagaagcgaccagacgtcacctatgtttatgacgtagcaaagaggatgcatgcatgcactgcaagcagctaaacatgcaagatcatgaagagtgtaaccaaagtaattgaaagtattttgtgcaagtcatacctccccatttatgtctggtgttaagattaatatttcagagctagtgtgctttgaatccttaaccagttttcatataagcttcattttgtaccagtcacctaaatcacctccttgcaacccccaaatgactttggaataactgaattgcatgttaggagagaaaatgaaacatgatggttttgaatggctaaaggtttatagaatttcttacagttttctgctgataaattgtgtttagatagactgtcagtgccaaatattgaaggtgcagcttggcacacatcagaatagactcatacctgagaaaaagtatctgaacatgtgacttgtttcttttttagtaatttatggacattgagatgaacacaattgtgaacttttgtgaagattttatttttaaacgtttgaagtactagttttagttcttagcagagtagttttcaaatatgattcttatgataaatgtagacacaaactatttgagaaacatttagaactcttagcttatacattcaaaatgtaactattaaatgtgaagatttggggacaaaatgtgagtcagacactgaagagttttttgttttgttttaatatttttgatattctctttgcattgaaatggtataaatgaatccatttaaaaagtggttaaggatttgtttagctggtgtgataataatttttaaagttgcacattgcccaaggctttttttgtgtgtttttattgttgtttgtacatttgaaaaatattctttgaataaccttgcagtactatatttcaatttctttataaatttaagtgcattttaactcataattgtacactataatataagcctaagtttttattcataagttttattgaagttctgatcggtccccttcagaaatttttttatattattcttcaagttactttcttatttatattgtatgtgcattttatccattaatgtttcatactttctgagagtataatacccttttaaaagatatttggtataccaatacttttcctggattgaaaactttttttaaactttttaaaatttgggccactctgtatgcatatgtttggtcttgttaaagaggaagaaaggatgtgtgttatactgtacctgtgaatgttgatacagttacaatttatttgacaaggttgtaattctagaatatgcttaataaaatgaaaactggccatgactacagccagaactgttatgagattaacatttctattgagaagcttttgagtaaagtactgtatttgttcatgaagatgactgagatggtaacacttcgtgtagcttaaggaaatgggcagaatttcgtaaatgctgttgtgcagatgtgttttccctgaatgctttcgtattagtggcgaccagtttctcacagaattgtgaagcctgaaggccaagaggaagtcactgttaaaggactctgtgccatcttacaaccttggatgaattatcctgccaacgtgaaaacctcatgttcaaagaacacttccctttagccgatgtaactgctggttttgtttttcatatgtgtttttcttacactcatttgaatgctttcaagcatttgtaaacttaaaaaatgtataaagggcaaaaagtctgaacccttgttttctgaaatctaatcagttatgtatggtttctgaagggtaattttattttggaataggtaaaggaaacctgttttgtttgtttttcctgagggctagatgcattttttttctcacactcttaatgacttttaacatttatactgagcatccatagatatattcctagaagtat

SEQ ID NO: 6865 - DNA, 3976 bp, Homo sapiens
aaacaggaattgaaatgctattgaaatgttgctttttttttttttttttttaatgcagatgtcaaaaaccttgaaaacttccagctggtagaaggtgtccaggaacaagtcaatgccgccctgctggactacacaatgtgtaactacccgcagcagacagagaaatttggacagctacttcttcgactacccgaaatccgggccatcagtatgcaggctgaagaatacctctactacaagcacctgaacggggatgtgccctataataaccttctcattgaaatgttgcatgccaaaagagcataagttacaacccctaggagctctgctttcaaaacaaaaagagattgggggagtggggagggggaagaagaacaggaagaaaaaaagtactctgaactgctccaagtaacgctaattaaaaacttgctttaaagatattgaatttaaaaaggcataataatcaaatacttaatagcaaataaatgatgtatcagggtatttgtattgcaaactgtgaatcaaaggcttcacagccccagaggattccatataaaagacattgtaatggagtggattgaactcacagatggataccaacacggtcagaagaaaaacggacagaacggttcttgtatatttaaactgatctccactatgaagaaatttaggaactaatcttattaattaggcttatacagcgggggatttgagcttacaggattcctccatggtaaagctgaactgaaacaattctcaagaatgcatcagctgtacctacaatagcccctccctcttcctttgaaggccccagcacctctgccctgtggtcaccgaatctgtactaaggacctgtgttcagccacacccagtggtagctccaccaaatcatgaacagcctaattttgagtgtctgtgtcttagacctgcaaacagctaataggaaattctattaatatgttagcttgccattttaaatatgttctgagggttgttttgtctcgtgttcatgatgttaagaaaatgcaggcagtatccctcatcttatgtaagtgttaattaatattaagggaaatgactacaaactttcaaagcaaatgctccatagctaaagcaacttagaccttatttctgctactgttgctgaaatgtggctttggcattgttggatttcataaaaaatttctggcaggaagtcttgttagtatacatcagtctttttcatcatccaagtttgtagttcatttaaaaatacaacattaaacacattttgctaggatgtcaaatagtcacagttctaagtagttggaaacaaaattgacgcatgttaatctatgcaaagagaaaggaaaggatgaggtgatgtattgactcaaggttcattcttgctgcaattgaacatcctcaagagttgggatggaaatggtgatttttacatgtgtcctggaaagatattaaagtaattcaaatcttccccaaaggggaaaggaagagagtgatactgacctttttaagtcatagaccaaagtctgctgtagaacaaatatgggaggacaaagaatcgcaaattcttcaaatgactattatcagtattattaacatgcgatgccacaggtatgaaagtcttgccttatttcacaattttaaaaggtagctgtgcagatgtggatcaacatttgtttaaaataaagtattaatactttaaagtcaaataagatatagtgtttacattctttaggtcctgaggggcagggggatctgtgatataacaaaatagcaaaagcggtaatttccttaatgttatttttctgattggtaattatttttaacagtacttaattattctatgtcgtgagacactaaaatcaaaaacgggaatctcatttagactttaatttttttgagattatcggcggcacaatcactttgtagaaactgtaaaaaataaaagtatctcctagtcccttaattttttcataaatatttctggcttttgagtagtgtatttatattgtatatcatactttcaactgtagacaattatgatgctaatttattgtttcttggtttcacctttgtataagatatagccaagactgaagaaaccaaatatatgtgtttactgtagcatgtcttcaaattagtggaacttagttcagggacatagaagagtcttaatgaattaaaatcattcacttgattaaatgtctgtaaatcttcatcattcctactgtagtttatttaatatctattgtaaattatgtgacttgtagcttcctctggttttcaagtaaactcaacaaggtggagtcttacctggttttcctttccaagcattgtaaattgtataccaaagatattagttattacttctgtgtgtacaaagaggattattttattatgtttattaatcacctctaatactcatccacatgaagggtacacattaggtaagctgggcgttgactcatgcgcagtctcagtcacccgtgttatcttcgtggctcaaaggacaatgcaaaatcgccgatcagagctcatacccaaagcattacagagaacagcagcatcattgccctccccagctgaaaaacaagttggctagaagatacatggagaggaatggtgtggtcaacagttaatgaaacggttctatcatgcatgtgtaatgtggatggagacaattataagatttgactataactatttggagggtctttaacattgccaaaaaaacaaatatgttgatttttattttattttattttttattttaagaggcgggatcttgatctcacatgttgcccaggctggccttgaactcctgggctcaagcattcctcctgcctcagcctcccccatagctgggactaggggtgcatgccagcatacctggctacgttgactcttaaaatctatgttctcttattttaaagatacagtgctccccactgaaaattaaacctaaaaaatgtcacatattggtatgttgttaacctggtagattaaatcatgagaatgattagaaagacgggcaacacagcgggttacatccacactgctgatcacaccaacgacaggagctgataagcaagaaagcgtcacagccagcgtctgttcacccaaggttgacaagtgaagtttctctaatgttgattgttagccgatttgtaacctggcatttacttagcaactgccttatcaattacaggatttgccggtaaaagcagactcaaatataaaggtttttggcttaacttggtttattatagttgctctatgtttgtaaacagacaatctctaatgtctgattatttgtatcacagatctgcagctgccttggacttgaatccatgcaatgtttagagtgtgaagtcagttacttgttgatgttttcttactgtatcaatgaaatacatattgtcatgtcagttcttgccaggaacttctcaacaaaatggaattttttttttcagtatttcaataaatattgatatgcccagcctgataatttttaaaagtttttatgttgtcctcattctatcggatactaaagcttctaaataagagacttgactaggagtgaaatcaaaagaatcccacaggaatagatacttttccctttagataacttctagagtggttggctgtccttccatggatacctgaagcattaaattcaatctgagcatcatctctacatgtgaaacaaagtattttatatcatttactgttataatcaataagcagaaaaatcttaatagcatctcacttttttgtagagcttatgttgtcctgataactttcccaagtgctttcttaattcacttggtcctcagaacagatccaggaggtattattattctcatattaaagccccttgcacaaaaggatttgatacactagtcagaggagtagcgggaatttgaacctaggcagtttgactccagaatcaacactcttaaacactacacca

SEQ ID NO: 6866 - DNA, 1245 bp, Homo sapiens
ttgcattctttcaccatttagtgtctgctgtgagctgggcgctctgtagtgtatctgtgcagtgtgcatggatgggacagggatctagacattgtaaagaagctgcactccccctcaagaactccagaaggaaagaaagcaagacagaaagtaagttttagtaatccaaggcagaacgaggtgagagcatctagacaaggcgccaggcaggcaggctgcatgaggaggtgtcaagtcaggagtgaggtggaagctgagatgggctttgcatgggtagaattcctgaaagtatagagtggagagaggcctgggagagggaacgagaacctgagcaaaactgtggaggtggacatggaagaaggtcatgggaacacatgtctcgtggaaatgtgttaaataaagcataaggaaggagagtagtgaaggatgtggccaaatgaagtccgacgggagcctgaggatgggagaccacggagaggtgagatttcccagggtctgaggagggtgaggagcagtttcatgagtgtttttggtaaggggtgaaaggtgaaaggagattctagctgcctgggctctggggtgggggacacagctgcaaatggcactgagggttttagggagacagggaatgaagtatctccacagtgccttgggcttcatttctcatgccgtgctgctgctggggcagggttggctgaagttgaaggggtggagaaggggagatggtggatggagacttgggttttcattgcttctgagcttcctgtgccctggcactgattttctcacaaaaaccgtattggaaaatgtccccaggttctaaagtgaactcataaagcccattaatccacagcataccacataatatagcattccacagtacaattggtatgaactcctaagaccatgtcatgggataggatgtctgtgggtaattcattgcaaattccaaatatgtaatcagctaggaacatgatggtcagctgggattcttttacatgaaatggttccactctatgcctggcctggagaacacctgttctattacaaatggcctgataaaatttgagttggtaatttttttagagatagggtcttgatatgttgaccaggctagcctcgaaattctgggctgaagtgattgtgttacctcagcctcctgagtagctgggactataggtgtgcaccacttcacgtggctagtttatgtattttttatggtttagactttaaaagacacatcaa

SEQ ID NO: 6867 - DNA, 1198 bp, Homo sapiens
ccaaccaactaaccaaccaacacatttattgagtttgtactacatgctagttactcagcaagacatcagagcaagagtggggaccaaaagcagatgctaccttcatgaaacttatagataaatcagagagatagatattattcaaataataacgtcagtaatgataaaatttcaatatgagcaagaggtgcaaggtgctaagaaagctcacaatagagaaattgggcctagtaagaaaaaacttccttgagaaaatagtatctgaagctgggatctgaaagatgagtaagagttaaccaactaaatgggagcagaatttgtgctttacagcccttgtgacaagagggagagttgaggctgaggaactgaaagaaggtcattttgatactaggaagagatgaatgctacacgaagtcaaaccatgtaggaagagtttgtgggctatggaaaggaatttattgtttgtctcaagatcaatagaaagcaattgaaatattttcgatgtgggaagggtggcatggtttgggtttcacatcactcctcttgctgcaacatggaaaatggatttgagatagacctggggtggatgcagagagctgggctatgggccaactgcatgaactctggtgagatatgatggagttcaaaccagagggtgacagtggaggtggggagaaatagacaaatccaagagatacgtggcatgcaaaatccacaaagcttgttgatgggttagatgtggggagacgcagatggcccctgggttggtttctggggctggatgatggtggtgccatctcctgtgatggggacactggcaaaagaccttggtggtttttgttctgactctggacaagtagagtttggagttgtttttttttgagatggagtcttgctctgtcacctaggctggagtgcagtggtgcgatctcggcttgctgcaaactccgccccctgggttcaagtgattctccttcttaggctcctgagtagctgggattacaggtgcctgacaccacccctggctaatttctttttgcatttttagtagagacggggtttcaccatgtgggtcaggctggtctcgatctcctgacctcaggtgatccgtctgtctcggcctcccaaagtgctgggattacaggtgtgagccaccatgcctggcaatttttgtatttttagtagagatagggtttcg

SEQ ID NO: 6868 - DNA, 2764 bp, Homo sapiens
cagtatgatttagattacaacagtcttgagcattttagttaggatgaaggtattattaaatcagcaatgttttaaaatgttgagagtataagtattagaaggaaagagctaaacctataaataatggagatgcagaaactgaaaattagtaaatatgtaatatattagtaaacttataagtatgaagggaaaaagtagatcataagacatttgtgttttgaaatttagtggctacagtgttgaggaattgggaataaatatattaaagggtagaataggtctttgaggctttgttttctttttagtatatgatagtattacaggaaatcataaagatattaagtataagcatggatttctctgtagagattatctgtactggcgagtctgtgattaggaaatgtcagtttttgtttgttttgcccaagtgtatttcctagatttggtctttttcttgaacaagagtgctaagcagaatctctgattctatattgaaatccaatttttgatttctttgcacaggtgacttattctctattctagattagccctaacagattgatttttttttttaacccatccacctgcctttatttcttctgtggaatgtctgtctctgaatatgatcattttaaaattaaggtttttttttacttttaagaagttaaggtatgaagtaggaaacaatgcttttggatttctgttgtgctactggaaattcagaataaggactaccataatttagcaattgctggtcagtatttttgaggtaatttaaaaatgggaacagtggaaaaacatctataatttttagcatgtttttaaaaagttgcaaactgatacaaatatttctactttagttttccgtattatgctcatcagatgagagaggcaaaagtttgtattcattcctgtcatctggcattttgtaattacttgccattagtagcatttaagcctgaactgggtgacagtttgagcaatatggcttcatgaggtcacatggaatttttaccttccaaattcataggctcttgttaagcagaagaacttccctcaccaaaaatagtttctgaacttctacttttagggtaaaacatacctgaagactatcattttctgagttttatggtctttgtgttttctatgatacatactgataggatttcatttttaaaatgtgatgcaagactcctttgttagtgctatgataggatccatgcatcatgttgcgtgaggttatgatggtaatgttccatgaatattttgttatgggatccctcctggtatttaagaagagggatctgtggtggtttaccaatctgcttgtaccctccatgaaatgataaacagttactgatagtgagggaaaatattgtattctcgttatttttttatatccttggtaacatttaaaatgaacattaggatgaacacagcatcttagaattctgttatcttatgcttgactgtatttgagtgtgactaatttaaatagactatatttaaattctttatgaatctttggcttacttatacaagtccagcgtaacattttttttgggtcacagactctgggcacccgatataaattgatggccccccgccccctgtacgttagcagagatatatcaacaaatgaaaatgtgcaagccagtctacatgctcacaagacctcctccaactttcaaataaattcttagttatggaccctaggttaagaatttagaagacatcctaaatattgaaattttattgtatagataagtaggaagttaaaacctaagaaaatcatcaaatattaggggtgcttctgaattgatttatctgcagtttaactacttagcatttatggaaggcagtttacaaaaagccatagaggtttatgataagctggtcaagtaattagttgaatagattttataattctttgcacttctcatctgataataactaccgtataggtagtagacttgacagtagttcagtattttctgttaacagagttgtgtttataacaattacagtcaactactgtggttcttcagttgcacagagtagcttttggcaaaagtgaaaaaacctacaaccaacctacatctttttacctaggaggaataatattgagttcttaataacagactatacttcattatagcctgtgtgtgtgactagctaggttgaaatgtactgtgcatgataagccttgtaaagcaagttatatgttgaaattagtatctttggaagtgtagatagatagctggagaaaaatgtaatgatttggagcttgtactccagaggggaaaatgtatttcccgtgtttatagagaatagaagaataatgggcaggggttgaatgtaaagggaattaagggatatcttagaatggagaagaaaaggaatagattttgaaggaaaatagcatacacattccgtactcagtcacatttggaaaatagggaatataaaatttactccaatattaactgttaaaagggtaaagaggatctttagttggaaaactgttctgattttgttgttctttcagttcagacttatttcagtactttggtttgttatgaactttagaactattgtggagcaattaataaataactcttaacagacaactgtggtgaatttctgtttacatgtccagtctaggaaaaagatggctaatctttgtgtttatgtattaaatcttttctttggtaactcataaaatcacacagtttccatcggttgttaagaattttaaataact

SEQ ID NO: 6869 - DNA, 1124 bp, Homo sapiens
ctctcttgatctcaactgtaacaaggctgtaattccatcaagcgattctactgacatctagtacagtgttgaagcccaagtggttggctggttccagtattagaactcaagttgaaattatatgattaactgaaatttggggcatgcattatttattatacatggcctacaacggttctgtctgcgctgttacgtattacctacacttctgggtttttttgttcttgttctcagcctctctttaagagttcttgggccttccttttccctctttctattttaacagttttaattttagaaccatttacattccagtaggtaattcactatgcgctttatatgccttagggcatccaaataaaaaacaatagggtaaacatccccaaaacccacctttaaaaaaaaaaaaacccatacagatttccatatgtaataaaaccccgtgttcttggatagatattaataaggttgtaattccaactggtgacataactcctgtgagggataagaatgtgtctgcttatagtaataacatcagaacctctttgtgaaattgcggcctttaatgtacattttaatgaaagggtgcattagtattgtacaggggtcttgtaaagtcatcaaaacttgctatgaactctaattgccatttgaagctactgattggcagtggctctactctaaaactgctttttagcaattgtatttttttcctgattatattttttaatgtactttgatgtttatgctgatgagttttttatgtacttttggtgatgtttcagtcttatgtactcttctgacgtcagaaaagtaccactggttgtttgcagtcttattgtgtaatcagcctaccgcaggcttccatgtataataaagtaattaatattgtgcaagtgtaaaacacttctgttataaaagcagtgtttggaaaataagaaatattaaaaatggttacaaagtattagttaatttccttttcccactttcctccctttagctttagcagctaaagggtcaccaacttgtcattgcaagattcttagaaaatgtacttaatcttaaatacgctgagtactaaaaagtgtttatttcttatttcagtaagtgcggtaagttctatt

SEQ ID NO: 6870 - DNA, 1171 bp, Homo sapiens
gatcctttcatttgcccttttcgaatttacagatactacttgtacatttggcataactagttgaaattggccattcgtaccatgaataaatctgatagtttccttgttaggaagagattgtaagtaaatacagtcattgcagtcagaacagtattagtgaaccttgtgtggtgttttcaagctctttaaaatggtacaatgtagcacatttgctttcatttctttttttatttttggcatttgaccttgtattctttctgaagctctatatgtgtttttattagtcaataatctggcaagtagcactttgcctgtgcagtttgctggagtgtagatgtacatatgaggatttcccgggaggtgcacttctttgaagaacttcctaaagtacctgtatagtagttttcatcttaatattcagtatttaatcttcagtttgtgctttgtaaactcatgacttaattggtcagaaactttttagtgtctttataaaattttgtatacatatttatactaaacacattgtgatactgtatttgaatgaatggtgaaaaaatatttgctattggaattatgtgcactgacaagaaatgttataaagagaatgcctttaataaatcttttcagcattagaattgcttcgtggtctatgcttttttattttactgattttctttgtttattttactcttcattcagaatagctctgccttgataatagctaggctagtgttgcaaatcaagttaataattaggaaacactaaacaaatattaatattgccataacaactatttttttttaacattgttctgcctctctttagttgattatgcctggaatagatttatcaccatgtggtatgtgtaaagagcatgagctttggagtttgacatatttttcacacgtttggagtgtgaatcccagctggactgcttagtaactacatgaccttagacatgttactgtcttcactcccattccttcatctgcagaaagaaaagtaatacccacctcatggactatctatctatgagcacttagtgagaaaaatgtgggaataactgctggcaagtagtagactgttagtgaatttattttctgtccttttcattaccagctacaaaacccttgttatgtatataagatcacacttggtgcaggcatatgcc

SEQ ID NO: 6871 - DNA, 1260 bp, Homo sapiens
caaagcaatctttgtgatattacttcgctattaaataaagaaaattggatgcaagacaatggagaaactttaaaactaaacaggaccaccctttattcttaaatttgtgtgtgtccaacagttgaattgaatgtctataaggtctaaaggtagaatgtgaatattgccacagagttcattgctctcagtataagattttactttattaatgcagaaggaatatggatatatttctttaagtctgcagatttttttattatggtgcagcttttttttaattatgtttttaaaattatacagttgaaaaatatgccatttcataaagtctgaggattttcgtcaaccttactgaaacacactggtgctttcatcatcagaggtcaaattattatgataactattccattaagtttgccaaacatttgtcgtggttaccagtgcagcctgtcaaattctgctatttgacacagctttggaaagatttagttcttggtttttccgttttgtattagaatgactgttacagttttatttggctgtttaaagccaaattcagctatttaattatggtttcatggacactgttgagcaatgtacagtgtatggtgtgcttacctgtccactctagagcattgcttacaggttttttgttttttaagatgctgtgctgtaaaatactgtcatacttgctatttcctggtacagtgtagtttttcccctttcatttgaataaaagcatggcaccaaatgactccttttctgtttcttgaataaaatgtagtttttggtaaaattatttgaacttgagataactcatacagtttttctatcccctaacctatgtttaaatttaataacttgaatattcataacaggcaacttgaaataattagccttttaaaaatactaacttagggcaatgttaaaaagtcggtaactttctatgcttagcacagacggtctacatagtatgatttataaatgtgcttatcttatgttaatcttgctcatactaattcactatcttttggtgaattgatagttatattgtaccagaactagtgctctatgtctttgaaactgaatggccagtgaactcactgatctggagtagccatgagaagctagttcttgaccattattttgtaagtttcactttgattttgctgattctacttactcagaacagagtaaagaaaaaggtgttttttaagaaaaaagagatctgataacaaaactataaaataatcgtcatgccta

SEQ ID NO: 6872 - DNA, 2359 bp, Homo sapiens
tttcggccttaaaactggcatggagcgcaggccctcccttgcagaaaattatcaaggaagagggagttggcagagtttctctgccccggggctggggacgcggagctccggggaaattgttaaatcagtgttctggcgccccctgttgggggaactctggaattacaggagtgggccttgggggggactgagctccatccctctcccccgccccacccccacccaaagttgcccaccctgtttttccgttgcatcgctggtcttgtgcttcccgcttcagtctgggagccaagagccagccccacctcccttcagaggacgcagtgacttttggactttccagaggtggttctgtgtttctgcccttggctcctctccgtcttgggctggggcacttggagccctctccatgtggcgcccagtgttggggggaggcaggctccagtggaggctgagtgaggcctggtcccttccccgtgccctcctcggagctgccacagaggctaagacggctgtcctgctggtgctggccctgctggatgtggtattgaagtctggggcagctgatagcaggaaggagacccccttggatgctggtctcctgggacctgaacagtctgtcagcaatggctggaaatccttcttcctctggccaccccgggggtgccgggcaacccccttagctctaagatgtggccacaaatctcttcccactcctccccgccaacctgaacagaaagttttgaccttgcaacctgtaagaaagaatccgtccgcatgactgtttacaagcgatagaaacacgtaagactctgtccccttgagctcccacccccgggccggggatgccccacctggggtgactgcactgtagctgcaaggcgtgttcttgcacgaagtgtgatcttatggccctgcgagaggtgctcatcatcatgcccattttctgctgtttctgatgggtcagctacctcacggcggggccagctctgctgtcctggcaagtgtcattgactctctaaacttgaagtccttcaggagccctgagcccaacatccatgagacaccccgagttgtgcttcatgagagttggattctctgcccactctttcagggatgtccaaggtccatgttagggggcaggcccccagctccactcactgcacaagcaccctaaatgttggaagcacaaaatggttgtgatttgagcacaatggcagggtcccgcaggcagacttgacaggcccaggcccgggaggatccccccacgttggctctgtccaaagtgagattgggggtgcctgtgtctgggacagggggctgcccttgctcagaccaggccttggctcatggcttgtcctaattctgggactcgtcatcttacttcttgcccttctgtgcccatcttaagactggaggctgagccttgtcaggcccagccacatctttacgccatgggaccaggagtaaagcgctctctaaaccccgcaccccaaatctctaaacgcctgagttcaggctgagtcctagccctagtgagcctgaagagcttggactgattcccagtctcctgggtcaagccccactttgtgctttcgaagcttatgagcgggttccctggatagaaggagtcttccatccccactgcccttgggcctcttcagcatagtcctgtgccagggccctgtcctcactatcagtcagttcagtatttgctttcacgtgagtggcggactcttctgaagcagccagaactctcaaaggcagcgcatggagttgccttgcgagatttccaaggaaggaggaaagattaacaggcggagcctggcacacccaagcctttgaggtggtcagagtgccaccttcagccccttgggaagggacagcggtgggtctgggagtggcctcaccctggattcagcctaggaatctcttcaccctcagctgtccagccctgctgcctgtctggggatgtgtggcctgggcagagggcagtttaaagcacaaaaccacatggggaaaacacaaggttgcggggactttctcatgtgcctgatgtggtggagggagacaccagcaggtggctgcagtgacgttagggaacataacacttctttgccctgctagctctcagctctggggggcatcccccgatgtggtctgggctgggagcaggcatatcccctggttgttgcctgtgcctggtctgttcaccatcgtgtttgtgtgggcagagcctgccctgcaggagcagtgactttcttcccactgtgtgtcccggacctgtggtatgtgtccctttgccatcccaaacaggcaactgcttgctgctctccttgcttggcatagcctcctggtc

SEQ ID NO: 6873 - DNA, 1203 bp, Homo sapiens
tgaggaacagtgtgcagcctccagctagttctgcccagggcccagctgtctcctgcccctgtcctgcagaaaggtcatgggattcaaaacccagaggggacccacagcctcagtttccacatctgtaaaacagatatggtttataggcatgtggcagccacctggggccccagtgaatgccctatgaattcagctgtttccttcctgcacagctctacaacgaggagatccttgacctgtttgacagcacccgtgaccctgacacccgccaccgcaggtccaacatcaagatccacgaggacgcaaacggtggcatctacaccactggcgtcacttctcgcctcatccactcccaggaggaggtgagcctctgctggaggtctggagcaggtccagggcatcctgaaagggcaggggctggcaccacggtagtcccaagccctcacttctgcttctgtttccagctgatccagtgcctgaagcagggggccctgtcccgcaccacagccagcacccagatgaacgtgcagagctcacgctcccacgccatcttcaccatccacctgtgccagatgcgcatgtgcacccagcccgacctggtgaggagcctgcagggggcccaggagccagcttgctgcaggggtatcccgggaagggcaagatgaggagccacagattcagaaatagcaaaccagattgaggctggcctctgccatttgttgatttttatatttttcttgagccttgttgcccaatttgtaaaatggcttaatgatctctgtatcgtggtgttgtgaggattaaatggaaatcaggcttgtgcaaatactgtgcacattgtcagatgctctgcatgtgcgaagggcaaggcgcttggccgtccaccgtgcctctcccggatggcagtactgtgatcaggggagccagtgaggtgggcgagggctgggtgagtcagagctgacttctgctgcaggtgaatgaggcggtgactgggcttcctgatggtacacctccctcgagtgagtatgagacactcactgctaagtttcactttgtggacctggccggctcagagcggctgaagcggacaggggctactggcgagcgggccaaggagggcatctccatcaactgtggcctggtaggcacatggtgggtcatcagccccagcacccacacagctcagtctcagacccctccaag

SEQ ID NO: 6874 - DNA, 1319 bp, Homo sapiens
tgtgtggcagtaactggagccccagcagaacctactcttcctggagtgcttcctttcccaggccccagggaggggcaggggccccatcctgcagatgctacagacactaaggcttccagcagacctggcacactgtgttcagctctgcagatgacaaggcaaggtcctcagcctgcagcacttggggaggcccagcctcccagtctggggaaggtaaggctttggggttcgttctttccatgtcagactttcaggatccaagacccttctggcttaccgtgccagatcttctctttttttcttcccactacaggatgctcgctctatggcagcagctgctgcatccctcgggggaccccgagcaaacacagtcctggagcgtgtggaaggtgcccagcagcggtggaagctgcaggtgcaggagcagcggaagacagtcttcgatcggcacaagatgctcagctagatgggctggtgtggttgggtcaaggccccaacaccatggctgccagcttccaggctggacaaagcagggggctacttctcccttccctcggttccagtcttccctttaaaagcctgtggcatttttcctccttctccctaactttagaaatgttgtacttggctattttgattagggaagagggatgtggtctctgatctctgttgtcttcttgggtctttggggttgaagggagggggaaggcaggccagaagggaatggagacattcgaggcggcctcaggagtggatgcgatctgtctctcctggctccactcttgccgccttccagctctgagtcttgggaatgttgttacccttggaagataaagctgggtcttcaggaactcagtgtctgggaggaaagcatggcccagcattcagcatgtgttcctttctgcagtggttcttatcaccacctccctcccagccccagcgcctcagccccagccccagctccagccctgaggacagctctgatgggagagctgggccccctgagcccactgggtcttcagggtgcactggaagctggtgttcgctgtcccctgtgcacttctcgcactggggcatggagtgcccatgcatactctgctgccggtcccctcacctgcacttgaggggtctgggcagtccctcctctccccagtgtccacagtcactgagccagacggtcggttggaacatgagactcgaggctgagcgtggatctgaacaccacagcccctgtacttgggttgcctcttgtccctgaacttcgttgtaccagtgcatggagagaaaattttgtcctcttgtcttagagttgtgtgtaa

SEQ ID NO: 6875 - DNA, 1288 bp, Homo sapiens
ctgcagatgtcttcaacagtagagagtcctagtgagcctggggccccatctagtgccataccccactttgatggtcctgttaatgccctcccacattgtagttagggtttagctgagaagtggggtataaggcagaccccctgtgctgaggattgatccacattgatccctcaggtcttgggggcctgggaggaagcagattcctttaccacagtacgtatgcaaaaaatgttttccatgtttatggaaaaggctgggaagtgctggtgtaaaatgcccaagctcataatagatactcctttctccattgttgcccctgctctaactgctgttctttcttgccagcttcgttgttccctctggcttgtgggggcacggctgtgctccatgtggcaaggtggaaggcatggacgtgtggaggaggcgctggagctgaaggaatggacgagccctgggaggagggcagaaggctacgcagggctgaggatgaagatgcagcccctggatggtcccagactctcaggacatgcccagctcaggggcttcgagccacaggcctggcctcatatggcatgagggggagctggcataggagccccctccctgctgtggtcctgccctctgtcctgcagactgctcttagccccctggctttgtgccaggcctggaggagggcagtcccccatggggtgccgagccaacgcctcaggaatcaggaggccagcctggtaccaaaaggagtacccagggcctggtacccaggcccactccagaatggcctctggactcaccttgagaagggggagctgctgggcctaaagcccactcctgggggtctcctgctgcttaggtccttttgggacccccacccatccaggccctttctttgcacacttcttcccccacctctacgcatcttccccccactgcggtgttcggcctgaaggtggtgggggtgagggggggtttggccattagcatttcatgtctttccccaaatgaagatgccctgcaaagggcagtaaccacacagtttgctgagtgaaattctttgcccacaaagacccagggcttggagcatctctctctttatccttaatctcccaatttgcaacccattctgaagtctccagcctggataggcagagacactaaaaccccagtagacagggccttggtggtcctaggaaggagggcccatagattctggaccgagggatgtcaagctggtcagttcagtccctatgaatgtctcttctacaggaggctaccctgcccctgctaccct

SEQ ID NO: 6876 - DNA, 1228 bp, Homo sapiens
ttgggatccaagatctgaacatctagtatgattccttcattgtacagatgaggaaacaagaccagagggggaaagcaacttggccagcatcatctggcaaattgaggcaggcatagggctagaccctggcttcctaactcccagtccaatgttcttacagcagatgatgcttctataattttggtggcaggggcaatgggtacagggtacaaccaagagcctcttcgctattttactattgagattggggtgctgtggaggtgagggggtaccagtggaccttccttccctagcagtctggctgggcactaggagtgggggatcttcagcaggagggtgggtggtgtggctgggggtggaggaagaacatgcccttatctctctcctctctctgcaggatgttatgctaaaaacttcgggcccaagggctttggttttgggcaaggagctggggccttggtccactctgagtgaggccaccatcacccaccacaccctgcccactcctgcgcttttcatcgccattccattcccagcagctttggagacctccaggattatttctctgtcagccctgccacatatcactaatgacttgaacttgggcatctggctccctttggtttgggggtctgcctgaggtcccaccccactaaagggctccccaggcctgggatctgacaccatcaccagtaggagacctcagtgttttgggtctaggtgagagcaggcccctctccccacacctcgccccacagagctctgttcttagcctcctgtgctgcgtgtccatcatcagctgaccaagacacctgaggacacatcttggcacccagaggagcagcagcaacaggctggagggagagggaagcaagaccaagatgaggaggggggaaggctgggttttttggatctcagagattctcctctgtgggaaagaggttgagcttcctggtgtccctcagagtaagcctgaggagtcccagcttagggagtcactattggaggcagagaggcatgcaggcagggtcctaggagcccctgcttctccaggcctcttgcctttgagtctttgtggaatggatagcctcccactaggactgggaggagaataacccaggtcttaaggaccccaaagtcaggatgttgtttgatcttctcaaacatctagttccctgcttgatgggaggatcctaatgaaatacctgaaacatatattggcatttat

SEQ ID NO: 6877 - DNA, 1168 bp, Homo sapiens
tccttcctcgcgtttctttcccctgcgccctcggcttgcctctctccctcctccctcgctctctcccccttctctccccttcttcctcggtttcttccgtcctctctctccccctcctcctcccccgcctcctcctcctgcgctcccgccccctgccccctccccccgtgcctgcagacgcgcggatcgtccatgcgctcctcgcgggcagaatgctgggcagcagcgtcaagagcgtgcagcccgaggtggagctgagcagcggcggcggcgacgagggcgcggacgaaccgcggggcgccggcaggaaggcggcagcggcggacggcagaggcatgctgcccaagcgcgccaaggcgcccggcggcggcggcggcatggccaaggccagcgcggctgagctgaaggtcttcaagtccggcagcgtggacagccgtgtccccggcgggccgcccgcctccaacctgcgcaagcagaagtcactcaccaacctctcttttctcacggactccgagaaaaagctgcagctttatgagcccgaatggagcgacgatatggccaaggcgcccaaaggcttaggcaaggtggggtccaagggccgtgaagctccgctgatgtccaagacgctgtccaagtcggagcactcgctcttccaggccaagggcagcccggcgggcggcgccaagacccccctggctccgctcgcgcccaacctgggaaagccgagccggatccctcgaggaccctatgcggaggtcaagccgctcagcaaggcgcctgaagcggccgtgagcgaagatggcaaatcggacgacgagctgctctccagcaaggccaaggcgcaaaagagctctgggcctgtcccctctgccaagggccaggaggagcgcgccttcctcaaggtggaccccgagctggtggtgaccgtgctgggagacctggagcagctgctcttcagccagatgctgggtaagtcctgccgccccgccccgccccgcccctggctttctcctaaccagctgctggggaaggtgtggggaaagcgaagccccctccccttgcgccttcccggagggccctcctgttcacgatcaggctgtgatgggcattgcgcccagatgtgctgagctggcccacctccagatgcgcatggctcaagtgtaccttc

SEQ ID NO: 6878 - DNA, 1243 bp, Homo sapiens
ggtttttaagatactggtcagtttcagctcttttctcatttcccgtcctcttgcaggcaaacctgagggcaaagctacagacaagggtaagcttgcagtgaagaatactgggctccaacgctcctcctctgatgctggtcgggaccgcctgagtgatgctaagaagcccccctcgggcattgctcgcccctccacttcgggatcctttggctacaagaagcctcctcctgccacaggcacagccactgtcatgcaaactggtggttcagccactctcagcaagatccagaagtcctcaggcatccctgtcaagccagtaaatgggcgcaagactagcttagatgtttccaacagtgcagagccaggattcctggctcctggagcccgttctaacatccagtaccgcagcctgccccggccagccaagtcaagttctatgagcgtgaccggcgggcggggtggacctcgccctgtgagcagcagcattgaccccagtctcctcagcaccaagcagggaggccttacgccttccagactgaaggagcctaccaaggtagccagtgggcggaccactccagcccctgtcaatcagacagatcgggaaaaggagaaggccaaagccaaggcagtggccttggactcagacaacatctccttgaagagtattggctccccagaaagtactcccaagaaccaagcaagccaccccacagccaccaagctggcagagctgccaccaacccctctcaggtacccaatgtgggcagccgcctccttgtctgtttgctttgtcattctttcgcatatctctgccctccttggactagatgaggcatggcctatccaccgttgtctctaggcctttgcatggctctttcccacctctcccccatatgccaaggttctgaaagaatctagtttctgacagttctgaaagactgaatccctctttcaaaacttacctcatttgtactattctctgatcaatgcttaccctgtcttcagcacttgtatgggtgtttttactgtttatttacacatatatacctatttgcataaattcacttgtatctcccatgtgcatatgctggccccttatctaagctgaatgtgccccaagttgggtatcagatttccttgcattgtatttcacaacagcattaggataagcctctgtgcttagcaaataggcagaaaacaagactggataggatttctttaaggtcctatctgcctctcactc

SEQ ID NO: 6879 - DNA, 1222 bp, Homo sapiens
tcctaatgtccctctacctggatctgcttttttctagcttcgaagttccttcaacaaagcgttcagtataaaaaaggggcccaagtcagcttcctcatactcggatatagaggagattgctacacccgactcttcagccccctcatcccccaaactacagcatggttctacagagactgcttcaccctccatcaagtcctccacctcgtcctccgtgggcactgatgtcaccgagtaagtgctctttggctccctgccacccagcctgttaccagtgtaagctgtgggctagagttgacaggaggccattagaccttagacaagcagtacttattactgacctctccctgggcatatgagaccaacagatggacctttcttctcatgctgattgaatatcaatgggcaggagaagccaagaccaccaaccatgcctctcaatattctctagtaactctagtgcttcttcatgtagcctggcttgactcttgctatcttacaggggccctgctcacccagccccccacactaggctgttccatgcaaatgaggaggaggagccagagaagaaggaggtatcggagctgcgctctgagctatgggagaaggaaatgaagcttacagacatccgcttggaggccctcaactctgcccaccaactggatcagcttcgggagaccatgcacaacatgcaggtcagtgtctgggcggacagctgcaggaaagggaagaccaaggcttgctgtctgtccagtctgccaccctaccctgtctgttcttgccacagttggaggtggacctgctgaaagcagagaatgaccgactgaaggtagccccaggcccctcatcaggctccactccagggcaggtccctggatcatctgcattatcttccccacgccgctccctaggcctggcactcacccattccttcggccccagtcttgcagacacaggtacctgtgtgggagaagaatctataagggtgaagggaagaaaagggcttatttcactgttacaccattccacttgctttggtcagggcggtaacaatgccgaagccaagcagatgccagtgtcctaagacactgagttgtaatggtccttcaaccttaactacttttgagtttgggacctccattccttctctgtggcaaacagagttattttggaaaggataatgatgggaaagtttaggaaaggctgcgggtactcctaaaac

SEQ ID NO: 6880 - DNA, 1222 bp, Homo sapiens; identical to SEQ ID NO: 6879

SEQ ID NO: 6881 - DNA, 1158 bp, Homo sapiens
ttgtgtgccaccacgcctggccagttttttattgttttatttttattttttggtagagtcagggtctctctttgttttcaaagctgattgcaaactcctggcttcaagctatccttccaccttggcctcccaaagtgttgggattttgttgttgttgtttcccttctgtgggcaggacccagagtcccaactctcataaatccatctttttgcccccctttagatggccatgctgctgaaacttcaagaagctgccaactacattgagtctccagatcgagaaaccatcctggaccccaaccttcaggcaacactttaagggttcggcaatcactgtcacccccggacagcagaacgctggcatcagctatcttagctcctcctctcccctctcctctttcagagcactggctctccagccccaggaggagaacaggagggaggaggagatgaaagaggagggacaggttcttggtgctgtacctttgagaacttcctaggaaggaatggtggggtggcgtttgggaacttgtgccccctaaacacatttactggcctcctctaatgactttggggaaaagatgattctgggtctttcccttgacttcttgtttcaattacaaactcctgggctttctggggaggggttcagaaaacatcaaaacactgcagcagttcctaaatgattctcacaagcaaccctgagagagacagtcttgtgagggagatctgggggaggcaggaagctcctcagattttctcacagacccttcccaattccatcaccactgccaacaactcctcccccagagatctggctggagcccagaaaaagaagcatgtggtttaaaaaatgtttaaatcaatctgtaaaaggtaaaaatgaaaaacaaaaacaagcaaacaaacaaaaaacaatggaaaagatgaagctggagagagaggaaccagttgccaaggtagagagctgcccgctcctgccctctggatgacataggggacatcaacaagacggctgccaacctgagaagtcaccaaaccacaaaaataaccttacagccttcagggaaagactaccagctctgtctttctaccctctaatttaacaatgcataagagtcaataaaccctacttttttatttttggtttttattttg

SEQ ID NO: 6882 - DNA, 1747 bp, Homo sapiens
agaaaactgaaaacattcctctgtcttgtggccagtttggcctttcactgcactattctgatggtgcctgactgaatccaaatatcctagctggctcttactatttttcacaaatgagtattcacatataagagatgaacatccatgtgagatcatcccaatcagaatataagactcaaggagtttgacttggtggccaatacctgccttccaaagagatcctacctttgcagatttgctcctttcccattgccttgaaggtctggcaatccctgttctttcatttgacaagtacttactgagtactcactatatacaaatcattaggttaaaacagacacacacacacacacacacacacacacacacacacacacacacacaagacctgggcccttaagtttacagtccagcaggaaatgttaacctccattcagctacgcccccttgttatctagaccttcgggatcatctaagaaatgtagctgaaacccaaggagccagctagaaagaagcttttgattagatgtacaatacattgggggcagaagatctgggatcaattaagatggagcctgaaggactatggaatcttgcttgtcaggaatgggcaagtctacttcctgccatttctgaaagccccgcgggaccagcttctaggctgagctgcctagtaggctgaagcttcaggactctgcaggtcaaggatatgtgatgagcaccggcctaagtgtttgctcttcagattcctaagtagcacaagactttatcagaatctataggcataccaacctggatcactcttccacccaaccgaggagtagatgcatctgaatcttcatatcggtatattaagtccaaaagatggtccgggctgcccctcacaaaagcttctgcatccacgtggtaagctcccatggatgacagggttctgtatgatggagactattattgctattgctgctaattccatgagctgtgaagatccctaaccaactcagctgtaacatatgcaattctgtggtgggaagaggctgtgtgtccaaggatggtgctgaaatcactgccttaaggtctctgctgtgcagaatgaggaggcccccgagctggctgttctaacttagaaggaagagaagactggatgggcctgcttgggatctaggcctcttctaaaccctatcctaagctccagttccatggcaaggctcagacttttaatgccatcttaatctgatggttgagcgcttcactctattttctggtgctgcccagccagtgccttctgccatggatgttactggctacttgagaaaaaggagaggggagaaccccttctttcattccaactgcctccgaccccaaagggattcttggctctctggtaaccatggataccaccatgaattttatttggatcctcagcaggttgattctggaggcctcatgctatgactttttatttctcttcctgggatccaccaccctctactctcagctgactgctgcatttaggccaggtctccaattgctttcctccagaaagtgtgttcccgtctagtgaggtagtattgaagcctcggctttccctctggagcctgggaccctgtttacagttgcacatctgggcccctcactgtggggattgatcattctcatgaaggaatcacagttatatggcaactgcagaaggctgagcctcctcatggtgctataaccccttgggacactcatccagacttctctgaag

SEQ ID NO: 6883 - DNA, 1114 bp, Homo sapiens
gagctgagtcccttaatttctggatgaagaagaccaacaagttttgtccaatgtatttgtttctcagaccttgcctaggcactaaaaataaaatactaggtcattggaggctaatgtgggacctgatgtctgcgtgtgtgtgtgtgtgtgtgtgtgtgtgtgtctccctctctcacacacacaagagcagtttgctgttgctgtttcctaccttctgaggcttcaaagtattttttaaaatctatgctttgtggcagctctacggtgcttatctctgtctttgtgtcaatccttaagtacccatgtctttttcatgtctaaccattgggaaggtagaggctggcagggaagacaaatctgctacaagtccatgggaagaccctacaatgaaatgttcattggttggtatactgttttagtcttgaattgccaactttccaactgatctatccatattccttaagtactaaagacaaaatagagggcttctttttctctcttaatgtcttgccttctggttttcctggtttgcaagactaagtgtacctaatctcaccatctcttcacttctagctctctgaaacaagggtcacactactcagagggataaccccttacagtggtctgaggagtaactatttcctaaagtattctaaaagagtaggaagagagaaatggtagcctgctgcttctcacagacacctcacatcctcacttgggatggcatccacatagaaaccctgcatttaggtaaaatttgcctgactgaaggggactcagtcctccaaatcaaggtcaagaagatatctgcatgagaccttaagaactctttattgccattatttggagagggcgggggaattgtcctaatcacacatttaacacagggaataagtgctgaagtgacccagatcaccaagcgcagttcctcatcatactttatttttgctttccttattccttggcactgactaagctaaagttaagaagccgacttcataagccaacccctgtgatgggatggaaaaatgggcttttgcagagggtttattaatagagatggatatactactcacaagttctggctcatggctccactgagaaggccatagta

SEQ ID NO: 6884 - DNA, 1138 bp, Homo sapiens
gaacttgggtaaagcacaaagaaacatacagtgctagtaacaggtctcctgcgccctggaactaagtgtttggaggaaggactaaaccccgggggaggtgagtataaaataattccactaagatcacctcctcagtccccagaaggctgatggtggatcctctggccatctcctgtggggtcttactgctcctctgccatttctctatgcctgaagacacgaagatgatatcaaggcagagctaccatatcgcagccagtctctaggctactgctgtgcagtggctcccactttctaatgcttttttgtttttgctttttctaacaaaacaatcttttttcaaaatgaattccaacccctgctagcttccttccccgcctccatactgttttaggcagcaccgtttatgtgacagagtccgtgtttctcaaatgcatggtgttcctcaggtggagagtgggcagaagtttttgcaacactttttttttaagttattgggtgcaaaatcccaaaccaggatatgtgtatgtctgtgtgtttatgttttttatttgaccctcccctctttcaacctacccccttttatatctaatgtagaaaaagcgaaattgaatctggaaagcaaactgttgtatatagttgcggtaacaatcatgaagagagagccgggctgtcccctcagtaattcattttaaataacaaattatttaaaaataaaattcatgccagagccagctgaagaggccttccttcatcaccactgaggccacccccaatctgggccctctgtccatctggcatgtctcctcccagcaagattcatctgttcaatgccatttgcgtttcaataaagttatctcctgtactgtccactggttctctagctccctctctgcctggtttctgtctccatttatcttgtggcccattccttgattggcaaggccagactgcttgtggtcatttgcctaacccagaagtaacctgaaaccctaagctagagtctcctgactcccatggttgggggtgggaggaacccctgctcgcacattatggacatagaatccttcaccggatctcaaaacatccagcccaaacatcaaggctccggagtcctccatctgggttgctgcagtgt

SEQ ID NO: 6885 - DNA, 1650 bp, Homo sapiens
tgactgagattggaagaagtagagttaaaagtttttactacctttgagaagcctgcgggcatgttcacagtcgtcccatgccagccaggttctgaggctaactgcttgtgcccctgctgcttcacatggcattgtgggagttgctgatactggggaaatgatggcagatctgaccaagtggtgctgagaaaaccaccctcggccttgcagactccatagtttatctcaaggcagtgccagtcggatttggtgctaaaggcataaggccaagtcagcctctgatattggcacaaaagaatggtctcatgccagtagcattgaactgctgagcttgggaaggcttaaggctcccacacacagactgagaatgatgggggtccctctgcgtctgctaattagacaaacattctatatctagtgccaaaagtggtcctaaatcctttggcaagggtcctttctgctctcatgctgatttgggggaggactgggcatcctgcctcaggagaacttgagtcctgaggaaagggccctagtaacacttaagggctacccctggctaacagatactcggctgtgggtgagagcagaaggtcttggacccctcgatgtgcaggtacttaattgtgtttccagtgcattttcatatacattatcccatttaacctttataacaggttcacagagtggatattcccattctgttgatgagaaaaagagtggagagactgtgtccagtgtcagcaggaagaaaaaagatctgttggaggccagtacatgttgacagaaactctagaccatattttgtctcctgtctttggccaaagagaactagcttcagtctgaaaagggcagggctaagtggttacaaggaactaaaaagttcaaggtaagacaaatgaggtaaaaataaaaaagagcacttagctgctctgagacattttagtctcctgactggtaaacagcagctggggcaccaaggggctcccaggagtttgtcgagcttttattggagtgaactgaaaggaaaatggaaggaatgctataagactgaaaagaagttaaagccctaggaaggaagctgataacacaagttacagacgtatatgtgacattgatttgggagaatgaacctacaacaaatgacccaaaagcacctaaataagagtgacgagagtttaacagacattcattatggacttcagagaaaatgatgctaaactggtcttagaatcttctttaattttgttaactaggtaaataatctggacattttagtcaaagcattagacagacagagaagttggtaactgaccactaactaacaaactataaattcacccattgtgggttgacctggtaagttcccccagggctgtgtccttggcccctcctttgatattagtgacagatgactttttttatgccttacccattccacaaaagaatttgaagccatttacacaagagatagtactagtaaattaggagtgctgatcaaatttttagataataagaaacccttaggaaggatgacaatttagaatccaaatttaggatccaaacaaataccattacaaactataaaaatgagcagaatctaaatgtaacatttcaataaatgcagattgataataacatctgtgcagagtt

SEQ ID NO: 6886 - DNA, 1458 bp, Homo sapiens
caccatgttggctaggctggtctcgaactcctgacctcaagtgatccgcccgcctcagcctcccaaagtgctggaattacaggtgtgagccaccgtgcccagctccctggccttaaaagtcatgtaatttaatgatcagaccccagtcacagccataggatacaaagaagcaaaggcaaagagccctgtgtcctgggcacggttacaggccagtgtagggaaagagcttctgcttgccagtgtgaagaacagaggagtttaggaagtgtgagtcaggctcagcttagtcaggcagagaccagtgggcatgggttacctgggggtaacgcgggccaggtgggcgggctggcagcctggggcccatttcctgccaaagcacctctgaccatccttctcttcacccaggtactactacaaacgggagatcctggaacgggtggatggccggcgactcgtctacaagtttggcaaaaactcaagcggctggaaggaggaagaggttctccagagtcggaactgagggttggaactatacccgggaccaaactcacggaccactcgaggcctgcaaaccttcctgggaggacaggcaggccagatggcccctccactggggaatgctcccagctgtgctgtggagagaagctgatgttttggtgtattgtcagccatcgtcctgggactcggagactatggcctcgcctccccaccctcctcttggaattacaagccctggggtttgaagctgactttatagctgcaagtgtatctccttttatctggtgcctcctcaaacccagtctcagacactaaatgcagacaacaccttcctcctgcagacacctggactgagccaaggaggcctggggaggccctaggggagcaccgtgatggagaggacagagcaggggctccagcaccttctttctggactggcgttcacctccctgctcagtgcttgggctccacgggcaggggtcagagcactccctaatttatgtgctatataaatatgtcagatgtacatagagatctattttttctaaaacattcccctccccactcctctcccacagagtgctggactgttccaggccctccagtgggctgatgctgggacccttaggatggggctcccagctcctttctcctgtgaatggaggcagagacctccaataaagtgccttctgggctttttctaacctttgtcttagctacctgtgtactgaaatttgggcctttggatcgaatatggtcaagaggttggaggggaggaaaatgaaggtctaccaggctgagggtgagggcaaaggctgacgaagaggggagttacagatttcctgtagcaggtgtgggcttacagacacatggactgggctgggaggcgagcaaaggaagcagctgagactgttggagaacgcttacaagacttcatgcaagcaaggacatgaactcaga

SEQ ID NO: 6887 - DNA, 1235 bp, Homo sapiens
acatgctgtggctctgtctctttcccagcacctgaattccgctactactcattcagggccatgtggcgcttgccagctctggacttcttgtttgtttttgagaaagtgtctcgctctgtcacccaggctggagttcagtggcgtgaccatagctcactgcagcctccaactccactcctgggttcaagcaatcctctcacctgagcttcccatgtagctgagactccaggtgtgcgccacccctcctggcatctctggacttctgatacccttaggtttggtttcttgggcctctctgctgccccagcacggccagtacttgcaggccttataagctgttctcttttctcctatcagacatcaccctacagtggcttattcaacactcgaagtcacggagaagctgagactccagcccttctccctcagaccagggaccgtcatcatctaaacctgaagccgagctccccgcccacccctgtcgtccccctaagcccacccctcctcacccagtgtgaggagggccctctggggaccccagagtcctgttctgctgaggtttgaactcctgtttttattgtaaaataaattgccccccattctggtcccctaacttctcacccttccccgctgcctttgtcccatcacccagccctgcctccctcccagcagccctgggccacagcccccgcccctggcttttccccggcccgctcttgtacctcccttttcaacactctctgttattgtcctgtgtgtacagtatatatatgtatatatattttaattttttaatttaagcaaagactaaaatcaaccatttgatgctgcaggggcctttcaggatctgggagggggcagtctggagagaaggagggagacgcaggtggacttggggcaagttcagatcagaagaggtgcaggctggcacctgcggcaggtaccagcctgggcactggtggccgcctccctgtcccgtgtgtttccaccgcccaatctggcttgtcctggcagtgcttgaatgccacaggctggcaggggcctctgggggcccctcccctcgacccccagcctgggtagagccaccaggtacgacgaccaggtaccagaaaccaccaggcacacggggcagaaagccagcgtccatgccccagcagccccctcctgcctgttcctggctcccagctcccgcccctccccagggcccccacctccacggcccacttcattttctg

SEQ ID NO: 6888 - DNA, 1200 bp, Homo sapiens
gtcccgcgggtagagggtcacgggacggggcggccgagaggcttgaggagggggtttgggcaagcccagccccacccagagggcttaacccctccttgccggaagaggaagccccggccctattgagggggaggggaggtatcccccggggtagaggagtcagctgaggcccttggctcaagcccagactcctccccaacttctccccgacccgcagtgtctagccgggggtccagggaggatcgcatggtaacgggagtttggagactccgtctggctcagaagtttgcaggagcaggtgctcccgacaagagaggatgaggtgtaggggcacggcccactggggccttgggagagtggctctaagggctttgggtcgtcaacactgaagtgggtgattgtaagtctttcagcgccaggggagtggtggggaaggagttaaaatctctctcaaaaaaggggaagatgagctccatgggtgtgagctgaggctgccgtaatggctgcggcctgcctgtcagagccaggctagacagggcttgtgggtcgaggaagcatgggacaggggctggggttgtccagggacctggccccagtcccaaagctgaggtttcccacaactgtgagttggccagatagtaaccaaagatactgatgagataggtcagcagaggaatgtatccagccggcctaggtacctctacctgtccgtgttgttgccccaccttgcagaagatgggcctcctcgacagttctcagcgtcctagaaggcaggggacgtcacttcattggacctgaggcatgaaggcagatggaaagctcgaggggcgggcatcctgtggttacacaattgaacactggcttcctttcccaaacatgctctgcaaatgacctctgccctttctcgacccagtgtctcctgtctcctgacctgacagggcaggatcttcaggccaatgctgcggttttggcacagtaattttcggagctaacacccctgggctctgtctgcctaggctctgcccttggggtcagagaccctctggttaaacttggcattgacttaggctcttggattcccagagcaggcacataacacctggactctgacctgactctgcaggcctaggtggcttgggttctaggcgtttaggtctgagaaatgcagctgggcctaggtatctcctcgttccccagggt

SEQ ID NO: 6889 - DNA, 1229 bp, Homo sapiens
tatcagacctttcttcttcagaatcaagtattctatttggatttagaatttaattatttaacattttaatatttcttcttaagtaatttagtttcgtcttacagcacaggaagatttcatgtggatgtctggttgataggagagttttatggaggcataatttaggcagatttatgcaaattttaatgcacactttattcttctattttcacacccacagcactacttaataagctccagtgtggcactgggaaagtttaaggctgcatgccttctttatgttacttagaaattctcttgccatccactgggagtgagaggatgggagttagtaatatgagtgtgaaagaaatcctgtttgttggcattgctctagtcaggaaatggggaagccttcagtcttaattattgaagtttaaggcacatagaaattaataatggaatatcttaactgagaccatattttaaactcaaaatagagacttcgctgtgtattgaatgccagatgcatgggtaaaatttatattagattgacagataatattgatcctggatcttgtctacgcaggtatttcattaatcacggagccagtgtaggtattgtcaatagtgaaggtgaagttccctctgaccttgcagaagagccagccatgaaggatcttcttctggagcaagtaaagaagcaaggtaacctcatggattggagggggccaggaaagattctcaaacactgccatttacagaaaataatccatttgctgtgcagagcatttcactatcacatgacaggagaggatttgatctgtctgcactgcattaatcattaatccagcatcatgtatcctcataataactcagacaagaataggccagatgtcaaaaggatgaccaatcattccttgtttttgccattcagaggttgcatacccatcatacaattaagagtgacctgatgaggactgtgtgtatgcacagtactgtgtgtatgcatggtattgggatacagtgtaaatttgagaattggctaaactgagtttgtgactttgcatcttttcccttgttgagagctaaaagtggtgctgataaagatatttattgtaactaatcatgagaattagtatgataatttgttaaggtgaggaagctaacttagaataatatattctaaaaatgcttattcttattttatagttttaggagaatcgatttcacagaataggatggaattt

SEQ ID NO: 6890 - DNA, 2439 bp, Homo sapiens
ctctctccagctcaaacttctttgcagaagttcattgtactacatgtaaaggacttacttaggacagtgcctaacttcatgtaggcactccataacaatagccatttctggctgttactttatctccttatttcttatttcctttatttatctatttaaagtattgttataggcatgtatttctgtaagaattctcaagtcctctttagaaagagggaataagccaacaggtaaaccaaatctttctttcctctagccttaaaaaggcaagagaaagtctttgttctcacttttttttttagaaatctctgctaattgtcttacatgtcacccaactgagaacttggaaatcaaactagaaggcttttcattctttacttctcatatttagtctgtcaccaagtcttgtctgtcattctccttaagaatccttcaattccatcttctcctctctttctgttaactcaggccctcctaactgggccttcctctcccctgccccacccaccattccaccatctacagtgcagcattagtgatctttcttatatgcaaatctcatccaatcactgactcctgcttaaaatctgagaatggtcctgcaagcaatgctgtcctcccttgttttgtaggatgtctctctctttttttttttttttaattatactttaagttttagggtacatgtgcagaacgtacaggttagttacatatgtatacatgtgccatgttggtgtgctgcacccattaattcgtcatttagcattaggtatatctcctaatgctatccctccccgctccccccaccccacaacaggccccagtgtgtgatgttccccttcctgtgtccatgtgttctcattgttcaattcccacctatgagtgagaacatgcggtgtttggttttttgtccttgtgatagtttgctgagaatgatgatttccagcttcatccacgtccctacaaaggacatgaactcatcctttttatggctgcatagtattccatggtgtatatgcgccacattttcttaatccagtctatcattgttggacatttgggttggttccaagtctttgctattgtgaatagtgcttcaataaacatatgtgtgcatgtgtctttatagcagcatgatttataatcctttgggtatatacccagtaatgggatggctgggtcaaatggtatttctagttctagatccctgaggaatcaccacaccgacttccacaatggctgaactagtttacagtcccaccaacagtgtaaaagtgttcctatttctccacatcctctccagcacctgttgtttcctgactttttaatgattgccattctaactggtgtgagatggtatctcattgtggttttgatttgcatttctctgatggccagtgatgatgagcattttttcatgtgttttttggctgcataagtgtcttcttttgagaagtgtctgttcatatcctttgcccactttttgatggggttgtttgtttttttcttgtaaatttgtttgagttcgttgtagattctggatattagccctttgtcagatgagtaggttgcaaaacttttctcccattttgtaggttgcctgttcactctgatggtagtttcttttgctgtgcagaagctctttagtttaattagatcccatttgtcaattttggcttttgttgccattgcttttggtgttttagtcataaagtccttgcccatgcctatgtcctgaatggtattgcctaggttttcttctagggtttttatggttttaggtctaacatttaagtctttaatccatcttgaattaatttttgtataaggtgtaaggaagggatccagtttcagctttctacatatggctagccagttgttttctaggaagtctcttattctctttagattctgcccagatcatccccttgcaacattttattcctgatactcctcagatttcctctccagagctatctctttgtggcaatttttgtcttaaattttaattatcagtacttaatatgtccagctcccttacaagatcttgcttcagaacagagcatttggaataggtaaagaagggtaaagtggtggctgggcacggtggctcatgcctgtaatcccagcactttgggaggctgaggcgggcggatcacctgaggtcaggagttcaagaccagcctggccaacatggtgaaatcctgtctctactaaaatacaaaaaattagccaggcatggtggcgcttgcctgtagtcctagctacttgagaggctgagtcatttgaaaccaggaagcagaggttgcagtgaccactgcactccagcctgggtgacagagcaagattctgtctcaaaaaaaagaaagggaaggtaaaatgggaaactggttgaatagaatgaacaaaatgagcacatgaaccagtacactattgacc

SEQ ID NO: 6891 - DNA, 1126 bp, Homo sapiens
cataagtgtcagctcattgttttcgtctcccacttatcttcccccttcaaagtgattttctttataagaaaatttgggctctgaatactccattctgcctcacttccttgaccttgttttcctctcttcgccctgacacctgcttctaatgagaaatgaagtcagtgcaaggaggaatgagaggtggggaggggagattgttgagagatggactaggaagtggaagcaggctggaaagacacatatggcgaaagtcaagtatctgaggccacttgcaacattgtgacaaagaagatggaagatagcagcctactgggctgtgagaatagtggtgaatttgattatttccagtggttagatttagcagagagatttactttcttagaaattaataggggaaatggcacttaatagaggtttaatggaatgaagtactttcaacccattgatgagagtcatggaagtttagagtggcaagacccagaggtcattaggtccagctttctattattgtgtcacagggacccctgctaccacagctttcacccatgggcatggtcaggtagcctctggtggctatgcatttattactcaaaagttgggcaactctaataacgagagagtttttcctcatatcagctgaagtctgcctgtggattctccttgtagtccagatctactatctgcaactctttaacggcacttgagatatgtgcagtgggtggtctccccctcagtcttactttgagctgctgttactctagtcctttaagtcattcctcatatggcatgcttttcttacctgtcacatcttggccatcctcctctagacaaaaccagcctttaaaatatcatgtccaggcctggaaagaatacaaatccagtgcaaaattaaaccattagttcttgatgataacctagcattaatacttacagtattttctttttgtaggagttttatcccttggttcacttgagtgtgcaagtcattaaatcctcatcattttagggttgccagtgatattcagtgtttagagtggttcattcccttaatatatactacctctgtctgttaattctttcctaacatgacatgtagctctccatggtcctccctctgaaacac

SEQ ID NO: 6892 - DNA, 1490 bp, Homo sapiens
tcgcccaggctggagtgcagtggtgtgatctcagctcactgcaacctccacctcccaggctcaagggatcctctcacctcagctcccgagcagctaggactgcaggtgtgcaccaccatgcccagctaatttttgaatttttttgtagagatggggttttgccatgttgcccaggctggtctgaagctgctgggctcaagcaatccacctggctgggcctcccaaagcgataggattacaggcgtaagggcccacgcccagcctaccatactgattttcaaggcagggtctaacccttcataagatgtgagttcttccaacccaataagcaggcagctttgaggacaaaaaggcaacattaaaagataagaccctagaagtcagaacatctgtattccaaggccaccccttctccttttagtcatgtgactttgggcaggtcaccctccctgtctgtaaaatgaggttggactggataatctttatgtgccctttccttttggcttaaaattctgtgatttattcattcttaggaagatcagcatatttattgggatttctgcttcaaaaattctttctaacctcaaaaatccaagtccagaattttttgttttcttctggatttaaactgtttaatatgagcacatcaaggttgacttctcatcctttttgggaagtgaatttaatattgagggtaattgaatgatgttgcaatggctttccctcctgctggcttggtaagaatattaaagcctgcagaggtggaaattggagctcatggagaaatggatagaaagcaatttgttgcaggcagcctttggacaagttgttttaataggaaatagacctgctgcttcataggtttcctcaaccacctttcctcagctttcttaaaatgggatctacattggctcttcacacccaaatagcagactaatcgtttttctgcttagcaccgtctggttcattgtcttgaactctgccttacagcagcaagaaaattttcctcgacaagaacctcaatctttagttccattgagctccccctctggattttggacttaccagaagtaggaggttctgataccattcaagatggtctttccttcaaagcaggtctgaagaggagactaccaaagcagtgtttacaaacccagagtccacacaaccatattgcatagaacagcacttggctttcacaagcctcctacaggacctggtgtaattggagtgaaagggcagagaccctggaagtggaggtggctgtgtgctgcgatgggaagaaggcagaaggcccaggggctttggacatagagcagggtggaagctgcaagtactgggaaggaagagagtttcacagaaacaaagctttgtcacacagaaatgagttctgtctcactggtgacttcatccctcaggctccagctgagcagagattttaatcagcttccttaatgggtattgacactgctcaggaagcagtagaccct

SEQ ID NO: 6893 - DNA, 1242 bp, Homo sapiens
aaaatgaggtctggcatatacttgattacaaatgaaaactcagaaaccaattttatttattaaatcatatcttttgtttttccccctcccttctaatcccccaaaggacctatttgagctgttccccaattcatctgcttattttggaccatgaatctgccagagtgatattttctgttatttctcctccaaatttttccctgatgtttccaataaagatttacttgggtggccccttaaggtgacatcaggatgctcttatgtccttccagaataagcatacacttcactcctctccctttcatctccctctgcattcttaattccttgcttttctcacttggagccgagggtgctttagagaggtggttttccatgaatcagccaagattcctgtagaagttgggtataccaaccaccaccaccaccgccccctattccagtttcaaagctcctcggctatgctaatgtcccctcagagatgaggtttgacttttaggcccgtatgactcctccatagcctggccaaggagaccatgagtagccatgtctggtttactctttatcctgagactgtttatagcttaaaacagaagtgtgtcttcccagcacaaacctaatcaatcagtgtatcagtgcatctggtggcaacagctcagcccattcaaagagcaaggattcaggaaaggcacactgatggtggggagcctcttaagagcctctaatgttctcccaaaaccagagttgagagtcggagtgccagtcgtcggggcccactattcctgaataagggacatgcaagggccagaagtagcttgactctcgcctaaatatctgtgcctttgcctgtcctttctcccactctactgaaacccggaacagattcccgcttgccttctgatgaagagaggttaggtaaagagagtttggaggaaaaaagacaccaggaggcaggctgcggggtaggagagggttctgagaggaggcagcaatccagaatacctccttttctagccagcatcccttgaacttttgaaaggttgtgcctaccactggctggcacaccagggcaatgatttccctgcagaaggaaggaaagaatgtttcacccttgcatccttcttggagaagctacagcctgtgctcagttgagtggttcacactcagactttggctttatggttttccttcctccttgtctttgccctgaccttgatcaacaggggtgaaaagaaccaccct

SEQ ID NO: 6894 - DNA, 1194 bp, Homo sapiens
aaagacatttcaagttatttgcaaagagtcaactgaggactttgtagaaattgttacttttcaaattcccacttcccagggccagcctccctctcgtcattgggctcagactgtggctgttccctaagcccagctctactggaagggaattcaagaatatagtccccaccaccaccccgccccgcccagcctcccagacaatgttccccggcaccaccacactccccacagttccacagcctggcatgtgttctcaggagatgtgtgggccccagcacccaccagagtgccaatctggtcttcccccaaccccaggagagaggggacctcagccccttttggtgcttccctgaagggagattctgggttagaagccagagcctcaggaccatctcaccaccctcacccaccatactgaccctcacaggcagctcccactccctcacccccacctcagcgcagcaaaaacaaccagagacaccccccacccccaggtttctttcagctcatttctttaataaggagacgcagttcattacaaaataacaatttgacaagagatcagacaagaacaagagtccacataagggagatggagagcattgccaagcagaagtgggaatgagagggccgggggcaagggctgtacatgtgtccttcctatggagacgaaggcagggctcctggtgggctgaccttggcgaagctaggctctgccaggccctgattttgaagttttcagccccagggttttcagaaagcagcaaatcaagtccttagatgggcaggagtcagggcagaagggtcactatctttgaagaggcccccctaaagtcctgatcgctaaggcaggtgggatggaggaactcctggtgccccatgcacactgctcccatcacctcaccagacagatgctctctcaactcttgcctcaatttgtctctgctgtgggtgtggagagtgggagggccccagagagagctggaggaagcaagacatgtcttcactggtccaagcacctgattccagcctgctctgaaatggtcccctccaccttccccactctttcagttcccagcacaaaggtccctgggacttctgtgtgcaacttctgttgtggtttgtgcagggcaagcctgcctcgccacctctggcctcctcgaatgcgccctgcctgattcccttcccgttctc

SEQ ID NO: 6895 - DNA, 3286 bp, Homo sapiens
ggtattggttggttaattggaagggtaatcacgtctttaacattcctttttccagtgatcctttggtagcattaacagtgataggggaaggaagtatgttaaacccaaactggttgtcttatacaagactgggaggggagtggttaagatgcagtatttttttcccgtgtagattgggggatcatctgatttctaatttacatgttctctttagcttcattagttttagtaataggtgacccataggcgaaaattgaactttcctatcttccacccagaatgactgttgccgagggaagcgagatggaattaacagtcttgagagaaaactgaagagacgcctggaaagagagggcctctccagtgagcggtgggaacgagttaagaaaatgcggacccccaaaaagaagaaaatcaaactgagccaccccaaggacatgaacaatttcaagttagagagagagcgtagctatgaattagttcgttctgctgaaactcattccctgccctcagacacatcctattccgaacaggaagactctgaggatgaagatgccatctgcccagctgtgagctgcctgcagccagaaggagatgaggtcagtgaggtttgggccatagaggacgtgctttcccttaactcagaaaccctgtaagctagacctcatctcgctgggtctttctcctctgcttatctgctttgagctgatctgaatggattgctcagcccttcccccactgatatctgtgctcttaccatcgttcctgggtctcctcccttttcttgaagaaactcttgttcttccctttttccttttcttgctcttccagctttcaccttcccggcgctaagaaggtgggagggatgctgatgtgatgccctttggcttacttatcacagggcagcgctgtcttaaccccaaagcagacacgacttgaagaatgactttgactcggttgctttggctagggggccagctacactcatttggcttagctgttgtgccagaggtcccagtggtgggacagtggctgttattggcaaacggcctgaatttcttgaggctggcctgcccaattttgaatccattttttcctctgaaaaccccatcttcctgctctttgtaaccaggtggactgggtccagtgtgatggcagctgcaatcagtggtttcatcaggtctgtgttggtgtctccccagagatggcagagaaagaagactacatctgtgtgcgctgtactgtgaaggacgcaccaagccgaaagtaaaaacacaaaaacagatacccccctacttaatgtaattcaggactccaaccaagaggatttcttcaaatctcagcaaagctacaggactggtactcaagccagcctgtaaacggtgctatttctattccttatgggatcatttttccaggactctttgaagaaaagaaaaaacaactaaaaaaatttttgacactttttgtattttttccttaagagctatttgtggttgttgaggtttgaaaagctgactgttttttttgcaggggttcccaccaatttggaaggcattgaagcttgcaccttttcatgtacagcattaaaattttacctctctctgggatttaccagcttaagagtccaactcacttccagtgcccaaaagggcacccaccagaaattccagtaaatcctcatttgaggaagctctcccttgtttactctgttaccacattggggaaatttttaagtttttcactttgggagtttttgtttgtttcttcttttcctttatccacttttcttcttcctggtagactaggtttatttatctgagcaataacttctatgttggtttcagtggctggaattaaaacaaaacaaaacaaacttccaaacagtgtgttggtgctttagcgattgattgatgtacagaacacaaatgtctagtttctagtgtcactgatgaactagtgatgtagaaaagagacttctctgtaagtaattgccacagctgtattttggctttctccctgtcccttcctttctcccctattttttggtagcttgtatcaaatgttacagtttatattgtggaataaatccttcgtcctaacataacactaaatgctgattatttagagccattagagcacagcttcttctgcccctctactgttgcacagccagaaggggctgcttgcttttgcctctgcccaaccaggttgcagtagcagtggatgttagcctgcaaacaacattaggggattcttcttttgtgtcctgctctgtttggtgggccatatgcctacagccctcactaacaaagaacccctctgtcttcaaggactagaacctatctttaaagccgtgctcttttaaaataagctttctcagaatgttggcaaatcacttcaatcctcaaatcagtcttccttgtggaatgctgcctttattatatttgaattgacaggggaacttggtttagggttaagacgttggaaggaaatctaaggaaaattaatcctcacagaggtccgggtttagtatatgtcttgagaggagacttgtgaattcccagactctgcctcctggtttcctttctcatttctttctaactgtagctatcattactggctgtggatagcccatagctattttccttgcttttcttttttaaaggggtctgttctgcagtggagaagacattctggtgaccagacttttgcttaccttttcctattctgttgccaatttttgttttccccacattctatagccataaacctgaagatgagtaaaactggtgggtctttaataaaacaacaacaaaaacagcagtttgtgatatagcagaggtttaaatgtaccctccccttttatgcacttcaaataattaaatctctttaagaatgacttctagttgtctgcagttttctgcagttgttgtgatgtttctcttcgtctgatggtggttctggggccaatagagaagaatagtctccagagtacaatttggaatcatcgtggtttggccttgttagtattcaaattcttagaatcccctccatcacccccgactttgagataggatgccaactgtcccagtcctcaccttccattgagaaattaagcttaaaaggagaccctgctgctaatataaagccactgcctttagagagcttttgccatcttagtaagcacaacccctacccccatccccactagtttttcttcttcacctgtgggtggtggtacacagtccctgacaatagcatctttgaggaagtcagatctttg

SEQ ID NO: 6896 - DNA, 1159 bp, Homo sapiens
gaaaggacacaactcttatattaattcatggtcaaaggagtgtttcccctagctcctttaataaaacactaaggaagataggaaagtggttatggatgatttctgacaggtcctcatttgatttactcaaaggggtacatatgtgttcatcgtattttaatcttcaataaggagaattagaaaaggattaaaaggctgtatgatctgttctcacactgagaaagtggcttatttcccagtggccttctttacatctctgaaatcagtccaagtaaaactggaaagattaaaggcttggtctttgggaagatatgagttgatttggccagttctgaaatgccaggagactcttcagtaggggaaaatcaagttgtttttttttttttttcccctggttgcctgcctgggtaatgcaagctactgtcattggactaatgggagtatttttaatcctgaagagattttattataaaacgttttccctccattaggtatctcaacctcctggcacaacatcattttctttgcctgatgactgggacaacagaacctcatatttgcactcccccttctcaactggacgaagttgtatccccctccatggtttgtattttgttattacgttgagggctggatagtaatgagtgatcttgtattactaggtttttattatagatgatcaagtaccataaaaaggactttatgctgaaatgtaggatataggctattatgtatttgcaaaatagggaagggatcctatttgaaggcttataaatgcaaaggaacagagaggaagactttatatccattgtcctcagggatgaaagggttcatgccacaccagctgataaacaccaagcttttaagtcagatgctaagtcatgggctctcttgttgcttcattacttaggagacttgtggagaatcttagggataatccacatttgctagagtcctgatccttagtcatagcatctcagtgtatgtctagtaatgtggttagagctccttgatctactcagactgttgacactgtggccatcagtctgtttctgtgctttctgttagaagtcatcaaggcagaagtacaatctcttctgcattagcaataaggtaaatgagaagaggattcagtgtataattaatactagtaatcaga

SEQ ID NO: 6897 - DNA, 1301 bp, Homo sapiens
gtgatggatctgaaaggggatagatgtggtgattggaaatggttttttaactgtgacagattttttgagaacttgtttactatgtgccaggcaaagagtgtcctatcccacatctcttacttgtcatctcaccctgtaaggtgggcactattatcacctccattttacacatgcagaaatttagccacaatggaatacatggcaccaggtcactcacagcttagtatgaggcagtcaggatttgaatacagatgatctactcaggatcccatgctcttaaccactaggactctgagttttaggggaaggccaagccatctcggacatcatccttgattgttaactctttttcagatggcaactcttggggaagctcgcctaagggaaatggaagccttgcagtctctcagactcgccaatgaagggaaattgctgtcgcctctccaagatgtggatataaaaatctgcctatgtcagaaggccccagctgcccctatgattcaatgtgaactctgcagggatgctttccacaccagttgtgtggcggtacccagtatttcacagggcctgcgaatctggctttgtccccattgtcggaggtcagagaaacctccattagagaaaattctgcccctgctcgcctcccttcagcgtatccgagttcgccttcctgagggagatgcacttcgatatatgattgaaagaaccgtgaactggcagcacagagcccagcaactgctttcgtcagggaatcttaaatttgtgcaagatcgagtgggctcaggactgttatatagcagatggcaagcctcagcaggacaggtgtcagacacaaacaaggtgaatctggactttccttgttgggttattggaatttgcaaagctctgtacctttctctcgaacctgtagctttggtgttgctattcccttggtgtgatcactttactgttaacagcacccactttacctgtagcttcccacttcaagaccatgcaggtataacatattcttttaatttcctctgctcctattagaagttgtttcccaggcactctttctatagagcacatatttagcttttcacagatacaaataattttttcatttatatgtatgctgacccatttatattttacatatacgtatatgatgtatctttaagtctttgcttgactaaaaagttttttaccctgcttcttctcatgtaagtcaattagtagaaagggaaaacacttcctgccttttatcgctttttgccctttaagggaaaatattttttggaagaagtgtttgagcactg

SEQ ID NO: 6898 - DNA, 1147 bp, Homo sapiens
aggcccagcacagtggctcactgtaatcccagcactttgggaggccaaggtgggaggattgcttgaggccaggagtttgagaccagcctggccaacatggtgaaacaccatctctactaaaaatataaaaattagttgggcgtggtgatgggtgcctgtaatcccagctacccgggaggctgaggcaggagaattgcttgaacccaggaggtagaggttgcagtgagctgagattgcaccactgcattgcagcccaggcaagagtgatactccgtcttaaaaaaagaaaaaaaaaacaacactaccaccaccaccaccaacaaaagacccaaactaggttctctgtttgtgtaatgaaggaacaaatgtcacttctacccccaatatcattggtcagctggcaggttagtcagcgtttgtgaatttagcatgttgagatcatggagtaatctgaagtactcaatggaccaatctgaattaagcttttcctgtttttcatagaagtgttcttttctctaaactgctgtaatttttcttgacttattaggctggaggacgtgtgccagtgttagacacactcatagaacttgttacacgaggccgatctatccccgtacatctgaattctttgccaagactggaaaccctagtagctgaggttcaggcttggaaagaatgtgctgttaatacattcttgactgagaattctccatattctctcttagaggtaagtttacaaccagctcatctgcaagaccttagatctcctagtttggtaaaacatgcagttcatcacatacaaagatgacatcacagattaatctatattctgtgagttgttcttcccgtaaagccagggagactcttctaattttctggtgaagcaacctttaaatgttttcttggttgatttagcataacagtatctaaagaagaaaattttttcctattgggtgaaattcctctgtgttgaaattggactcttaaacttggccgtgcttcgcccacctgaatttagtaagcctgataaatgatctcccccattttttaaaagtgctttaactgcactttttgtattttctgtaaacttgcttgtgcatcatgactgggatcaaccagtatatatcacatttttaacttgttactt

SEQ ID NO: 6899 - DNA, 1256 bp, Homo sapiens
caaagataaatagggcctaggctaggaattttatgagtctggtgttttgtttgttttttaaattttttcgagacagtctcgctctgtcacccaggctggagtgcagtggtgcaatcatggctcattgcagcctcgacctcccaggctcaagcaatccttccacatcagcctccagagtagatgggactacaggcgtgcaccgccacacccgactaatgtttatatttgtttgtagagatgggatttcaccatactgcacaggctggtctccaattcttagactcaagcaaggcttggcctcccaaagtgttggaattacaggtgtgagccatctacctggcccagagtctggttttagggttggtaaatgatacgtgttaagacccatagtgtgatgtttggtaatttgataataatgggtcagaggtgtttggaaatagaagaaagatgaatgttatttttttctttccgtgttttgatacagctgccattaggccgacagtgtgtggagcattatcgcttgcttcatcgatattgtgtgttttcccacgatgagatgatctgcaagatggcttccaaggctgatgtattagatgttgtagtggcttcaactgttcagaaagacatggccattatgattgaggatgagaaagctttaagagaaactgtccgtaaattggtaaggcttatggaaatccaactgcatgttgtcattgggtattatttagtaaaatttttacgcactttaatatcattttaagcagtctttttaaagcctattttctttgaggccattgtaatagatgtatagtagtatctcgtggttttaatttttattcactatcttatttgccacatgtacatatgtctctttgaagtagctgttcaaatgtcttgcccctttaaaaaaaatgttttgtagaaacagggtctcactatgttgcccaggctggtctcaaactcctgggttcaagctatccacccaactcaacctcccaatgtgctgggattacaggcgtgagccaccacacccggcttgccctttatttttttaaaacatttggtttttgtaataattctttatgtattctgcataccagtttttttttttttaaatcagataggtgttttgctaatgttttctcccagtctgtggcttgtctttgattttcctaccagtgtctttcagcaagcaggagtttttcattttgatgaagtccagtttgttaattattttcttgtgtgaatcatgtttt

SEQ ID NO: 6900 - DNA, 1164 bp, Homo sapiens
aaaacacagggacactggcgaccactgctatatactgtgttttttgtgttggttgcctacattgctctcagacaggtccagtgaaaagaatgaaaggatggactcaggtaatgtatttgaaagcatctcaaagtataaagcatcattgaaacaacaaaccttattactgtgctgttgtcaactgtacagtgctatacgtcattcagacacaactaaccattattactatacagtttatgttacattttttgaaacacagaaatatctcccggtcataaataattgctttccttggctcccttttacagttgtggcctggctggtgatagaggaacataaattccttttagacagtagaggtttcctgaattgcctaagatcaattatagaacattatagacacaatttttccttaggatgctgttctttgattcccatcactgagcttaattggtcacagacagtttgtgaggaaactcattttttctattccttgtatttccagatggtccccacagagcttgttgagaaagaattttggagactagtaagcactattgaggaggatgtcacagtggaatatggagctgacattgcctcaaaggaatttggcagtggctttcctgtccgagatgggaaaatcaaactctcacctgaggaagaggtaggcatataagtggcttggaaattgaggtatttattgaaattctgtttggttggcttgaagtaacttatgattacttttagcaaatccttaattaccagatttttaatgatttcaagaaaagtagaaagagcctacagaagaattctagtcctaactatgtcactatgttgtggtcataggggaaaattacttatcatcctttgccttcagattttataaccttggtttctccttctgaagaaaacctgaaggcctgagaccaggtctatttattttcaaactttaatatttttgagtatttttttccatactagcgaactcttaggaagagttctgtttctatcttggtaggaaagtgtgatttttttttttttttggtagttttctttgaaagtattacatatgatcagaaaagtacatagttatatgtatacagactgatgaatttccacaagctgaacacacccatgtaaccagcactaactaaaacaagaaat

SEQ ID NO: 6901 - DNA, 1160 bp, Homo sapiens
ttggtaatgtattacctggtatcttttttttttttctcctgagacagggtctctgtcacccaggctagagcgcagtggtgcaataagggctcactccaactttgacctaccaggctcaagaaatcctcctgtctcaattccccaagtagttggaactacagacacgtgccaccactcttggcctataaccttagcatcttgttgttttggaacctactaaaaactaggtctttaaataacaaactttaaacacatgacagttgagaaagctaggagattccactttagatttggtatgcatgaggtattgtgaaatatccttcatagaaagtgaaacatttttatttaaaatatcccttatagaggttgaagcatttgtagcaggatgtagagactagattatgtctcagatccatttcatttctagaattttagaaaatcaaataatagctcatgttcctttgttctgtacccacttttattgctacaggtggacctgtatgtctgtcttttatgtggcagtggcaatgatgaagaccggctactgttgtgtgatggctgtgatgacagttaccataccttttgcttgatcccacctctccatgatgttcccaagggagactggaggtgtcctaagtgtttggctcaggtaataattaatagtagaggtaacactagaaaaatttttttagggcatttttctttgcctttgagttttattttttattttattttattttattttttttagacaaggactcactttgttgcccaggctggagtgcagtggcacaaacatggctcactgcagcatcaacctccctggctcaagcagttctcccacctcagccccccccacgtagctgggactacaggcccatgccatgatgcctggctaatttttgtattctttgtacagagggggtttcaccatgttgcccagggctggtctcgaactcctaagctcaaatagtcctcctacctcggccttccaaattgctgggattacaggtctgagccatctcacttggcctgcctttgggttttagatttggcagtcgacagtaatgaggcccatgaagaaaactgggatggacctgaataggaaagaggtcttagaagtgagttccacaatgtatgtgggtagttaagaggcagaa

SEQ ID NO: 6902 - DNA, 1208 bp, Homo sapiens
tgaaactatacagttgtaaaatctagaaaacatattggattccttatttttttttattccgaacacttgttaaaaatgagatttttaatatggaaaattgttttgggagcttataaggggcctttctaacaatatggaccttccattaactgacagtcgcaagcacaaataactccaagtggttcattgggaatgccttgagactgttatggcctgttgtaacctgatgatgtcagcaatgaaaaatcaaagcaacaccacctgttaaaattttttttaatgttttaaacctgtatagatgtatgtatgtggttggtaactgcagacttgtctttatttttatttagatttttaaaaattgtaggcctgttgtctacataaatagttgtaaaatgtaccttacaaaaatccagtgaaactctctaagattaaaaaaggagggaatcctttcagtccttgcacaccggggaacaaggtcgtgaaaaaaaggtcttggtgaggtgccgccatttcatccttcctcggtctctgcacctttcgcagagcttccagcagcgctatgttgggctagagcatccggaggttcacagcctctgtggtccgtaggagccactgtgaggagggccctgggaagaatttgccattttcagtggaaaacaagtggtcgttactagctaagatgtgtttgtactttggatctgcgtttgctatacccttccttgtagtaagacaccaactgcttaaaacataagggtgtttcagttcctccatttaacagatatgaagagtattttaagaggtgcagcctctggaagtagatcaaactcgaactcatgtggcatgctagatatgtttgtcaataaacttatgatgtgaaaaaaaaaaggagggaatttatcagtacagttgttatttctagtgtttgcagaagccaaacctgaccacagacactaaggacaaggagtacaaaccccatgatattccccagaggcagtctgtgcagccttcggaaacgtgccccccagcccgacgagcaaaacgcatgagagcagaggtaagagcctcatgaggttaatttaaaaggaattctcaagccctaataccaatggctgtctggcactggatttctctcatgtgtgtgctctttgtagttttgaaccttgttaatctcacaaagggatgctgtttgtattccagcttttacactt

SEQ ID NO: 6903 - DNA, 1209 bp, Homo sapiens
ccttattgtaaagtggaaataagagtacctatctcatagggttgtgtgattaatcatgcgatgcaattagaacagtgcctaggatatgaaagtgccccaaaatgttacgttattattattattactactattgccttctcatgaacatgctatgtgtatgttcaagctgttatctctactggaaaatccttctccgtttccaatactctttccaaaaccccctcctgggttttactgcacctaccattgtgtactgacgtgattgaatgattggcttatgggactgatcctttctaccagacttaacttcttcagggcaggaactctgatacatagtaaatggtcaataaaagttggctcaactgaaaccctaaggataaactccatccacagcggaaggcgcggccccgcccgattcgggggcggggcggggagccgcgcgcggagggtgggtcgatgggggtggggtgggactctttttcctcgccgtggcggcggaggcgcacggcgtgggcttgcggcgagacgtcgtcgtcggaggctgaaaaagcccaaggtgctgccgttgcccgtacaactcggacttgctgttgctcgagccgcgtctgcacgggtctcggaccgagcggagctcgcagcctcggtcccggagcccaccttcgcctcgcccttgcccagcctgcggtgatggaggcggccaccacactgcacccaggcccgcgcccggcgctgcccctcgggggcccgggcccgctgggcgagttcctgcctccacccgagtgcccggtcttcgaacccagctgggaagagttcgcggaccccttcgctttcatccacaagatccggcccatagccgagcagactggcatctgtaaggtgcggccgccgccggtgagtcacgccagcaccccggatccagctcgtggctgggggagggagcggggacgcgcgggtccggggaggcccgaggcgcggggggcggggagccggtcgccccgccggcctcgtcaagtttggggctgcctagaaggtcggagttgaggccgggggaggaagacgggggcttctccagggtgggagatgaggagcgtgggagaaccgggggcttcggcggtgccatgggagggccgggtcgccgcggggctcgggcggccgggtgcggaggttcgggttcggttccggatggagtgatggcaggagccgggggtg

SEQ ID NO: 6904 - DNA, 1253 bp, Homo sapiens
gggagagagagactcatctgacacttcttttggaggtcaggatttgtatatcagaattgaagttagaattaagtgaattaaactgaatttgattgtgagtgaacctagaacagcactgaagtattacataacctggaagactgagaagggtatattatttgaaggatctttttatttccccgaggtctttcgcactggagacagcataaaagagtgaacaaatgttgggatgagagaagatgacatcaatgtgggagttcagtataactggggataaactagaagaacctgtgattttacagtcatcttattacctgccagggctcatctagccatggcaatgtttgccttgaatgggggtgaaagcctttctttgttggatcaaatactactacactattacacttccacactatttatttggggatgggctgggagtgacagtagcctagtagttcagctacctgattactgccccattcttttagaagcacatgtctgccaaggagtggtttgtactgctgtgtttggtacatctagtcttttttctgctataagttttccttacctgtcctttagtgtagattttattcatcacaggacagaataatcaaggacaaccaaaatccttttgttagtttcagtacctcagctatcaacatttctgagctaccattcaatgttcctctgtgtcatggagtgaaattcttgttttgtgggtattaggagtgtgggaatgtgataacctaaacaacctttgctctgaaattccatttttccctctttccctgagttgtattgacctacagagttaatttcctttgtatttttttaagaaaatattaaaaatcaacggtctcaaatgccgagagtttgtggctaaccaacattgcctttagtagatatttgggagggaaagatgtagggatcagccgtagctcctgtctcttcaagctgttcatcttgtgtgtttgccaactagttccgctatttctatgttagacacaggtaagaggtagccactttacactttggagattctcatcagtaaaatatttacctgatttgccatattcattagcccctctgacgcttggagttacttgaaaaaggaatacagaaaagatcttgaattcacttagcacgcgcttgaatttcagggtttcagtcacaccagtccttttttccatttgctttgaattgtggcatgtgatataaacagctatgcggaaggcctgcaaaactgaaacagt

SEQ ID NO: 6905 - DNA, 1683 bp, Homo sapiens
gcccaccatgcactttactatcgctgagggctttgtcaaggccaccacagtgggccagatgggctggttcttcctcatggctgtgatgtacatcactggagctggcctttatgctgctcgaattcctgagcgcttctttcctggaaaatttgacatatgggtaagaaatgaatcttccagcaggtcctgtgatggtgagtgaacagcccaaagttaaagggctgaggaaaaggtggtatgagactgggatcatatagtgtttggaggtacatatatgtgcattgaaggtaaatcatcaatattaacattttggtgtatctctgacaaggactgtgtttttaaaactttctaaatataccactttaatgttattaacaaatttgtttaattaaggataaactagaagaagcaaatgctttctcctacttgtttcttattcctccttgcattatcctaaaggctcttttctttttattcctacagttccagtctcatcagattttccatgtcctggtggtggcagcagcctttgtccacttctatggagtctccaaccttcaggaattccgttacggcctagaaggcggctgtactgatgacacccttctctgagccttcccacctgcggggtggaggaggaacttcccaagtgcttttaaaaataacttctttgctgaagtgagaggaagagtctgagttgtctgtttctagaagaaacctcttagagaattcagtaccaaccaagcttcagcccactttcacacccactgggcaataaactttccatttccattctcctagctggggatggggcatggtcaaacttagccatcccctcctcagcaaggcatctaccggcccctcacagagacagtactttgaaactcatgttgagattttaccctctcctccaaccattttgggaaaattatggactgggactcttcagaaattctgtcttttcttctggaagaaaatgtccctcccttacccccatccttaactttgtatcctggcttataacaggccatccatttttgtagcacacttttcaaaaacaattatataccctggtcccatctttctagggcctggatctgcttatagagcaggaagaataaagccaccaacttttacctagcccggctaatcatggaagtgtgtccaggcttcaagtaacttgagttttaattttttttttttcttggcagagtaatgtaaaatttaaatggggaaagatatttaatatttaatactaagctttaaaaagaaacctgctatcattgctatgtatcttgatgcaaagactatgatgttaataaaagaaagtacagaagacacttggcattcaaagatttcacatgtatggtcttgattatttgcacacaactccaaaacattaagtaagacctgtgataatttcagattctcctgaggcacaaatttgaatcataggcattgacaggctggcacatgcaggccaataaatggacctaattgaattcctagcatccattccccaatacagctttacttttttatgtaattgttgcatggattatctttttacatttttaaatttttttttttcatagagccatttgaaaagaacagaccatcttgttagagaaatcagtatgctatagtagtgttcaataattaggagattctcagggctgggtg

SEQ ID NO: 6906 - DNA, 1099 bp, Homo sapiens
ctttagagttgtgaattgtgctacaataaacatacatgtgcatgtgtctttttcatatgactgcttttcctttgggtagacacctggtagtgggattggtggatcaaatagtagctctacttttagttctttaaggaatctctatacccttttccatagaggttatactagtttataatttacattcccacaaggagtgtataagcattccccttttaccatatccatgccaacatctgttgttttttgactttttaataatggcctttcttgcagaagtaaggtggtatttcattgtgcttttaatttgtatttccctgatgattagtgatgttgcctgtagctctctgattcaaaaacatcaaccatcaaagtgtacacattcccttttttcttacaggttttttttattttaccctcctgcaggtttcgtgctgtttctctttttgggaatcttgaccatgctcagaccaaatatgtacttcatggcccctctacaggagaaggtggtttttgggatgttctttttgggtgcagtgctctgcctcagcttctcctggctctttcacaccgtctattgtcattcagagaaagtctctcggactttttccaagtgagttaaaagaacaccataggaaaatactgtgcactgttgtcacatcttgagatcccagtgcttactgggtgataggagctcatatcactcctaaaggtttcttgatatgccagaggaaaggctctctgttctgtggcgatagtggggtgatgaagcttttctcttaaacacttcatgaacagacttactgcatcctcttcaacagatggagagaccaattgtggaatatattttctacctgaaaagcactatcttttgtgaggcttagagtgccagtgcactggctgctttccaagaccttgtacaagcgtaacttactattagcccaagccaaagtagggtgtggtaaatagtctatgcttcattctgctggtgctcctacccagcagtcaagtaaagcttatctttgctgcccatgcattgctggaagctccagatgtccatcatcgtgtgctttctctcttgcccagccgtgagcctgag

SEQ ID NO: 6907 - DNA, 1267 bp, Homo sapiens
ctttctccagagcctttcagggccctccccagtctcatggcaccacacccccttgccagcatgtatctggagtattaagtactttcttctccccatacttcagattgggcctacagcaagggctttgtgactgccgacatgatccgggaacacctgcccgctccaggggatgatgtgctggtactgctttgtgggccacccccaatggtgcagctggcctgccatcccaacttggacaaactgggctactcacaaaagatgcgattcacctactgagcatcctccagcttccctggtgctgttcgctgcagttgttccccatcagtactcaagcactataagccttagattcctttcctcagagtttcaggttttttcagttacatctagagctgaaatctggatagtacctgcaggaacaatattcctgtagccatggaagagggccaaggctcagtcactccttggatggcctcctaaatctccccgtggcaacaggtccaggagaggcccatggagcagtctcttccatggagtaagaaggaagggagcatgtacgcttggtccaagattggctagttccttgatagcatcttactctcaccttctttgtgtctgtgatgaaaggaacagtctgtgcaatgggttttacttaaacttcactgttcaacctatgagcaaatctgtatgtgtgagtataagttgagcatagcatacttccagaggtggtcttatggagatggcaagaaaggaggaaatgatttcttcagatctcaaaggagtctgaaatatcatatttctgtgtgtgtctctctcagcccctgcccaggctagagggaaacagctactgataatcgaaaactgctgtttgtggcaggaacccctggctgtgcaaataaatggggctgaggcccctgtgtgatattgaaagggttgttgtgtctggggtccttgtttccaaatccccgaggacctagggaggaagggtttgccaccatgcaactctcccaggtgttccaaagaacctttgagaagttgtaccatgtgctgaaatgtgagctgccagcagactcagtgatcatctcagcagctgtctcagcagagccagagctccgcttctccctggaggctctcgaggtgggggaaggagaacacacattagaggggacatttttgagcccagctgcccctcacagtgttcccttgataggccactcttccccttcttccttctcttggcctatccttcaccatatttatccttcag

SEQ ID NO: 6908 - DNA, 1203 bp, Homo sapiens
agtattgaataagcaccggagaccctgagccaccgagtagcggagggaaagggtggcgcgcagaggggcccagccccgcctctgccggaccccgcccccaaaaggccccgccgccgccacctcctgctaggccccgcccccgacagacacccccccccccccccgccaggccccgcctcctgcccccccagccgcgaggtcctgcctcctgcccggccccgcccccggcctgccccgccctccgacccgccccgcggcgcattgtgggatctgtcggcttgtcaggtggtggaggaaaaggcgctccgtcatggggatccagacggtaagaccctcattcagtatcctccactgggggacccctccccatctggttctggccactcagctccggaccaggggctgtcgctgccgaccccgccccgcagggctctgggcccaccgtggatgctggggtcccgatcccgcacatccgggctcgggactccgccaggttacccctctgcccttggcatgcctccgcgctggagctcgggatcgccacccctgggacggtcaccacccaagccccgggctcttacccagcctggcggtcacgctgcctcctctacccacagagccccgtcctgctggcctccctgggggtggggctggtcactctgctcggcctggctgtgggctcctacttggttcggaggtcccgccggcctcaggtcactctcctggaccccaatgaaaagtacctgctacgactgctagacaagacggtaagttggggaagaaagggccagggtgaaggaggggaccagagtgctcctggcatggagggtacagcacccacggtggttgggatgtccaagggacgtggcagcgccaggcgcgcttggtgaaacacttgtgtcctccaccctccagactgtgagccacaacaccaagaggttccgctttgccctgcccaccgcccaccacactctggggctgcctgtgggtaaggaaagtgtggaatgggctcctttccctggtatcctcagaaggtgactcccctcctgggatctcatgaaacacgctgcttcaaccggtttgctccacacaccattccccttcccccacttggctctgcatcctccaagctgtgaggtgccactgggcccctctagagtgtggcttccatgacccccatccagctttaacactcaacagtct

SEQ ID NO: 6909 - DNA, 1124 bp, Homo sapiens
cttatgtatagttgtagtggtgaggagtaggcaaattatatgattagtaaaagggctagtttttgatgctaggtatggaagtgtagtgacaattgtaaactgtcaggctgtggtgggaaggaatgttgaagtagaaaggagtggagaactcactgtgagatctgactggagaacctggtggctcttcgccagtataggttcctccaggacaggttctttttgagcagctaaagcataatataccgataccaattcagagtttgctcttttgttcagtgaaaaagtgaggacttcaactttaaaaatggatggagaactgccggattacaaggcaaagacgtaaaagtcgccaagaggtcaagtagcactggggacaggctatctactggccagtggaatagtgcagtaaagttcatacagagaccaggagtcttagaaaactgacctagagcaggagagacaggtcacatattggtaggagtaatgtgtcatgtttcaggcactacacgctggatgcttccctgcctttgcgtctgcgaccagagtcaatggagaagctgcgctgtctccgggcttgtgtgatccgatctctgtaccatatgtatgagccatttgctgctcgaatctccaagaatccagccattccagaaagcacccccagcacattaaagaattccaaagtaagtgagaatttgtgttggggtttgactaatgaactcttgtatggtaggcctgttatcatggcttgtctccagcttccttgatggggaggggtgtaggtcccaggctgctaggggactaatgtaaacttcagggctcagagatttcacttctccaagacctttctgctgtgctggctggcttatcttaccttaaagctttctggtgcttttagtgtattccttattctttttattttaatgtatttgcatacattgtacattggaccactctagatataatggttttgatggtttgggctaggaagagcataactcaaatggtagacgtatgctgtaatttttaagaggggctttaaatcacagtacagaggtataacatgaacatctcactatttttctctttctaatgcaaccttgacatcagggattcccctttattgt

SEQ ID NO: 6910 - DNA, 1124 bp, Homo sapiens; identical to SEQ ID NO: 6909

SEQ ID NO: 6911 - DNA, 1849 bp, Homo sapiens
tttgttttataatttagagattaatcttgtggcctagccagtataaattagtctggactatttcatttcagagtgagctcttggaaaccaaggttgtgtaagttggatactgaatttgcttttccatttcagtttactatcaatgtgagcacggacatgcggcatcatcgagtgagactggtgttccaagattcccctgtccatggtggtcggaaactgcgcagtgaacagggtgtgcaagtcatcctggacccagtgcacagcgttcggctctttgactggtggcatcctcagtacccattctccctgagagcgtagttactgcttcccatcccttgggggcagcctcgagtgtagtccattagtaatcagattccagtttggacagggtggctggattgtatatctcgttagtaatgtacatgctcttcaggttctagggctcctgttaggggagggagaaatgttgaatcaagagggaaaacaactactatgatttataaacatattttaatgtaaaaatttgcatttaaaaggagtggccctgttttctgtgttaaaaccccatttggtgctattgagtttgttctttattcttttatcccagtgaaaattgttgatcttgctgtagggaaaaattaaactctttgaatctccaaacaaggaagtttcagcattcccttatggatcagaggaaccttagaggcctgaaattgttgcttccagtttagctgcccctcaaattcaagtgaatattttcccttctccctttacccttctccagaaataaagcaggtgacagggttttcagaatcttaccatattgacttgtgtatcttttttaaaaaataatttgtgatatttattgcatacattttcttttggcagttttggattttaggtatttttttgcatgaggctgataatggtgatgatgactttatacccttggtactatactaggaactttacatagtatctctacttctcacagtcttgcaaagtaggtgatattattcccattttatagttgagaaaacggaattagtgactgtacctataacaccagtaaatgcagagccaagattctgacccaggtctttttgttgtaccataagtttaaaagatgagtctcatttttcttgtggtagatggtggtaaaaaggagtaggcagagtgtacatagataaaaaaaagtaaaagggtaagtaaaaaattgattgtggtatatgttattctaatcagccaaaaaagtttagaagattgatgaaatgatcttttaaatatgtatttctgaataaaatgtaaaaccaagaaagttatttcaggaaggatagtgaccctttccttgaactgttagaagggcatttattaggctaaaacgtcattaacaaaatgcattgcatgttgaaaccagcctcttgaaccataagcacttagcgactttgctctgccctgtactgtgctgcttctgctgtcatcctgtgtgcctacagaagcctggtcttccgtccatgcagaaatgcttatgtcctcctgttgtttagatgactcctattgttcaggtgtactctgagaagagaatcacgtttttctgttttgctaaggagaaaaccttgctgcttgtctctcctcccaccctccaccatccaaaattaaccagtgagctggatattacctggatattgccaggaggtgggcattaagacagtattctttaaaagtgaaaatcttgtgaggcaaactgctaaattcacatttttgtttttttttttttaccatcttccctaggaatattcctagaaagcatctgcttaattttgctgctaacagctaaccttatcccacg

SEQ ID NO: 6912 - DNA, 1849 bp, Homo sapiens; identical to SEQ ID NO: 6911

SEQ ID NO: 6913 - DNA, 1162 bp, Homo sapiens
gcattgatgaatttcgtgcaggggaggaactcatcaactagaataaaggaacctttggacccaaatgcataattagacctttctgcagctcaggaagatgtgaatcagaagacagctagctggctgaggaggaggaggagggagagcacgcgaggaggaggttggggaaagaggaaggagaaagaggaatttgctgagacagggagaggtctgtgtgtgaaggaaaggggtggtctgggaacggggaggaggaacatggccacctctgctcagaatatgggagtgtcagcccagagaatgaggtccagctccttcttccccagtccacaggggtgaggggagttgtggagctggccacagacaggggaagctgaacggtttgatcaggggaagaagcattttgggtgaagccttatgattttcgatgctctccacacacgttggcacctaaacctgagacagcacctcagattggtttctggattacccaaacttgttgcctactgtgcactgtgggggggtgaccgggacttaaaagaattctaagattctgcctctggccacgaattctgaagggttctagcatcaattcaaggagatgtttagtagaagacagaactctgcatgttcccctttgtggttttgtgcaagtgaatgcacccagagaaggaggctcagagacacagctctcagtgtgtggatttccacacccctgacccaagccagggtcatccttctctctgagccttgtagcccacttgtgtttggggctctgggtttcctttgcaccttggcttggaggaaggacaggttctgtctaggattctagggtcgataacttgggtccatctggctggaaaacacccccaaggctgaggctcctggggagactctctgaactggggatgacccgcttgatgccattctctgagactgcttggatgcagggacactgagcagaagctccaggaataatggtcccgtcaggccatgggttgtcctctgccaaggagcctcctgctgcttctgttccccacccctgatccaggcaagggaggagaggcagaggggctggctgacacacacatctctttccttgtagttctgctaacagactccgaattcagtatgcaggagcctatggtgcctgccaagctgggga

SEQ ID NO: 6914 - DNA, 1217 bp, Homo sapiens
agaaaatagcttctcctacagtgattcatgtcccaggtccaggaaatccaatgttggtgaaggcagccactctcttgcttgtccccaaatcacctaaccctcatccagggctattttggtgggcagggactgcctcctcccggaattcctaagatccgcccagctgccaccattttcattgctttccccagcagcatgatgggaacccaagctgagggatacaggtcctgatttggtaggaatattattcccaagaaatacccgctcctcacctactccctcatcctaccaaggtgcctgaaaatgttcaagacttatgttcagggtgggatgatggaaccgagggcttcatcaaagtgagaggaaaggaaaagcatctggcatgtgtttcttggataggggccagtgcagtgccatcctacaggtggctggagcagctgctttgcaacctgatcaccttgagttctgagcagggactaggcttgcaggtgagataatgggccagggcacccagtccagaaggagcaatggcacctgggcagtgccagggcttaaagcccgctgctccttttcggtagaggagaggcccatcactggtgtggtggggtgggctctcccttaggcttgggcaaggcagccacctgcccttgctctcccttagtgttccctggcctccctgccatcaggttgctgggagtggagatggagggattattgagcagaaaatgagttggatggagataaacagctcccatccctgggtaatggatggtaagatgatggagattcctaagattggtggagttgggcaatgcatagccatctgactccttcagggtgctcttgatgggctggctgtaagggagactcagtcccagcctctcccctctacaactcctgccactgttggccatgtcgtaaggcagcagctgtgccaggatagctgggtccattcagagcaccttgagaagtgttgcagggaggtgttaagaagagaactctgtgcaaacagtgatggaaggctgttgtcttggtgtatcccttgcctcatagtcaatatattttttttttggcgagtcaccagtgacccgagccctccacaccagcctcctgtatctcatcaggtcccttctcagtactgtatttgctcagtgcatcaggaatgggtgtatgggtgtgtgtgggtgggtgtgagtgtgggtgtgtacgtaccaata

SEQ ID NO: 6915 - DNA, 2035 bp, Homo sapiens
gagcagcccctccaagaactacgtgatggcagtctccagctaggcccttccgcccccgccctgggcgccgccgtgctcatgctgccgtgacaacaggccaccacatacctcaacctggggaactgtatttttaaatgaagagctatttatatatattatttttttttaagaaaggaggaaaagaaaccaaaagttttttttaagaaaaaaaatccttcaagggagctgcttggaagtggcctccccaggtgcctttggagagaactgttgcgtgcttgagtctgtgagccagtgtctgcctataggagggggagctgttagggggtagacctagccaaggagaagtgggagacgtttggctagcaccccaggaagatgtgagagggagcaagcaaggttagcaactgtgaacagagaggtcgggatttgccctgggggaggaagagaggccaagttcagagctctctgtctcccccagccagacacctgcatccctggctcctctattactcaggggcattcatgcctggacttaaacaatactatgttatcttttcttttatttttctaatgaggtcctgggcagagagtgaaaaggcctctcctgattcctactgtcctaagctgcttttcttgaaatcatgacttgtttctaattctaccctcaggggcctgtagatgttgctttccagccaggaatctaaagctttgggttttctgaggggggggaggagggaactggaggttattggggttaggatggaagggaactctgcacaaaacctttgctttgctagtgctgctttgtgtgtatgtgtggcaaataatttgggggtgatttgcaatgaaattttgggacccaaagagtatccactggggatgttttttggccaaaactcttccttttggaaccacatgaaagtcttgatgctgctgccatgatccctttgagaggtggctcaaaagctacagggaactccaggtcctttattactgccttcttttcaaaagcacaactctcctctaaccctcccctcccccttcccttctggtcgggtcatagagctaccgtattttctaggacaagagttctcagtcactgtgcaatatgccccctgggtcccaggagggtctggaggaaaactggctatcagaacctcctgatgccctggtgggcttagggaaccatctctcctgctctccttgggatgatggctggctagtcagccttgcatgtattccttggctgaatgggagagtgccccatgttctgcaagactacttggtattcttgtagggccgacactaaataaaagccaaaccttgggcactgttttttctccctggtgctcagagcacctgtgggaaaggttgctgtctgtctcagtacaatccaaatttgtcgtagacttgtgcaatatatactgttgtgggttggagaaaagtggaaagctacactgggaagaaactcccttccttcaatttctcagtgacattgatgaggggtcctcaaaagacctcgagtttcccaaaccgaatcaccttaagaaggacagggctagggcatttggccaggatggccaccctcctgctgttgccccttagtgaggaatcttcaccccacttcctctacccccaggttctcctccccacagccagtcccctttcctggatttctaaactgctcaattttgactcaaaggtgctatttaccaaacactctccctacccattcctgccagctctgcctccttttcaactctccacattttgtattgccttcccagacctgcttccagtctttattgctttaaagttcactttgggcccacagacccaagagctaattttctggtttgtgggttgaaacaaagctgtgaatcactgcaggctgtgttcttgcatcttgtctgcaaacaggtccctgcctttttagaagcagcctcatggtctcatgcttaatcttgtctctcttctcttctttatgatgttcactttaaaaacaacaaaacccctgagctggactgttgagcag

SEQ ID NO: 6916 - DNA, 1192 bp, Homo sapiens
ggcggaggttgcagagcgagactctgtctcaaaaaaaaaaaaaaagtctgttttattgtcctatgaaaacataggtatttattaaaatgtgtcataatttttggctcagaaaacataataagtgaggccaatgagagatgcttttcataattttaaggtgcctatgggctgagagtccccttaggggaggacgggccaggaaacaccacctgacacttgctctgggccaaagccctcagggctgttctgggtccactcccctgctgccataaggacatcccctctgctcctggcttacccttgctacagggcttggaactgcttatgcccctgacgccttgaccgtgtgtataccttgattgtatatatctgtttctactttgggacttgagttttctggctccttccttggaatagctttccgcacaccttcttgtgcaaactgccattgttggtcttgttatctgactcagatctacctctgggactgccagctaagcctggcactgatagcatgcttctgttattgtccctgcctgcctccagagtcctattttgccaaaactcatggctctgatgaacacttgtggagaaaatgtggggattattggggtagaatacaaggacaaagctgccgattctctatttctggtgggttgtaagaaagttcaagactgacccctctgatttccaatactcttgcttatgtaggtaggtcttcttattgcctcttggaactctgacccatttcctgtttttatttcttaaactgggtcaaatgtacttctgttctttctcccctacgtgtagctcacaatctggacacatagatggaaacagctcatttatctttagtgtttgcagtttcttttggagcccagcatggctgggcatggtctgcttggtccttttgtccattccagtctttctggactcatttcccccttcttctgctccctggaccacacggtccaggaaaggattaggtccagtttattgtgccatttcatgcagcacatatgagcatggcctagtttccagaaaagtttcctactctggaaacctgggctgctacaagattgagcaatgtgtttgctccatctgggcacaactttctagcctaggtacccagaggctcagctggcaacaggagtcatgtctactagctcccatctgtctgaggcagaagaat

SEQ ID NO: 6917 - DNA, 1155 bp, Homo sapiens
acatggtccctgggagctgccccttgctaatctcagggcctcagggccagctgtcccattccaggaggccattcctaagacagagcagggctctggggctggaaacagttatgtgagcaatggagcatcccatcttggcccaccccaggtgtggggaattttcaggcccagttgagccaagccacagaatgaaggcaaaaaggcaaaacatgttttggaaggtggctggcagccccaactgtctgctccatgggccagggctccatgaaaggctgtggagttaccgaagtggtgcggggcctggggaaaggcagcccaggacagtgatggctctgctttcttagagaccctcagaaatgaaggctctctaccccactgtgcctcattcccccagtcatggtcagcctagcacttcaagctaaaatgaccttgttgggaagttcttccttccatctaccttgcctctctcatgctggaattcaggcttctttctatttagatccttgttggaagacagagaagcccttttccatcttgagtggaatttggatttgaggacagctttgggctccttggagacaggtgctgggtgaagggcaggtgttgtccttagcactattatgccattagcattactcatctgccgggctcctgctgaatgcagtagctctccgggcgggcagccaccctccctcctgttttttctggagagagggaaaaaaaggggaggtggggaggtgtggggaagtgtgggcagaaggaggaagggaaagacacagagagataaggggagccagcgacctctaagtccaggtttctggtgggctcccgttgctgtctctattcacagggagggtgggccaaggggaatttggttcctgaggctgttacactctgattgctgtggacctgagaccgtttccctctctcctccttcctccctcctcctcctccttcctccctctctggctctttctcttcttttcctctccctgccttttctttctccctcctgtcttcgtgcctcccacttttctcccattcctccatctgccaaccctttcctcccctccggctgtgcactctaagctccctccttgctctctgctccttcttcttctctcctctgtctttgggctactctagcggctgagc

SEQ ID NO: 6918 - DNA, 1164 bp, Homo sapiens
ttcatcctatgtagcagttgcaccagtcaaatcttcccccaccacttctgttcctgctgtttcatctcctcctatgggcagtgagtgatagtctattatgatgcatgatttgctaaaatgaccacaagagagcacgtggcatccactttaaccaaccatggttatcttttccttttggtttttccctttgatattttgacttaagggaagaaaaagacaaaaatcctactctaaaaccagactgtgtgcccttgtattttatttttgtaatgtagaaaagctattaaaccttaactgttttaaagacaataattctgttttctgattgttcctctgcattgctcatttcttccttttcttgagttttgttttgttttgctttgccttttttgtttgtctgtttgttgctttgctgggatatgttgttgttcctctcttctcctcctgctcctttgagtctgaactctacctcctaagcttagatgtgaggttaggccagaggaaaacccaagagctttctttacatgggggcaaagtttgggatcttttgaggaaaggtaggaagggagctaatgtgcccatgggtgtgttttgactagtggacctgtcataattgagccagtattaaacttggtcaataataatagtccatttggccaccactgtattgctgactggcaattttagcataaaagttgtagctggctgggcacgatggctcacgcctgtaatcccaacactttgggaggccaaagcagatcacgaggtcaggagatcaagaccatcctggctaacatggtgaaaccccgtctctactaaaaatacaaaaaattagctgggcgtggtggcgggcacctgtagtcctatagctactcgggaggctaagacaggagaatcacttgaactcaggaggcggaggttacagtgagccaagtggagagccactgcactccaccctgggcgatagagcaagactctgtctcaaaaaaaaaaaaaagttgtagctataggtgaagaaaagaaagtagttcagttcaaatgtatatggttgaacatccccgttattttacttttctgggactccggtttaaaaatcagttaatcttggctgggtgctgtggctcacacctgtaatcccaactttaggaggccgaggtgggcgga

SEQ ID NO: 6919 - DNA, 1280 bp, Homo sapiens
tgaagtgaacctctacctgaccatgaagaggcaagagcacagacttacaaggatttcaacttaagcttgacttggggtttgtagcgggacccagtcaaaccccattcaggtcatggtagaatctactccttggtagtcacttgtcatttttaaagaaatgatgacaatcctcttggcatcaccccaccccacattctccccgatgttcctctcctgaattctggattttgtcctacaagtctgtgccatttataagctaagttgagggttcagagggagacaaatatccccaagtgaaatatgttgcggtagagatggaatgtataaaatccgccagtagtgtgattgtttttcaatttttcccactttgaaaacttacacctaaaggcctgtaggcctctaactctttctgccctttcattcaaacctctccaaagttctttgtcttttgtcttcccttcctttccttttttttttttttttttatgatgattaagaaaatggaaaggatatggatgaattgtgtaaacttagatccttctcccttttggcccaaaagaacccttgatttagttccagaatccaaccagtttctttgttaaaagggtccttttgaagcaattaagtgctggtaagaatatttctctgttgttgccaggttaccttctgcttttaaattgccatcttgtaaagtgtatgtggttcttaagtgccagggagatcagccttgcccatgaaggttgcatatgtgtggtatacagtttttacctgaaagcctgagctttctcttattcctaaagtggtggcaaaagaatgaactgggtatgaccctgcccccttactgggcttggatattgaggaccagacgctgccaaatctaggacaagacagaccatcaaagcagacttttgtgggctcctctttggggtgaccactgctttcaaagccatctgccaaggctctccagggcaggacctgactggtggggaatgagtgttcagaagccttgggagaggccaaagagccattctagcatgatctgagaaaaccttcctgcagaggccagaaaccttgagcttaggtgcctggggaccagcttcgacattctctccagtttctgattctaatttttgccacgtgtcacaacttttccagtctctgagaaggtcccagcctttctcaaatattctgattttgaaaatatgtatccaaagtgggaggcccctgtgacattttgccaacttaaacgagaaaaagaccccccgcacccggcacactcc

SEQ ID NO: 6920 - DNA, 1312 bp, Homo sapiens
tttgtgcaaggatcttatttgtgatgccttccctcccctagaaagattttgtgcaatatattaaatggggacagaattctaaatggataaaacaatggctggttctagccctgagtgacagtcttaaggctagatccttcccatagtatcatctgtcctctggaatgactctcctgtccctaaaggggttaagagagagatcacctagaaatccctctggacacttgtgggttctttagggtttgagtttcttcttccccttgagcttcagagaggagagttggcatggttaaatctgaatggttacctcactgctgaaaacccagaggggcgtggcacactcgcttgtgtggaaaagcctctaaatgcatcccttcctttctttcctgcttcctttgccttacaattgaagcagcccgtggtaccatcacagtatgcagagacttcctcacctttcatatctagggaccacccccgatgcattggtgagggtgggcacttataaatgcctgctattgttaagccattccagcctcttcctctgaatagaccagacgccctttcacttagttcagtgccagtccttttgccttcccaaccctgctgttaggcctgctgttccctttgctcttgattaggagagatggaaggagatgagctcccataactgaattggcctttggttcatgttttctccccatatgtatatatgccatatgtgaatatgccatatatatgtgccaacaaatctatctacgttgttcttttcaaattagcacgcagataggaattttgagtttcttcttcttttagtaactagtataacaagcactggtatttttgtacaaaaaagaaaaacaaaagattgactattgtggtctgcatgacataaacaaacaaatggtgatatcaaagcaacgtataccccagtccagtgtgtgttgccataatttgcaattcagcttaacagtgcacccaatctatatttgcattttgatattatttaagctctatgtacaaggttttgcatgtatttatatggttcttagggaaaaaaaatgctataaactgcaaatctgaaattcaaatgtgttgttccactgagaccagaagaagaagaggagttttaaaagggataatttgttggagccaataaagctttttgctgatgaacagaaaccaatactgctgtgcactgagaataaaaactcatgcccacttgtaactgtgctgtcctcaatgcgtctccacttttgggtaatgccactgattgtctgttgaagttgagaagggaaatgccgcaaccacaagg

SEQ ID NO: 6921 - DNA, 2003 bp, Homo sapiens
gtgcagcattgaaaggccttaggctttcttcctggtagattgaactagtaattggttttaagtaaaacttcccccaccatgggaaattttattgctctgaaatcaacgaaatgagaaaaaagtacactggctggcattcctcctgcccctgtttttctgtttccttaaaaaccctgatgcttaattacaacttggcaaaaagaaaacccgtgaaattgttttatatttggaaatttctaattgcctcctcatactggtcagctttataatttcaaattgttgagtgtgatagtgttaccctttagaattggatcttatataaaagggaaatattagaaaacaattaggaaaatatacttttagtctttgaaatgcctgttttaacctttataaaatattataaaaatagattgtgtaggtactttcaaataatttatgggtaaaaacagactaaaatgtttgcaagaattggaaaaggttgaatgggaattgtaatgagagccctttgaacatgcttggaaaaacccagtagacatttcccaaagattgtttctgtaattttaggtaatctttttaaaaacatacttaatgacccattatactgtattaactgtgcggttgttttggccactgaattcttaatgaaaactaagcagtcggtatttttatgtgttaggaatcattggtgaaatgagtgaattgatctcattttaagatccctttctactctgaaagtatgtttctgagattgagtaggaggccagaaaatgatgacttttagtaaaagtctattaaaagtttcagactgaataactaatgtgagatcccaatttttcctttttttcattttagatttggggatattccctgcccaaaaaattcctggaaaattgactagtattaagtgtgagtaaaaggtgtccacttttttttaagttttgattttagttttgtcttggatagtatttggcaagatttagcctagaaattatgtagtatttattacataagaatcaaaattgctttgttactgggctggtttcaaagtttagaactcatttctatgtatcaaaatcgggttttttttggttttgattttttttttttttaaattcttaaatggtaaatatgccattgtgaaatgaaatctcaactccaaaagtttacccttttactaactggagtaaatgtatacttacaaagtctttagctgtagccattagtagtaaagaatttggacctaggctgcgtaagcaagcctttccagggccactatttaatggcaaaccagtgatactggtgttgatacaaaataagaaataaattttcccttagataaagctttctgtgttttgacagtgccagtttagaatggctataatgctgctctgccttctacagcttgctgcaccactctgtagttactctattaccatacgtttctatcttttttggttaaacactccctgatgacgatgatggatatatatacatacatccatattatacataatgatatatgtgtaaggatttaccttcgtctttattttgtgggctgggcaaaatttagtgtaacaataacttcatgatactttggtataagagtaagttctttatttttataatgaacccaaatctaaagtcttttatagtgcattttaaaaggggaaacttatccaaatgttatatttctatacatttttgtgtatatgtgtgtgtgtataagccagttagtatatatctgtatgtatattatatacataaaacactatatttttacatacaagtatgcttttattatacagataataaagatgggggaaggtttctgtttttttcttaataggtgaagaaatcttgaagaccagaaattggatcttactgaaaaactgatgtttttttgttttttttttaaattatattgttcagctatggaagatggagttttttttcatgatcctttaactctcaagttcatctttaaatgaactctttttttttgt

SEQ ID NO: 6922 - DNA, 1257 bp, Homo sapiens
ggcttggtggtgggtacctgtagtcccagctacttgggaggctgaggcaggagaatcacttgaaccctgggaggcagaggttgcagtgagctgagattataccactgcactccagcctgggtaacagagtgagactctgtcttaaaaaaaaaaagaaaaagaaaaaaaggaaaagaaataaatgttacccttttgatccttttaattgcctgcttaaatgatagctctctgttggactgtcttgatccaagaatagagagatcataagtcagtaagagatgaacttcaagtataatgacatgtttttctcctgtgaaaacagataaagttaataaagttggtgagatccatgtgaagacattagaagaaattcttcttgaaagagccagtcagaaacgtggagaattgcaaactaaactcaagacagaaggaccttcaaaaactgatgattctacttcaggagcaagaagctcctccactatccgtatcaaaaccttctctgaggtcctggctgaaaaaaaacatcggcagcaggaagcagagagacaaaaaagcaaaaaggatacaacttgcatcaagctaaagattgatagtgaaattaaaaaaacagtagttttgccacccattgttgccagcagaggacaatcagaggagcctgcaggtaaaacaaagtctatgcaggaggtgcacatcaagacgctggaagaaattaaactggagaaggcactgagggtgcagcagagctctgagagcagcaccagctccccgtctcaacacgaggccactccaggggcaaggcggctgctgcgaatcaccaaaagaacaggtaacaagagaacttggtctctagtaccacgtccccacataatattccagaggagtgttccgtgggatcttcctaggagttgtttgacaacctttctttactcagataacgttgaaaacactgaattaaatgaagtttttcagtagtgctatgtagacctatgctattttgttttattttatttttgagacagagtctcactctgtcacccaggctgcagtgcagtggcatgaccttggctcactgtagcctccacctcctaggttcaagtgattctcctgcctcagcctcccaagtagctggggctacagacatgtgccaccacaccccgctaatttttgtatttttaatagagatggggtttcagcatgttggccaggctggtctcaaactcctcacctcaagtgtgatctgcttgcttcagtctccca

SEQ ID NO: 6923 - DNA, 2391 bp, Homo sapiens
ttgctcactttgtgtccgtgagactaggtgattcagccaactatttttaaaacggcagttttctaataatcttttttttcttacagtcttgtgctgcctccaacccagtcctcttcagattcctcacccccggaggtgtctggcccttcctcatcccaaatgagcatgaaaactcgccgactcagctctgcctcaacaggaaagcccccactctctgtggaggatgattttgagaaactaatatgggagatttcaggaggcaaattggaagctgagattgacctggatcctgggaaagatgaagatgaccttctgcttgagctatcagaaatgattgatagctgaaggtggtagtgaggacactttaaaaaaaaaatcgccaaaaaactggacttagtttcatctattgtaacatttacctgagatgatcatttctttagtctagaatttgccccaaatcagaagtatacctctgaattatctgtatgtgtcctggattccttggggtcagatttttaaagttactttataaccattttgtccatttgatgccattgtttatcatcttttgagaaaaaagttctgtcatacccttctctccacaaaaaagagactgagagggagatcaagtgaaagggtgcaagcgaacttagtgactccttgaggtgtttgtcagttttggcttttttcttctttgttgtattctttatgtattgtcttgatgtacttaatattacctgagtttgaaatggatgaagacagctgctaccattaaggaccaaattttatgctaccactaaacaaaaatacccactcagtctgtgttaaattgtatgtctttttaaaggtatttaaagattcaactaagctttaaagagggctgagcagctcaggaagcctgtaatgtgggcataactctttggacctgatcttgatgcttctgctgctctgttagcctctgaagagcaatatctaatttattattactgtaattttttaaaaggctttaaagtgcctcaggggtcccctgaaactaattttctatttctgggattccctggattcattatatgagatggtgacatgattagaggaattcttttttagtatgaaaattgtcctttttcttcttcagtacttgcctccttgctggcattgaattaacacagggacaaaatttggttaattttttatttctaactctcccaacaaacccctgttgcccagtatttgtttggtggcctttaaccacctgagggaaaaaatgagcttattcaagctgccaatatttatctatgggctgtagcagtacactgaattgtactgtgccagggatattgagatgctctgggggtgtattgtatacctgccagttttcttcatttctgaattgagttttcttttcttgatgttggtttccttcatatcacctcaaggtttagatttgtgaaggaataagcatgatggaaataatagtcttgaaaggagatatgttgtatataatcaggaggaagaggaaggaaggacttacccattttgatattttgctgtaggtggccagttttgtttctcatagggaaatctgacccacctgtcatgttggctcctaaggaactgctgttgtaagcggctcatcaagagttgaacttcacgtagccttgttgggaatatggaaaaggaagaaagccacaggactgcccattcagtcttgggaagattgggatgattctgcacaagcaaaaatgactgaagtttatgtatagacacacctctaccaatccatcttcagctgactgaatgttgtatgatagcccttctccaaagcagaggtagaatgttcaggtttcaccatggattttctacttatttcgtttttggaatcagcttacagattccaggtcccttttgtatatattctttattcttttgcttttttaaaaaataattttgtttcatatttaaagcacttgtattagtcaatgtttcgtgttccgcattatttgaaccatttgcccttacagaaagagaaatacttgtttgtgttttaaataaaactgatgtaggaaagtcttgatgttgtgagctaagtaatcttacatcatcatatcagcctgggatccatcttgacaagagaccccagacagaatgctattggcctttcgtgtaagtgcccgaatttcagttattatttggcttagaaacctttcatctggatatattgccaaatttacaagtgtgctcaattttagctgcatatgctttaggtaagaatttatattattataatgtgaggattttttttctgacacggatacttactccttagtgttgtaactcaagcaatgccattaagtttttaaaaggagggagggtttaaaagtgatcttaggg

SEQ ID NO: 6924 - DNA, 1184 bp, Homo sapiens
agtgcaatggtgccatcttggctcactgcaacctccgcctcccggattcaagcaattctcctgcctcagcctcccaagtagctgggattacaggcacgcgccaccaggctctgctaattttgtatttttagtagagatagggtggagtctttaatatactaacagctttaagaatggagttataatatgctgtatttcccaaacttgacatacgactcatttccaaacttttattacaaattcagcattgggaaatgttgtatgaggcctattgagttgacttagtccatagaaatgatatttgtcatgaaatgtcatctacctatgttagtctcttgaaaagataaatgtattctaatggagccagaaagcctttcactatatggacacttgaaaatgttcacatatttttataagaaagcattttcaaaatattgttcaaaaactggatacaaaattctgagagtaaaacatctgagtgtgtggctattaatagctttttgttgtttttgtgttgcaggtcggatcatgctaaaaggagataatattactctgctacaaagtgtctccaactagaaatgatcaatgaagtgagaaattgttgagaaggatacagtttgtttttagatgtcctttgtccaatgtgaacatttattcatattgttttgattaccctcgtgttactacaagatggcaataaatactatgggattgtttgtattaaaaaatttacattgcttcttactattcagcagtagaaactttttacacagtaacaccattcgttgctggtatttagttttctgaagggtcgcagttgccttgagcacttggtattcgcagagcttggacctgtagattttgaggcagattaggaattctgcctgatgggtaagcttccagtattgggaggtggagaaggggagggttcagaaaaataaataagagttattgcactaacaaaagtcttcatcacttgtagttctggatgctggaataccagagtttctaacctaaatatgttgggtacattatttaatggggtcagtattgctcaacactctcattgagtcactgtgaggtctttgtgaattttatcgctaagatcagaatgtgagaagtatttggatatagggaaagaatgaagtgcctttcaagtacattaaaaatcagttaagagttta

SEQ ID NO: 6925 - DNA, 3441 bp, Homo sapiens
gaggaacaggcgcggctgagccggcagcacctggagaagtatcctgactacaagtacaagccgcggcccaagcgcacctgcatcgtggagggcaagcggctgcgcgtgggagagtacaaggccctgatgaggacccggcgtcaggatgcccgccagagctacgtgatcccgtgagcaggcccccccgcaggcagccaggagactgtgtgtacatgtgtagctctcatgagtggctgggtgtcagtgtgtggcctgcctttgtgtgtgaccccaggggtgctgtgtgtatgcgtacgtgtgtgtgttatctgtgtatagctgagcctgcacgtgcgacccgactgtgtatggctatgtatgtgactgtggtgagcactcagtggctgaggatgtaggaatgtgactggaggactggccacgtggacctggagaaagtgcctgtagatcccacggccgataaactcaatagaaattcagaggtgctagaaatcaaagtattcatcacacagaaaggttcctgacttgactaaagcaagcaccctagtctattcctttaaacaggacatctcccagggcatttaaaatatacaatttctgcctggtatagtgacacacgcctgtaatgccaacactttgggaggctgaggcaggaggatcccttgagctcaggagtttgagaccagcctgggcaacatagtgaaacctcatctttaaataaaattagccaggtgtggtggttcacacctgtagtcccagctactcaggaggctgaggcaggctcaggaggatcacttgagcctgggaggctgacgctgcagtcagctgtgattgtaccactgttctccagcatgggtgacagagcatgaccctgtctctaaatataagtaaacaaaacataaaatatacaagttctaaaaactggattcacacatgatcctccaagaatattatctgttgaacacatctatggccctaggtctgcaggtcatctgcagggtcgtaggtgccagtgaatttggccatcagaaagcaggctgggggcagggtatataagtcacagccaagagtgtgtggagtgggagtgcatgctctgaggaggcctggaggggagatgggtttggggttgaatcaagtgtgcatccatcaccgttccccttctctgccccacagcccgcaggctggccaggtgcagatgagctcctcagatgtcctgtaccctcgggcagcaggcatgccgctggcacagccactggtggagcactatgtccctcgtagcctggaccccaacatgcctgtgatcgtcaacacctgcagcctcagagaggagggtgagggcacagatgacaggcactcggtggctgatggcgagatgtaccggtacagcgaggacgaggactcggagggcgaagagaagagcgatggggagttggtggtgctcacagactgatcccggctgggtgggcctggccccttctcctctggggaagaccttgtcccaactcgatgggcacagccagccaacctaagactatgttggtacttggacttgttcgtgccccagagatgggcaaagctgtgcacttgcagatacattcatgaggggagaggcgccctcccttcctgaggagctgttggcctgggtgggcaggaactgcagtatggccatgggctgagcaggctgagcacctcagcctttagggcttatggccaggggacactgtatgactctcctctcctgcaggtgtctatccacctggggtatggcatctaccgacctgtctccctggggtcacatgctttgtttccattcttgtcctggctggaccagccactgtgggaccaacacccctcccacactcccccagactgctcgtctatcaccaggatcgctttgtactttgtgcaaaagggtctggctgtcccttgctgttttcatctctgccaagcctattgtgcctctggctgctgtatgtgtgcgcgtgcacgtgtgtgtgtttcatctgttcattcactgcacaagatatttattgagtgcccactacgtgccaggcactgttgctgagttcctgtgggtgtgtctctcgatgccactcctgcttctctgggggcctctttctgtgcttctctttgtccccaaattgctacctctttgtcagtctgggtgtctcaggttctgtgtgtccttgtgtgcatttctgtctctctctgtcctcgtctctctgcaaggccctctatttctctctttcttggtgtctgtcctttgccccctgtgccctctggattctctgggtctatgtaggcccctggtctgccctgggctcatcagccttcctgacctcctcctgccctccccttcactccctccctggctctgccagtcggttcccacggagccatttttagctctgatcagcatgggaatgtgcctcggcctccaaggggctttgtcctggtgcccccgcccctggtcccaacctgatcccacgagggagttgggacaggaggattgatggtgctccccttcctgccagcgtcagaggccctggagaggggctgtccatggcagctggtctttattcctccctcatgagcacagggtcgggggggtccccattcttggaagaggttgagaagactcctgggcttcagcctctcccacccagccctgcccctcacctgcctgccctcccctcccccactctatactagggactggatctcagcctctgatcagtttcacaaagtttgttccctaaggaaatcaaatcccattgtcacctaactctgaagatctaaatagcccttggatcagtatgggaaccccaaatcccacagggccagatgtggagtctgtgtctgcccccgtcttctctccatcctcaaagcccccacttctctccaggctgtttctttttttatgactgtaaacatagatagtgctttattttgttaataataagataatgatgagtaacttaaccagcacatttctcctgtttacactcgggggatttttttgttttctgatgacataataaagacagatcatttcagaatctggcccttgtgcaggggaggagggaggctggcctaagtccagaattcccaaatatgccaccagcctgggcaccactgtcccctggtggcagcctgcaggagcttcaggcctggggcctcagaggaattggcttaatgcaagggaatcccaggccaagcttgtgagtgacacatgccctccacagagcccacgctgaatgcccctaccttgacgaggtgaggccacccggatcctaagaaagaaggcagtagtaagagcactgtaataggagtcatgaagctcggggtctctctagaactggccacatggctggggttggggagtgggagccaggtctctcctttggggcctcattgtcctcatctgacaacaagattaaacct

SEQ ID NO: 6926 - DNA, 2285 bp, Homo sapiens
aaaaaggagatggagccggggacaggcggatcgcggaaacggcttggccctcgggcgggcttccggttctggccaccctttttccctcggcgatcgcaagcaggctcttctaagttcccgacgcctcttggcccggaaaactccgggaaccccacactgctttcctctgcccagcccgagactcgggtcagttactggacgaaactgctctcccagctccttgcgccgctccccggattgcttcagaaggtgctaatttggagccaacttttcggtggaatgtttccgaccagatggctagattttgctggagtctacagcgccctgagagccctgaagggacgggagaaaccagccgcccccacagcgcagaaatctttgagttcgctgcagctcgactcctcagacccctcggtcaccagtccccttgattggctagaggaggggatccactggcaatactcgcccccagacctaaaattggagcttaaggccaagggaagtgctttggaccctgcagcacaggcttttctcttagagcagcagctgtggggagtggagctgttgcccagtagccttcaatcccgtctgtactctaaccgggaacttggctcttcgccctctgggcctctaaacattcaacgcatagacaatttcagtgtggtatcctatttgctgaacccttcctacctggactgctttcctaggctagaagtcagctatcagaacagtgatggaaatagcgaggtagtcggcttccagacactaaccccagagagcagctgcctgagagaggaccattgtcatccccagccgctgagtgcagaactcattccggcctcgtggcagggatgtccacctctttctacggaaggcctaccagaaattcaccatcttcgcatgaaacggctggaattccttcaacaggctaacaaggggcaagatttacccacccctgaccaggataatggctaccacagcctggaggaggaacacagccttctccggatggatccaaaacactgcagagataacccaacacagtttgttcctgctgctggagacattcctggaaacacccaggaatccactgaagaaaaaatagaattattaactacagaggttccacttgctttggaagaagagagcccttctgagggctgtccatctagtgagatacctatggaaaaggagcctggagagggccgaataagtgtagttgattactcatacctagaaggtgaccttcccatttctgccagaccagcttgtagtaacaaactgatagattatattttgggaggtgcatccagtgacctggaaacaagttctgatccagaaggtgaggattgggatgaggaagctgaggatgatggttttgatagtgatagctcactgtcagactcagaccttgaacaagaccctgaagggcttcacctttggaactctttctgcagtgtagatccttataatccccagaactttacagcaacaattcagactgctgccagaattgttcctgaagagccttctgattcagagaaggatttgtctggcaagtctgatctagagaattcctcccagtctggaagccttcctgagacccctgagcatagttctggggaggaagatgactgggaatctagtgcagatgaagcagagagtctcaaactgtggaactcattctgtaattctgatgacccctacaaccctttaaattttaaggctccttttcaaacatcaggggaaaatgagaaaggctgtcgtgactcaaagaccccatctgagtccattgtggccatttctgagtgtcacaccttactttcttgtaaggtgcagctgttggggagccaagaaagtgaatgtccagactcggtacagcgtgacgttctttctggaggaagacacacacatgtcaaaagaaaaaaggtttgtttcttgtcttttaacatgcctgatatgttctgactgtttttatatgcttaaatatagcagcatgactttggaggcttaggagtgcatgtatttttgaggaaggcctctaaattcatatacttggattgagaaatatgtaaatgacccttctcctcctgtccctcaccccccaccccaatgcacattgttgctgtccaaaacgaacataccagtgtgtagatgttagcaggaaagtgccatttttatttgggttggtagttctggactgtttccttacaagcttcaatttttcacactttttaacggactattaaactttgtgtgtacacgatttaatttttctagagatt

SEQ ID NO: 6927 - DNA, 1158 bp, Homo sapiens
gcgattctcctacctcagcctcccgagtagctgggattacaggcatgtgccaccacgccaagctaatttttgtatttttagtagagacggggtttcaccatgttggccaggatggtctcgatctcttgacctcgtgatctgcctgccttggcctcccaaagtgctgggattacaggcgtgagccaccatgccccgccccagatggattttacatttgctcttttgtgtttcgctccaaagggttgtcttcctcgccaaaaggagggagggactttgaatttgatatgaatctttaaaaccagaattggctggatatttcccatgattgggaaaagagtgaaatgaggacattctgtaaactgtccctccctaattccaaggatcagaaactccccgttttgctgactcattccataactggagaaagaagctccattgaccgaagccacagggcagcatggaagtttaaattttctctaaaattaaaatgccaaggataaagctggctgcttccaggagggggaagaggagtggggagtgggcggtgaaacttttccagatgaacggaccataaatgtgttactggctttgtgcctgtagctcattttattatgacctatatgctcctgatttaaagagatctgtgtactgtttacttcccacttcccagaatcccttgtatctcctttctcgggaattgtattttctaataaatgacatttgagaaaaaaatgaaactataattttatttatttttttgacacagggtctctctcagtcgcccaggcttggagtgcagtggtgagatctaggctcactgcaacctccacctcccggactccatccatcctcccacctcagccttcccagtagctgggaccacaggtgcacaccaccatgtctggctaatttttttttattctttgtagagacagggttttgctatgtttcccaggctggtcttgaactcctgggctcaagtgatctacccgcctcagcctcccataatttttaaaagtaatttttagtagagccaaggtcttgctacattgcgcaggctggtcttgaattcctgagtccaagcaaccctctcaccttgtcctcccaaagtgttgggattacaggtgtgagccactgcacccagctgaaactatcatt

SEQ ID NO: 6928 - DNA, 1270 bp, Homo sapiens
gaggcctctcagcagcacagaccctggtgttgggggaccactgccctctggtggttctattgagcgtggtgccctcagggcatccgcaggaggggtagcagattcggtgcccttggcccatgcattctccatccaagatgtccctgagttgggatcaaagataggatttgggctctggttcccaaactttgattcatattggaatcacctggtgatctgtggcatagactgatgcctggcttccccagccatttggacttaactggtatcaggtgtgacccaggcatggcgagggggttcactcagcccctcaagtgggtgtcatatgcagcaaagcttgggaaccgctgaattgcagtgtgtgcagcactcccttgagggtaagggctgcaccccctggctgatgctgttctctctcactgccccctaccctcccaccaccttctcctttccgtgtgcccaccaggctcactgatgctgacaagaagcgcctgtgggagaagcgatattactgccactcggaggtgagctcgctccccctggtgctcgccagcgcccccagctgggagtgggcttgcctgcctgacatctatgttctcctgaagcagtggacccacatgaaccaccaggatgccctggggctcctgcatgccacgtgagttgtaacatctgccttttctgactatgtgttcttgtagaagccagggcacgacactgcccatcagtgatctgagccagccctggggaaaatggtaaagtgggtgtggatattcagggattttccatttctcctttttgctttttctttctcattttcccttcaatgttatattgtcatttttcaaacatacaacaaaattgaaaattgtacagtgaatacccatgtgcctaccacctagattctattgttagcatttgctctgtgtgctggattgtgtacatttcatttatccatcactgtatccatccatctatccatcttattttttatgcttttttttttttttttgagacagggtcttgctctgtcacccaggctggagtgcagtggcatgcatatggctcactgcagcctcgacctcctgggctcaagcactcctcctgccccagcctccaagtagctggaacaacaagtgcacagtgcacaccaccacacctgactaatttttaaaatttttttgtagagataaagtctcactatgttgcccaggctggtttcaaactcctgggttcaagcaatgctccctccttggcctcccaaaaatgctgg

SEQ ID NO: 6929 - DNA, 1261 bp, Homo sapiens
ctactaaaacatacgaattattgagaattgacccagaatatgtggtaccagtgagattgcctggacaaccttgtgatcacctattatggtttgtattgccttgctttgatcttaagggttagaccactatgttaccatcatttgcaatgctgttaatcaaactattatcaggcactatgtactagagcaagtaattctatagtttatacatggtaggagtgtttaaaataccagtaaatgcccatttagaaattcttttagcacaaggtcattgttcagatgcttttagagtcttttttttttcctgtcttctcatagaagacaatgcttttagagtttaaacttgataaacgatgatctgtttgtagtgtcattacttgctaatgaagtctaaacaagggaggagatttgagctctgccactaagacagatacttgatttctggttctttctttcttagaacaggaatttctttttacctattttataaagaagttttaagtattctaaagatagtcttagttattacgtattgtgcatagttatcattcttttcatttgacttctatagatgaagacttaattgaaaatttagcccaagatgaaacatctaggctggaccttggatttgaggagtgggatgtagctggcctgccttggtggtttttaggaaacttgagaagcaactatacacctagaagtaatggctcaactgatttacagacaaatcaggtaaatttcacatttgaagggaagtggttttttttcttttgaaagggtaacattcttggttactcttgaccacacattatattctctaagaattcttatttactcctatggcgttaaataccatctgtatgcatgtgatacccaaatctgtatctctagtccttacctcttccctaaatgcccaacttcagtttccagatgcctatttaactaacaactctacttagaggatttgacattgaacaatttcaaaatggagcctttggctgtgcgtagtggctcatgcctgtaatctctgggagtcccagcctataacactgggaggccgagacaggaggattgcttgagcccaggagtttgagaccagcctaggcaacatagacaccatttttacaaaaaattaaaaattagccaggcgtggtggcgtgcgcctgttttactatagtaataactgattcagccccctccttcctcacttcctgtcattcttctttgttcactacatgcgttttggatatactaggctcct

SEQ ID NO: 6930 - DNA, 1281 bp, Homo sapiens
gtatttaatagtgtgcaaaataataaattgtctctcatgaatgttgtagaaaagcatgtcatgaaatattcatagatgaatgcagaaggttagttctatatggagttcagaaagtgtcaggacaaaaggtttgggtgaccatcagtatttctcatatttctttaataaacatccttgaccattttaagggaaagaatatgtcagaactaatggaatgttttgtagcttcttagagtgtcacctgtagaagggaatttagggaatagattctatttacttgagcaactacaagtccttaccttttaaactcttcagtactgtttcttaggtgttatacctgatttagtgttaaaagagaaaagtccatgcctgacaccattatatccatccattagtttatccacagtaggtgtcaagtagatatatgttgaatgaatacatgtccactgaataaaggcaagatgttctttggcgatgtagtgtgacgacattgagttttgggttcatttgtgttgtttcaacatctctgataaacctctgaatacagaaactcatgtttgttttttttctgttaggatgtgggtactgccattgtttcagatactacagatgacttgtggtttttgaatgagtcagtatcagagcagttaggtgttggaataaaagttgaagctgctgatactgaacaaacaagtgaagaagtagggaaagtaagtgacaaaaaggtatgttgtggaaaaattccatgttgattctgtttgtgtgctcatagtatcatctgttgagatttctttgtatctgtttttacaacagattgctcacataatcccctttttaactttaattaatttttcaatccaattttaagattcacattaagtaatgttaaccagggctgccttaaaagcccctacttagtcaaaagcagtaagctactcttttttcccctgattatagcaacaagctaccttttctctccctttgctaacaaggtaaggtgctaatcaagcttgtccaacccacagcctgtggaccacatgcggcccagaacaactttgaatcaacacaaattcataaacttttaaaaaacattatgagttttcttgcgattttttttctccttttagctcatcagttatcattagtgttagtgtattttatgtgtggcccaagacaattcttccagtgtgacccagggaagccaaaaggttggacacccctgttgtaaatgaacagcagtctgtaggagaaaacttatttcttggaaatcttgatagcttc

SEQ ID NO: 6931 - DNA, 1099 bp, Homo sapiens
caagccggaactcttgggctcaagcgattctcttgtctcagcccccaagtaactgggactacaggcgtgcaccaccacacctggctaattttttttattttttgcagagacagggtcttgctctgttgcctaggccagtttcaaactcctgggctcaaggtatcctcctgccttggcctcccaaagtgctgaaattataggcacctggctgtaaaatagccaccatgcccagctattttctttaaagtcataaatatgggcatcttctctcttctgaatgcaaaatttatttggtaactcttctgggtgcttttctgtcgtttgtgctactactgaaatgccaactagaagtacagaatcatgtgtttggtcttgcatttaagctgtctccttaagtgctagagatgggagaagaatgtgagttttaaattgaagcagttgtcttttttgctttcagttaattagcctcatctaaaacaagtaaacattactaatgagatgtttttgccttcacaggtgattgaagtgggaaaaaatgatgacctggaggactctaagtccttaagtgatgataccgatgtagaggttacctctgaggtatgaatctttagcaagaactattttgcaccagccccatcttcagatgatgtaatcccagcagttcacttgtgttgaagagtgctgtttacccctcatttctgtctcccttgcctagttgctaagtgatgttggtttctttacatttttttaagagatttttattggaacttaagaagggaaggggataatttgatcttatcctctccctaccttgaaaaggatgagataaatgcctctgtgtgcctttctccctgccatcaaatctctctggagacacaaagttattcaaaatagtcttgcactgctttccctgactcaacacctctctgcaatcccaaagacagacccataggctatctaaaattatttgttgaatataaaaataatattgtcattgttttcttaaaaagaagcaaatggaaaacagcttaatttccacacagattagtattaatggaggactattaaagaagacttgatattccactcttaggttaat

SEQ ID NO: 6932 - DNA, 2272 bp, Homo sapiens
tgagccacagcgcccagcttaaactattttcttggtctgtttttgattttcttttttccttgccactgcggtacagattttttttactcactgccactaaactaaagcaaggcatagtttatatgtgaagtgttcagagtttactgctataaggaaacttccaaatactgacatttaccttttagctgtagttattgggaccatgtgctctggttttctggagactgccaaattgctcccatttttctgcatcccacctggtttctttctgcatgtcccctttcactttcaaacctcttcatttggatgttaaattatatggtcacctagttataggtaagccttgttcgagttgatatcttgattgtgaggaaggatctgtgtcattggagcttgtttctgctgcaacgtgctgtagactatgaataatgaaatcacaccacattaccatcagatttcttgttttagttgtcaaattaatatttatgattgttatcttgggcgaaaagttcagagcagagatgacaaatcattagaacaacgatgaatttcagtattacggctaaaaagttcttctgtctgaatattaactcactctccttccagtgtacttcacagtaattggtatgcttttttatttaatgcttaaatcaaactttataaaaatcttagaccagatctttaatatggtatgccatttccccagtctaccaatggaatagtatgggtttctaatcctaggcttgtacaatggattggagttgagccatgccagcctccacactgccactaacttctgtaatgtaagattgagtcactgccaagcatttgaaatatgcagttgtgttttaattataatttatgtatagttagatgtatgtagtgcattgtgtggtattatttggtttgtaagaatttatttttaagggtcaaggtcatttgtaacattttgtgtgtgtcaattcaatgcaatgttggctgccttttgaagtctttgatatattggtgaatattcttctgatctataatacaaagctatgtaatgttacctcttgactcgcttttgaaaggaagacaattgttaactagatatttgagttttttcccctcagaattatgtgaatttctgatatatggctttagatactgtgaatctgttttccatttagtcagttatctgcttaaattgttcagaactatatcctaacgagcaattagttctgatggttctcccagtcatgagtgtgcatgtgtgcaagcatgttttgatcctgatgctacctttgctaaaaatggccatagattaggaactagctatgtttttagaatcaaagatgaaccggtaagctgtctcatgtaccaaacgtgaaatttacagtgtttacaaatgtctggaattttgcactgccatagggaatgttaaggttacttggctggaatttatcagacttgtgagtaaacaagttgaagtttagcagatgagggggaatattgaggcccctaaggctaaacaaaataatcagtatctgagatagtggctaatgtggctccccaggcctaatttgggaacagtttttcctgattgctttgagaagtactttcttttgacagaaattttcattctgcttgccattgctatattctccctttataggagccattggatttctttccttttgtgggaaatgtcccattagcattttcagatcttttgatgtgcactaatgccattattggtaatgccgttattggtgaatacagcatagttaaataaactgttacagtaaatctacacttggatttgctgcacctctaccaatagccttttgaatgactgaaagtgttaacagagaaagaggcatgtctgcagaaagagatagctaatattttttggtactttatctgaaatccaagatgctgcttcccctgcaggttgttttccttcttacgatcctcattgaatcccctctgggagcacaggacagttagtagaactctccatttctttttttttttttttagacggagtctctctctgtcgccccggctggagtgcagtggcgcgatctcggctcactgcaacctccgcctcccgggttcaccccattctcctgcctcagcctccctagtagctgggactataggcgcccgccaccacgcctggctaatttttgtatttttattggagacggggtttcaccgtcttagccaggatggtcttgatctcctgacctcgtgatctgcccacctcagcctcccaaagtactgggat

SEQ ID NO: 6933 - DNA, 1320 bp, Homo sapiens
accaaaaatacaaaaaaaaagctgggcatggtgggtgcatgcttgtcccagctactgaggaggctgaggtgggaggatcgcttgagcctgggaggtggaggttgcagtgagctgagatggcaccactgcaatccaaggtgggtgacagagacgctgtctcaaagaaattgaggtcaggcttccttcttacagaattatttttttctctgtagtttgcctcattttttcactttcttttcaatgagaatcgaagtgtttcttttgggtttttttttcccccttttaaaatcaacaggaaatgtttcaaaggagggatgaaatgcttcttggcttcctcagcacttggcaaggtagacctcatagcaaccttgaatatgactttctttagtctctagctatgcactattaagtgcctcttgggtagaggtagagttaagtattgagtgccagtcttgacgtccgtatgcctcagtttttctcatatataaaaagcagtatacatacctacccttttctacctcatcatttgttgtagggattaaatccgggagagcaattctgaagcctataaatttccttgaagagatctaagaacctattatgctcttggtgtaccaagctctggggtatatattcagaatacctcatgttctggaagctgagcactagctcccctttattgcctgcctggcagagcctgtttgattactgcaggcccttttacccatgcttctagtttaggtattctttctttgatatgaggctcttgaccagaaaagagttctttctctaggtgttctgagagaagtttgtaaatttggatagtacattctatcctgataaaaccaccttgctgtggtcttgatgtacaaaaaaaaattttttttttgagacagagtcttactctgtcacccaggctggaatgcagtggcgcaatcttggttcactgcaacccccgcctcctgggttcaagcgatcctcctgcctcaacctctcaagtagctgggactacaggcgtgcaccaccacacctggctaattttgtatttttagtagagacagggtttcaccatgttggccaggctggtcttgaactcctgacctcaggcgatctgcccgccttggcctcccaaagtactgggattacaggcgtgagcaactgctcctggcccaaaacatctctttctacatacacttgagtaggtggcataaaatgcactgtcaatatatagaaaacatgaaattttccaaatatttccgatcagagaatcacaagagcagcaaatgtggtttcatcaagtgggaagaaagcagcaattta

SEQ ID NO: 6934 - DNA, 1241 bp, Homo sapiens
gctgcaatctgttgtgcgtttgtgggaagcagcctgatgtgctgaagagagcaccttcttgaaagttggatccatctgggttagaatcctgtggcttctgcttcccagctctatgaccctggacgtgtctcagtctctcattgagcctcatttcacttatctataaaatgggtttaacacacccagttcacagggttgtgaaaatgaaaccagctcatgcttgtaaaatgcttggcacacagtaggtaccaataaatattaaagaacttaaaaagtcatcttttaattatctacccaaataaacaggaataatgtgatggataatttaaagaattctgatagacttggtagggtattgttttttaaatatttgagaatagtcttcatttagttcagtaaatgtttattgaacatctactgtgcacaaagtacagggccaagtgggtctttcctggtgttttatgattagggtgaatttaagttgctggtgcattctctaagcatatatcatctgacagagggagagggagggcccttcggaaggctagtagcagagagggggtggccctcggtcaaccatgtatgtggatcttacgtggatctctgagaagtggctggccctaagagaaagatctgcattgtgaaggctctgtctggatggtgtgcagtgagatatgctgcccagcttctgagaaatggtgagtctgtttttagagctggatgaagcggatgattgatggaactagtgggtggtcgctccttcactttcacaagctgctactgaggcttgagggggccggtgaccacccaactatcagctggaagaggagcaaggtgcacctgctctcacctgggcatctgagcagatcacagctccctcaactagtgctgggagggagggaaggagagcaagagggagctaggaaacttggcttctatctctgccagcagatggacttctgcctgcagcaggagtctgtctgttcttctatcagcctccatgcagcctcctccaagacggcgcgacagagatgtgcaaacagaacgtcagagatagctggggccctggagagcatctgtcccactgctttctcactgtcctcattcacattatagcacagaaacacagtgataatggctcagggaccccaattgacccaagggctaaagggtcatgatctcagcacacctgtacccatttgttgctccctagccccacttggggagccctatcttagccg

SEQ ID NO: 6935 - DNA, 1245 bp, Homo sapiens
ggaatcttttctctgcctggtctcagaatgggactgccaactggctcattggtgggagacacagtatcctcaaacctgtggccactggcatgacagtggtgctctgtctccctgggtgacacccaccctaggcttcctcctggatgtgatggggattgccagagaggctcttagcataaaaggcattaggtgggcatttttctgtgtgcccccaaaaagctccatggaaacaggcacctggtagctgcggaacacccgtggacttgtgtatatggtcataggctttgggaagacaggacgtaaaggaaaatgagagaaacaaaatgggtcagatagctttggccacagccccaggcagcctttggggcctatgacacttagtgcccttagatgggatacatcttgcctcggccccaagactcctccaacttacccgtcccatccagggcctgcacagcttagagaggctcacagcttggcaaatgctagggcttcatcagaccactgacttgactcagtgtttgttaaaatggaaccactcccgttggcctactgtttctctcctgtacttcttgtaatgatagttatttattgactctggtagcaggcagttcttaaataaagatggtttctcaacctgttggggaagctggcacgagctgtgggtgttatcatcaggctaaagcatacctccttgtcctgttcttcactccagaggcttttatccaagaatttctttaccccccacacagtgaaatataagtaagttacaacatacagtctatattgcttcatccagtcccaggaggagggaaaaattaggccaagatcttaaggcaggtccaagcagagcacaggcaggcatttggctagaatcagttggctttacctaatacagtggcagtaaacaatgcttatgtgatggtactgcttcaaggtggcctgatttttaagacatctttgaggtgttgactcagtggtcccaaaggaaagtctccctgcagatatattaatgatacccaactggtgagaacgaggctgctgcctctactcttggttcacagcagccacaagggtgtgaattactagtcactttccagccacactttctcacacattcgataaccatttatcaaacttttttttttttgagacagagtttcgctcttgtcgcccaggctggagtgcaatggcataatctcagctcgctgcaacctctacctcctgggttcaagcgattctcct

SEQ ID NO: 6936 - DNA, 1237 bp, Homo sapiens
agatttcaaattttcagaaagggaacaacgaaggccctctcttcctctcataccacgttttgctcaagaagctgggctgtaacaattcagggttttcccttgttttcctctcattgcatgtttccctccaatattggttcattgtcatcaatcatggtttttgaagatagctagttttatccatctccagcaaagaatcatcaatagtttatattgctttacctgtgctggcttccagagatggaaacaaacccaggtgtctctcaacaagctacttttttactggggtgggggaatctatgcaaggagtaaagtaaaaccatccagaatcaaagcagcaaccacatagttcaaatcaaagatcaaggtgaattttttgtatcactgcctgtggaaatctatcctcatcagtcattgcatttttccctgcctatacctgtgctcctttttcttactgtgttttcagtcacttcctttctgtgaaaggttgcttagctttttttttgacatttgttgttctttataaaaataacagattggatagatgtgtacatttggtgtttgaaattctctgaaaatcccattaggaaaccaggtgtgaaaagggctcagtagcttctctgagtggcgtttttagctgactggaagtgcttaatctggatcgtcttttttttttttttttttttttcaatattttaaaaggagaatttaaatactgtgcttactgtgaaatatatcagttggtgagccgggcgtggtgggtcacgcctgtaatcccagcactttgggaggccaaggcgggttgatcacccgaggtcaggagttcaagaccagcctggccaacgtggtgaaagcctgtatctattaaaagacaaaaattagctgggcgtggtagtacatgcctgtaatcccagctacactggaggctgagtcaggagaatcacttgaacgtgggaggcagaggttgcagtgagtggagatcgcaccactgccctccagcctaggtgacagaatgagactctatctcaaaaaaaaaaaaaaaatgatatcagttggtggatgctcctataggtagccaaacacattgattacctgttagattttaggatagaaatcaaagtagagcacgtcagcaagagcctctttgtctcactccatcatttaaaaccagtatattcagtagttgaagaaagagctctccctgagtcagttgcaaaacgtctatatttttagatgc

SEQ ID NO: 6937 - DNA, 1200 bp, Homo sapiens
ctgttttcttttgactctaactataatcataagtctgtgcttccattatgaaggtcacattcctagcattcttgggaagtattagctcatactctcattcacatatgggaggttagatttttttcctctacccagagtccctttttagtttaccccacggcttagtttgctgtcagataccagttctctagcagattccccaacagttttttccccagtggggagggtggaagggagggactgatataagtaaggagatgagtagttgtgttacagttcattttctttaaaaaaaagtattttgagaaaaggtgcaaaatattcttgaaagtctctaggccagccaaagtccacatatggatatttggggatgttatttaaatactcagcaggctgagtgcaggtatacgtgtgtatagagtgtgtatactttgcttttgttttataacattgtcagctaattttggctttgttctttggcatccattcttattataagtgatggaatgccatgaaatgtactgtattgtatattacttgggaggacactaggttttcaaagaagtctggcagcacttgggttatagagggctcagcatgaccaaagtcctaaagattttacctcccagctttggttgtatgtgttcccaagtggtgaggtgagattgtggctggaggaagaaaaaggatggcatgaaagaatgacccttattgtggtctgtccttctaatcaacataattagggcagcttaccccaacatgaaaatgatgacctggccatttttaatggccagagcttgaagtctggtctctcattttgtttcagaaatgagtgagaggccttcctgcagagcagtcaggagaaatggtggagcctggggccctggaatggctgaccctgtgcctagagagctgatggcaagggctgtctggcatggctcatttgggtggggtttccccaggcataccttagttccctgatcctctgcaaagagtagctcattgactgagcaagcgcttcaggaggactgtgctggttgttcccagaccaaagagagtcacttttgactccatcaacttcaaggggacagagcctaggcagcagattctcctaatttttaacactaaaattcaaggaagcagtggaggaaagaatgcattactaccacagatagaaataggggactcatagaactctcg

SEQ ID NO: 6938 - DNA, 1118 bp, Homo sapiens
ataaccacagtttatttgaattaaaccagttagattattttctattgggttagaatgacactagaattttatccctgggcttgattacagcttcctgaccctaaaggcaggttcacaatgaagaatgttacagggccagcatggtggcttatgcctgtaatcccagtactttgggaggccacggtgggtggatcacttgagcccaggagttcgggaccaccctgggcaatgtggcaaaaccccgtctctaataaaactgtaaaaattagctgtgcgtggtggcgtatgcctgtaatcccaactacttgggagcctgaggcagaataatcgcttgaacccaggaggcagaggttgcagtgagcagagatcatgccactgcactcctgcttgggtgacagaacaagactctgtctcaaaaaaaaaaaaaaagaatcttacagaggttgcccacgaagttcccattcctcctgccttatctctgtctctgtaccttataggtaaacctaaactgggacaggaactgggccggggccagtatggtgtggtatacctgtgtgacaactggggaggacacttcccttgtgccctcaaatcagttgtccctccagatgagaagcactggaatgatctggctttggaatttcactatatgaggtgggtcctggcctcattcatctctatgagaaagatccagagaagaatctagaaccctggtttagattttgtaccaagagctacagcatggcctctctatatttagttttctgtgtctaacagacatgtgctccctttcaggcctttactgtctttgcttgctctttccccaccatcctaatttctcagactcatcattccatttaactttcttctttagtccttaagccttatcagtttttagaatccaggattcttcatccttgttgaagaggccatgctctgtctgtactgagggctctgtctgcactgagggccattacctctggacctgtcctaagcatggtctggaaattattgtctcatacattgtggcatggcatgcaggattagagcccaagccttgtagcccagatctctctccttccctccaggtctctgccgaagcatgagcgattggtgga

SEQ ID NO: 6939 - DNA, 1232 bp, Homo sapiens
tggagatggtgaggatgaaggctggagagtgagggaggaggctctgctggccgcagagaacacagggatgggagggtccctagccttcgggcacctccagggccagagagcaggctcagagcagctagtgtggagctcagcatccccaccccacccctcctccctgtagagctgatttgaggcctccttctggggctgggctctgcaggccaggtgggtgtggcctgtgttttcccttctgttctttctgcctgtactggatctgttattttcagggaaacaggccccagggcccccctgagcctcaccctaagcccttaggcctctgagagtgctgttgggttctatttatttatttatttgttcctttgttccctacccgtgcccccagtgtcttccctgctgagtaccaggagaggtcctgccccatcctctctctgaagccagggcccttccattccatttagcctttggatcatcctggctgggagaagtgggaccgagccacccagccccactatccccaagcagccctacagccgggatgggaggcacgtggcctctcttttatccgtctatttattttgtaagtgtattcgtgtggaggaggttgttgctttatttttttaaggctctggagtgttgtgtatggtttcttttcacatcccagcctcccatgggcacttctaagaagagaggggatttcttggaaaaggagagaggaatcccctagagcagggaaagcagtgcctgccagctgttgtgcaccttcctgagaaataaatatcctctaaattttcaaaccatcctgtctggtgttggttgattaggttgtgtctgtgggaaccaccacgtctctccccacacccaagcattctgggtaacacaggctaggcctctcctgttgacctgaggccctcttcctccagaatccgacaaggaacaaggcatggcctaagcggtatgatagaagggatgatatccaccccatccaggcctcttagagtccaggcaaaggcaattaggagagagatttccatagctcggagcaggtgagccaccagcggcctgaatggcagcagccatacccaagtgaggccacgagagggcagcagagtccttacgctaacactttctcccggtgcagccccaaagaaggcagctgctggagttagcttggttttctcagagccgtcagccagagcacagagcacctgctctccaggtgctgg

SEQ ID NO: 6940 - DNA, 1259 bp, Homo sapiens
tgggccagcctgcctatcatgatggcgtgcgtgcctgtgtgtgcatgtgtgtgtgtgcatgcatgtgtgtgcgcgcacgcatgtgtgtgtgcatgtgtgtgtgtgtgctgaggcactgggagctggctctccttctggcaggctctaaatgagcagggccacagacccacagtccagccccatggggctctgcaggcctagaggtagagggcctgctagaaacagaaggctaaacaaaaggctggcctgctcaccctcaccggagtccctcttcctaggaaaactgccttatttggaagacaaaagctcatttgttgtctcatccccacccaggagagaagggtccactccccgaagattcctcttgtttccacatagagattcctcacctggtacatagcatatattgggcttttatttgatcatcactgctcactttaagagcaggctttcgatctgtgagcccgcggagtatacaccatgagcaaagctcaccctcccgagctgaaaaaatttatggacaagaagttatcattgaaattaaatggtggcagacatgtccaaggaatattgcggggatttgatccctttatgaaccttgtgatagatgaatgtgtggaaatggcgactagtggacaacagaacaatattggaatggtggtaatatgaggaaatagtatcatcatgttagaagccttggaatgagtataaataatggctggtcagcagagaaacccatgctctctctccataggtcctgttttactatgatgtaaaaattaggtcatgtacattttcatattagactttttgttaaataaacttctgtaatagtcaaaaaaaaaaaaaaaaaaaagaggaggctttcttggctgggcgtagtggctcatgcctgtaatcctatcactttgggaggctgaggcgggcggatcacctgaggtcgggagtttgagaccagcctgatcaacatggagaaaccccgtctctactaaaaatacaaaaattagccagggatggtggcgcatgcctgtaatcccagctacttgggaggctgaggcaggagaatcacttgaacctgggaggtggaggttgcggtgagctgagatggtgccattgcactccagcctgggcaacaagggcgaaactccgtctcaaaaaaaaaaaaaggaggttttctcatggcctgcctctccttccttgcctccctcctaactccaaattttgtctgactctgacatccagggggatccaaggctgtg

SEQ ID NO: 6941 - DNA, 1666 bp, Homo sapiens
ccaggtcagaccggctcctgtttgcatgcccttgcttgctctgtcagagcagctctgggggacagcgactgtccctgctgacctggggtacccgtcagcccagcctcctccctgcagccccacctcttctccattctccaggacgagggaagaacaggcggcagagcatcttctgagccacgcccaccttgctgtggccaagggacaagagatcacatggagcacaaattcgggtaggatggagcctgtgtggccctcggaggactgaagaacgagggctgacagccagcctggaagaccgcttggcagcccttctggccacggctgtttcttctttgtgcttcccgtgtgcctccccagtagccctcacctgcataccaacccctcctttacccacgttggggctggcataagctgcttccctgagaggacatgaggggggggcggtcctcgtaccctctcccaccctggtgtttgggcacctgcgtgggatgcacacggatgacagaatcaaggcgccaggatgggcactctgccctggatacaggctctaccctcctcccccaggacctgcctagtgccagtttggtagtccccctttctggccccttggagcccacacacgtttcatctttttcccctctgagagcaagaagagacatggcatgttctctgggaccctggaatcctaggtacccacatgtgtgccaaagcctaccccacctggcaggtgtcccacagcaacagaaggaatagtagtccccactctttccatcagccctaccctaccctcattccccgacaccctctggcttgaaccatggctgagcagtgccggcatacgctttgctggcatgcttggatgcccagctgtgtccagaggtggcctgggaccgccagttgcacgcctgccacctcagccagcccccgcccagctcatcagtctgaatggagttgccttaaattggcaggtggtaccgtactcactgcccttggagctgtgaccggctcctgcctgtccaccccttcccgaggtggctcctgcttaccttatcatcccagggctctgattagccaggcctggtcagggtcctggggacggcacccagatatgcagagtcaccctgacactggtgccaggctgacctcagctcccgaaggctcgcacagcctccccatccttccttcccagcccttgtggctctgtccacctgatcccaataccagcttcccccagcccctgccaccccagagggcggccacgacagggagaggtgtagatgccaccatctgagggagaggaacgtggaacaggagcaggctctgatgctgagaggcttgcctccgggggctggaagcctgggtggccggggcccctgaagaaggctcccctctgtatcccccaggtctcctcaacactgggctgatcctgaatggcacaggccaaggggaggccagcctcgcctttctacccaggccccctgccctgcccacctcaggcccccaccctccactcctccccacggtactgtgaacgtcgtgtgactcagtgcagagacagataatatatttaattcatgtacagaaaggagcgagcagtctcgtacagaaaagctgactttgatagattgatgccaaagatggagaactgaagtcccccctccag

SEQ ID NO: 6942 - DNA, 1118 bp, Homo sapiens
gccatccacacttacttattgtgaaatatgaaaatccagagtggtttgtatgagaggggaaatactggctctaagctttctacagaaaacaggaaattcatgctgttgttgacataattttaaaggaaacttttaacaagaaaattcatgagggatacaatcaaacatagttaatctcttgagtgctaatcatttgagtatagtccacatcaggaagttttatgaggttgaaaactttactttgaaatatttaattgggagactagaccatttctttttccaagtcattctgatttattgtcctagtaaatgtatgtgtatgcatatatactgatgtattgactgaatgtgtgtgtgtgtgtgtgtgcgcgtgtaaatctgttttcatagggaacatacattgatggctcctagtctattttatactaaaacttaaaaaaatttgctgcactttgcagttgccactttttaaaagattaatgctttgcacatttcagtaggccttaaagatgaattgctcaccaacattttagaaatacactgcttacatgtgacatactctaaacaaagtcatagtaaactgttctcttaggttcatgtattattgagcaaataaggatgtcctttcttaaaatttctacatttatgtttgcttttgtgtaaaatctttattagtttgtaagtttctcaaagaggaggtttatactggaagcagtatttctaaagtacagagattcgaccatggattgaatacagtagtggaggaatgctggtattgtggcctaatttatccttttaaactgtatgtcattagtattagccaaaacctcagagtggagtgtcttgggctgaatgatcttctcaactttgccttgtttcccatctcataaaggctccttctggttcttttcccttccaaggattgtgagtcatgctcacataggcctgggatcttctggatggggtcggggaggaggtgggggtttcctgtggctggcccagagttctagccaatggaatcattcaagaatgcctaaagttcaggggtgggaatgccatatattggtgttaatcacttggcactttcttgggcaccaatattagcactgtttcatttt

SEQ ID NO: 6943 - DNA, 1366 bp, Homo sapiens
agaggcagagcttctctgcaccgggcaatgaggatttccagatgtcggagtggagggcaggcaggaaggaaggttaggagagcctgcgtggggtttgggccatcaggggccctgccttggcttttgttcctctgttctgtgcatctcttaccaccgtcttcattccccctgtgtcttttccttaccttggagctctgttctctctgatctgtgatattgagtttgtctgcctcttacctgttctaagaggctagaggagacctagacttctgggttcacatttgtccccgccctaccccgttacccttctcccactcctgaggaagggtcctggttagacttggaccaagtagggtctccatcttctctcctgctcctgattctcatgaagtcccattgcccctgggatggaggcaagggtctgttctcacagctggggtggtgccagtgctgggtacacacctgtcctcttccccttttcttcacccctctgccttaggtgttcctgcccaaataccgaggggacactggaggtgctagcagtgaggacagcctgatgaccagcttcctgccaggccctaagcctggagctcccttccctaatggacacgtgggtgctggaggcagtggcctgctcccacctccacccgcgctctgcggggcctctgcctgtgatgtctccgtacgtgtggtggtgggtgagcccaccgaggccagggtggttccgggccggggcatctgcctggacctcgccatcctggatagtgccttcctgctgtcccaggtggccccatccctgtttatgggctccattgtccagctcagccagtctgtcactgcctatatggtgtctgccgcaggcctgggtctggtcgccatttactttgctacacaggtagtatttgacaagagcgacttggccaaatactcagcgtagaaaacttccagcacattggggtggagggcctgcctcactgggtcccagctccccgctcctgttagccccatggggctgccgggctggccgccagtttctgttgctgccaaagtaatgtggctctctgctgccaccctgtgctgctgaggtgcgtagctgcacagctgggggctggggcgtccctctcctctctccccagtctctagggctgcctgactggaggccttccaagggggtttcagtctggacttatacagggaggccagaagggctccatgcactggaatgcggggactctgcaggtggattacccaggctcagggttaacagctagcctcctagttgagacacacctagagaagggtttttgggagctgaataaactcagtcacctggtttcccatctctaagccccttaacctgcagctt

SEQ ID NO: 6944 - DNA, 5977 bp, Homo sapiens
ttaaggatgttgtgcatattctatagcatggtgcttcttctttacaggtattactgctaacatcatagagtgttggtaaaaactgatgggaaatactgtagcatagtgtagtaacttatgaccagtttagaaactgagatagatttacctagggatatatgtgctcccttgtgcccaccttggtttttagtaagttgcatattgtctttatagattttattcttacagattgttgtattttgtagctgacttttattaaagacatttttttctcttcccttccccaaattatttttctattttcagtgacgccaagtccagtgaaaggcaaagggaaagtgggtcgccccacagcttcaaaggcatcaaaggaaaagactccttctcccaaagaagaagatgaggaaccggaaagcccgccagaaaagaaaacatctacaagccccccacccgagaaatctggggatgaagggtctgaagatgaagccccttctggggaggattaaaagtgatgatggtctggggagagattttattaaaaaaaaaaagaaaaaaaaagaaaaaagagggaggaaaaaaaagaacctacttaagatagaacatggttttggctatggcttgactcatgggctttcagtgcttttttccatttgttgaaagtaacatttctctctctctctctttttttttttttttttttaaagcaaaccattgtatgtgtaagtgtttaagttacctttttgtctattggtctctttgccagccctcccctttcccaatgaaagccatgtcaaattaatcactggattgactgcttcatctttttatttttaatgaaaggtgtaccacggttgtaaagcaataagatttgagatgaacactattgaaacttcgctttttgctaaaaaatagcaagttgaatagtaatcaaaaaacatagaaagattttagttcaaaatgattgctcctttctctacctggacttttaaaaaatcaattgtcatctaatatgagtttatttgtctatagacacaagtatcaatgtctaaaaaaaatcatgactttaaacttccaccgatgaggcaggtaggagataaagatgaattctgaactgttactaaaagtactcattttttaccttgtagggagggtgggcaatggggttacctgaccttatttgagggtatgggctttcttttttatttcatcacttgttatctcaaagagactcggagccagtgatccttttatcctgctacagtctttagggagctaaaaaaaaaaaaaaagcaggggctgccaaaactcttgatttcatatttccttctctaaatatatatgtatcctgttttttggataaaattttaccaagaatccaaaaaaaaaaaaaccctagaatttaatcaacaagatcagtctacaggtcacagtggatttcttttcaaactgacaatgtttaggttttaagcaaataaagttccagttaatgtgaaactcagtcacaaagagttgagatttttcctttatgaaatagaattgacattcttttatgctataaatgtgcattcaggtcccattaaccatgctctgcttttatttggggatagaacattttctttttcatatcccgatcttcccatttcttcatagaaatgtgataagaagtacatccctgtgatcctgctgcttcgtagagcaccactgcacaccctaccccgagtgccaaccacctctgctataggacactattttcctggccctattcttcacttacttcccatcctgtccttgactaggaatatgttaaatgctgctcccatacaattcagttagctcttgtctttttatttggtccaacccctgctttactgctcatgctgcttaaagcaggagggactagagaaacaaggcattttaggaggcctgtgtgcagttgaaaaccgacttttacacgccttataaaagcagtcaggagatagatccgtaggtttgatccttcacatctaataccaggcgctaatgggaacaaggtttaaagggtcctggtatgctaataaattgaaaaattagtgaaatttaaacttctgcctttttttcctgccttttaatctagatttgcttcctcaatatcctactttgtggtttactaggaacatgcttactctgatctttttttaaaaaacacacagtggcagagtcatttcactattgcactgtgtgttaaagaatgaataaggagttttcagttacatggccaaaaatacaggacttgaacataaatagcagttggatcattctctttcatgacggttaaattcagaggtgtgaactttgtaatgagggtgttaaagattaatctatttgcctaaatgggtttgttcaggtatccatttttaacaaagaagtttgtgttcatatagtaaaagacctatcagtgtttccaccatgcacttctattttttaggagtttataattttaagtcttacattcctagtaacatttgggcttttcttaggttatgtttcgtgaagatttggggggagggctcttttaaaacttcagcctcagttgtttaacagtctctttaatatattaatctgcactaacatctctgtgatatatgcacatattttagaggtaatcatgtcttctagattacttgtgtgcatttgattgggcttcttgtttagggtcccttttaaaattaattcattagattgaaaaatgtattctatatttctgatagactggacagaaggatctgtgtccccaagtgagacaggctctgaataacctttgttttctccactttttattgatgatttaaaacactctagtcttcccctcaaatcatgcatgcaaataggaggacagtggtggtgactcaactggatacaggtgctcaatagtcaggcttgatagtgatgtcaggacgcattacaagctgtaagccgatactgactggccattggcaccatccttgactaaccttcctctttttctctagtgtgcctatggtgaaatggcaatagcattcactgtcgtattttgcagtgctcaggaagtgggacgttaactttgaaggtgcttgtttgtattagctctgctaggtttacctctacaacgtagatttcagcagctatgctgactgacactacattctagttcttaagattttttttccagatccccccttccccagctagacatacgtagcatactttcatcttattcagtctttctgtaacctgctgctgcttttagtcctcctcacctcagatcggaatcaatggagtgggcccagaggatacattttaattccagtaatggtaggtagatttgtcctgctttctaaaacatctcctcatttcatatttccactccatattgattccataagggaaaattaatgggtgtttcctcctttagggaggtaatgcaaagagtgtggacatcttctaatcttgaggaacagtagttgatttcccttgaaggagcttacatattgactgttttcacaataacctgtttgccccagttcaatcctcattttaatacttaatttggtactggctcaaatagcattttcttacagataacaaatcaagagtgaaatttgaggttatactccagtaaagtttttaacacttgtgaatatggtcagctagactaaacttgactcttttttttaatggcttttttatctgtgaacattcagataagtggattttcaagtactggttggggatgggaatcgtgcttttctttaaacttcagtttacgagatgctttgagagcgttaggcaaaagcagaaataaatatcaggagcaacggggaaagctttataaaagatcatggtggccactgttgcagctttgaagaatgagtgctggcttgaacagttctttgcctgcatcattggtagctgcactgaaaggaaaaaactttcaccttaagaatttgaaaaggaagaaacctgggctctggtcttcatggcatttagactgagatgcttaaacagaacagaagtaatacgcatttcctgccataggatagggaaaatgtaacaagctggttgctcttgaggttagaaaattgtctgtttctctgtggatgaagctggatttacttgaaaatggagagttggcttattgtttgaatattgggacatcaagctatctatagccaagtttcagtcgcaaccagttttccctttgtctggggtaaattcgatacaaaatgattctttttgaatcctgaatccataaattacacttttttttttcaaattcacaaaattcacagtggtgctgactgtgtaataaccactattgggaaacatcccgtaaacctgcctgttgccatgccaatggagtgactgaactggtgacatctgtttgagcatgctttgtgtggctggtagaatgccaccgttgtgcatacactttgtacatcaggggtgaagggagggttttctagattattgggggagggtaaaattgggatttttttgttgttccttttttgatggggtgtgggggtatagtactcagcttatgccctaaaataacatgtataaaaacccctgaagtattgtgtgggtgtgtacgtgtgagtgtgtgtttgtatacatctggcaattaaagctttgtcttctggaacttagtgaattcttttctctttttcctccagaagtatttgttacaagatttgtaaataagagctctacttagtttgtttaccatgaacatgttgcagcaaaccttatgcatctaattcctacaaggttaaagaaaggcttttagacttgccaggttaagcaacagccaagttctcagtaattgtttgccttgatttatcttttagacttcattttgccagctctaaaactcccagtcttccttgattttagtccttaatcttttatgttctgagcaggaagggtaaaagacaggaacctgcttcactgtattaactagtccatgggctgagaccggggcatctcttttcttcatactgcaatgttgctagatacatgatcagacaccagagggttgggcattcttgcaataccttaacagtgctgaaatctgcagcatggtactaaggaagttaaagtttgaatgtaaccactttatttaaaaggtttttttctttaatttaaatgaaatggggttgaagtgaacatgattttgttgaccatgttcgtgaattacagatgcaacatgcattggtagaatcgtgtgatggtcttttgtgatacttaatttttacatatcccagtctctgtatgtatctgcatagacaaagaaaaaacaaactcctgctttgcttttattgaagggtttccaggactgcgtgtctgctcctgagctctgttttaagtatgtgtatcctttgcttgtattttgtattaaaaaaataagaaaaagaagcctttattgttgagcatgttggcattgtcccctttatttttttctctttttgggacatatgaagcaagttattctttttctgtatctttttttcttttgtaaactttttttttgttttgtttaaaaatggctttataaaagggcttttataacccagatgtgtgctctgtgtacttcttgtaataccttaaagcaaacacactaacttacacagctttgttaatcagctcccagttcagcctgactttgtgggaacttatttccctaataaattatttagaaactttaacagtgaccatccctgttgttggtaaaagataaacatgtcttggttcaaaagttaatacctcaggatggaatcaagaagcagtagacttaccagtttgattaattaagggagcactggactgggtgcgtaaggattcttaattagcattttttctcatgtttacatccaaggttatgaagtgttgtggaaagcaaagtttaacaatcatatataataaaagataatgtttatactcacagaacacacttgca

SEQ ID NO: 6945 - DNA, 1628 bp, Homo sapiens
tgataagccagtggtaagggaaacacagctctaacctcacctcattctccaggttacaaaggccatgtgcccctttgaatctggcagagaaagtttcctcgttgtaagtatttgcatctacttcaagccagattcttctgcctctttctcctttccagacccctactctgtgcagtgctgaccacagctagagccaccgccccattgctcaaccagtatttatttccctaaacgacccttcctcacattcccttccctccacctctccttaccaagcacccaaaagaggatttagaactagcagggtggacatcatctggttgtttctacttttctctgcctagcacaaaattgggagaaaactggagcctccatccgcagtcacacgtgtacagatctggggatttggatgtaggctttttctaacttctctctcagaagcttctacagaaacccttccatctgtagcctcaagggcccacctccaagggaaggcttaggcaatgatcctgtttctaccaacactgcaccttatcccaggaacctgccctagacctccagagaccatattttctctccctccatttctacccagacctccaggcctccttctggaatcatagaaccgtagaattggaaggaattttagaggttttctagttggagttgtgtccaacagaattcattaacaccagcctgggcttgtttttcctcctccctctggacttttttcatcttttcctccacctcaaaaaatacttacacacagattcttcttgtacaggcatcaaaaccaactcctctgcccctaaggctgtgtccctgtggtctccagccacccctaccccagtcactcgccccttcctcatctctggaatttggccaggcagtcccagaagactctggagtgacctcctttgcctaaaaagcagacagataggcatgccccaggccctgagtgagcagaggaggactgtagggtgagagggaaagaaaatgaaggtgactttcatggaagtttcatttcttttccccgattgtaccaactgcatgtacttttggcctggctgcaaggagcaatattggtttactctcgtatccttaaaaagttacagaactgtgtcttaagagaattatttatagttactataactgaattgacaaatgtcaacttaactgataaattatatttggtaaaataaagaggacgtttatttagatggttggtgtttcctgtatgtctcatcaaaaagcagcttcaactgttgtcttgggcccctctgtaggccttaccctctcctcaattaggagtagaaaggggccaaagtgtgacaagaaatgaaacatctcggccggctgcggtgactcacgcctgtaatcccagcactttgggaggccgaggcgggcggatcacaagctcaagagatggagacaatcctggtcaacatgatgaaaccccgtctctactaaaaatacaaaaattagtcaggtgtggtggcgggtgcctgtagtcccagctactcaggaggctgaggcaggagaaccacttgagcccaggaggcagaggttgcagtgaaccaagattgcaccactgcactccagcctggcaacagaacgagactccatct

SEQ ID NO: 6946 - DNA, 1490 bp, Homo sapiens
agcagcatcttcctttctaaagagctcttattgtgcctgttgtctgctcaaagtggtaattgtggggtggagaaacacagagaggttgctggggtggaaagaggaagattaaaaagtaaggattatggccagccaagccctgtgatgcactgaatgggtctgatcatgtggcctctggctccccctggagagagaggatggctataggctgggcccttttgtctccccaggtgctgattctcctgtacatcgcagactggatggtgcactggatgtggggccggggcctggacccggacaacttctccatcccatacttgactgctctgggggacctgcttggcactgggctcctagcactcagcttccatgttctctggctcataggggaccgagacacggatgtcggggactagcttggtcactcaacattttccccatccctctgcactttctatttgaaatttttcttttgttcccctgtccctcctccaccccacactcccacctctttctaggacttcactttgataccaaattctcattattttcaatgggaatttttatacattgagccaagtttgtatagcaagaatttgggaaacacagatggcctgagataagcagtacaagtaggtttttgagacaatcaccaagtgcagtttcatggtgggtgcctccaggtgatgtggactggagcaggggagttttgtctggaatctggggacatggggtttggctttagcaacctgtcttggccctaatgagaaaccctttgtaagtgggctctggatttttggttttgttttctttttatctgttttgttttatttttggttttggttgaacagagggacagaagaataagtaacactcccaaacacagacatacttttgtagaagtggaccaacttcaaagctctggacaggagacacctgctccaggcccctgtgatcccagttctgttctcttgccctctggacctaagcgttcccactcgcagaaagagtaaggtggactgacttttcaatttgtgcacatgcctcttgttcaatggcctggtcaacatcaacaacccctccctctgatcatttccagttgattgtcatatccaggaaaaaatggaacagtgcactcttctccctgttgacccatgtccacctattggttccccaaaatccacattctccctgggcccaaatgactttgtctccctgggcccagattctttgtctctcttcaaccttcatctcaaattgtctctaagcactaccttccccagagcttgccaggttgggttttgagattagggtcaggtcatgggtatgtggagaatggtttggaggttgaggacaaccacaggtgtctcattgctgccatttctcctgaggacataatcacttggtcaccttggaccctgtcacttcctaaaattactcgttctgtcatgccatagaggtcagttttcctctttcttggcttctaccca

SEQ ID NO: 6947 - DNA, 2284 bp, Homo sapiens
ccccagtcgtcgtaattcagccagctgcagtccgtaccgttcttaggttagccagagacaggttttcattatcaggtcactgtgaaatctggtaaggcagtcctgaggacatgggctcaagtctcagtcccctcagaccacggtgatgccttgaccagatggttggctactgccatccagctttcagtggcatcttgttttgggaactgattatagagaatcatatatagtccagtcttcattttacatacacacacatattttacacacacacacattttacacacacacacacacacacacacatatgtttttctagtctctggcatgtgtagcctctcctggtcatagaccagtctctttgtaagttattgtggcagttcacacagtagccaccaggggtctctgtttccattacaaactttgttctgtctgggccagagaacctagcctttgaaatctctccatcatatgaaacataacgggatgggacaatcccgtaacctgtttggggttgggggctttctctctgtgttctttccattgatgtgaattggtcattggtgtttgctcttgcctctcctccatcccctagaagtacacccccgtcttattaaggagcttttaaagtttttctgaatgtatagacatttctcgggttcctacctttgtctctgatggaccattttccatttaagacattttcctgtataagacagttttatagctggttccttttagggtaaagagtcttaagagagttttattgtgtctatggcaggtttgggaaaggtaagaaatgggtcctttttcctcctaatgtttttggcacttaaaacataaaattcattatcctattaaaaaattaaattcagctttgctaatccagaaattgttcccaaatgaaaacttgttttaagtccaccccttagtttccttattttacaaggtctctcttcagggaccaacaggggcttagagagccttagttagattaaagggagaccctacctcttaaaaccagttttcatttatgcaaacaaggacaattaagggaaccctgaccccacaggctctcaagtcttcccaaggccagaatcgaaagaaaattaaaatttgaatgctgaatattctggctctactctggccttttttctggttcccttccaaaatgcacaaatcatacccttgtctgctccaattcagtctccaaacctggtgcctgtgctcctggcccccctagcatcatgctatcccaggagtatcaggaccagacacatccacagccaggctcatgggtctcagacagcaacttgagttaaagctgaaactcatccttcttctctgtgttttctggtttaaaagctgcacttatattttagccttattattttctgtagttccggagagatggtgggttgccattctggtaggaaaatctgagttttcttatctttgacctagaagagattctttttggaccaacctgcgaaattggtagttaggtctatggaaagtggtaggattttttttttttaatcctgtgcaaaggaaaagaggtgctttgtgggaaatcactaatgagaaggctaacctgcagcaccagagaaacctttccaagtgctaggcaggagaactgaagaactctttcagtgaagtgagtcagcctagaagaggcaacccacagtcttgatttttgttgctgtttcctgacctgttcttgcctgtcacctgggcctacacaggtcccgagccaacggggctttcatacccaaggatctgtttccttgctgaaaatgaaaccctatctttcactttacattcctttcaatccaactgatcaaaactggtacccacacttgccctttctccctctctccagcacactcccctctaagaaagtaaaagcaaagctttcttaatggcaacactttgggcctgttctgttgctcctgccttatttctctttcaaccctgtacatgactcgtgttcaccatccccttgatcagtgtccatccgcgctaatttgcatcatgaactgaacagtgtgtgagtggtcacctactaaacccagctctgggggcagagctgtcttccccatctctggtgctcctaacacctgtgagatggtcctgtcgagaggactaggaaccgataggaggagagtccttctcggcagagctcactgcaaacaactggaattgaggttgcacactgtgatttttacaccgaaaagccaaaaggagctggccatccagggcctagggagaccagccttcctca

SEQ ID NO: 6948 - DNA, 1164 bp, Homo sapiens
tggacaatccccagaagtttgcactttttaagcggatacacaaggacggacaaggtaggagaaagagtgaacccaaccagaccgttcccttcctacctgtgtccaagcccaccctctaaaactcctgccggccttgggtgggagctgtgggcttctcctgagcaccaggggtccagctgcccatgtggtgttcagatctgtggaatccgggcagggaggcaagagcagagtccctgactctgcatgtgacttcaggaaaaccacaccctaggctcccatttcctgatctgtgcaatgggaggaatctgccccaccattcctaatctttcaggagatgatgtgaatggaatcatgctttaaactctgagcagacacccaagataaaaggttattgccctgttcattactgtcatgttcatttcattaaaaggcccgtgtctacttccagttgtacgtaccccacctctgcatttccaatcctttcccgcaagcctgggccccgcccttcttttctgggaagagctcccagcaccctctcttggtttgcagtgctcttccagaaactctccattgctgaccgccccctctacctgcgcctgcttgctgggcctgacacggaggtcctcagctttgtgctaaaggagaatgaaactggagaggtagaggtaggtctggacccattgtgcaaacccaggccttagggcaccctgggtgggtgcaggtgggtgttgtcctaactacctcacataggtgggagccacgcagcacgggcaggaaggtgactgttgagagagtgagcaggggtgggtgatgggcctgggggtcagtgtttcagccaggactctgaacaccctggggtagcacattagggcctgtgtgtggcaaggcctgtggaaagaaaggatttcatgtgctttatttctgaaaactcagggaggagggggaccaagaaactccctgtgctcaggcacaggctgtttttgcttcaaaatggcccgagggctaccaagctccatctctgggctccactgggtatagacgtttttgagccatttgtcctcccttttcttgacctccatcccccaaggggagctaaccagtgtgtagtcttgtggcataaactggagtaaaaccaggccggtgacacccatggcctgagaatga

SEQ ID NO: 6949 - DNA, 1217 bp, Homo sapiens
gctgctggcttctcctgccaggaagtgaacaatggcggcggtgtgggagacaaggccaggagagcccgcgttcagtatgggttgagggtcacagacctccctcccatctgggtgcctgagttttgactccaatcagtgataccagaccacattgacagggaggatcaaattcctgacttacatttgcactggcttcttgtttaggctgaatcctaaaataaattagtcaaaaaattccaacaagtagccaggactgcagagacactccagtgcagagggagaaggacttgtaattttcaaagcagggctggttttccaacccagcctctgagaaaccatttctttgctatcctctgccttcccaagtccctcttgggtcggttcaagcccaagcttgttcgtgtagcttcagaagttccctctctgacccaggctgagtccatactgcccctgatcccagaaggaatgctgacccctcgtcgtatgaactgtgcatagtctccagagcttcaaaggcaacacaagctcgcaactctaagatttttttaaaccacaaaaaccctggttagccatctcatgctcagccttatcacttccctccctttagaaactctctccctgctgtatattaaagggagcaggtggagagtcattttccttcgtcctgcatgtctctaacattaatagaaggcatggctcctgctgcaaccgctgtgaatgctgctgagaacctccctctatggggatggctattttatttttgagaaggaaaaaaaaagtcatgtatatatacacataaaggcatatagctatatataaagagataagggtgtttatgaaatgagaaaattattggacaattcagactttactaaagcacagttagacccaaggcctatgctgaggtctaaacctctgaaaaaagtatagtatcgagtacccgttccctcccagaggtgggagtaactgctggtagtgccttctttggttgtgttgctcagtgtgtaagtgtttgtttccaggatattttctttttaaatgtctttcttatatgggttttaaaaaaaagtaataaaagcctgttgcaaaaatgactcatgttagaaacgtctcccttgaacttcaccatcttacggacactgggagcgggggagagagggtgagaatggacatgatcacatgcttcctggtggagtcagattttcttttgccagtga

SEQ ID NO: 6950 - DNA, 1251 bp, Homo sapiens
attaaaagtataagagaaaaaaatgactagtgattaattctggcaggagagacagctggaaactgaggtgggagggaataaggcacatgtggtaagaagaactgtatctgttcagacagggtcacaaatggagattgtgtttggaattttgtaaccagtgctttatagttgtctataggtctcatggcatagttatttaatcataaactggcatatttgcgaagcatgtatgagaaaggagtgggcccaagggctaggcatgaagtcaggaaggcagggctgtttcctgtgtcaggctaacttggattgttcactgggcctgttttcccacccataaaatgggaaggcataccccaggaatgagtgaaaatagatgacaatggatgaaaaagagtttaggatgtttcagaagagtgtgtgtgagactaggacatcataaaccaggcaatctttctttggcccttgtgattttatagtgagcacttttgagttcgttcttgatatttattaaaagtctgtccaggcagcattcacagtgctggtgtgctttccacaggagaaagcttcgagctgatgtgacaactgctttccccacccttggaactgatcaagtctctgagttagtacctggaaaggaggagctcaacattgtgaagttgtatgctcacaaaggggatgcagtgactgtgtacgtgagtggtggtaaccccatcctctttgaactggagaaaaatctgtatccaacaggtatgacaacaggacgaagatggccattaccattaggtagttcttgcctaacatctgcttctctctgtttcttccattgtctcccataaaataagcaagcacgaaatctcccaataccatccccaaggatctttatggacctggtgttcctagaattgggtctttcaattctaggatgcaaaaggttttctcttatgcaaaaccactataggagggattaaaaaaagggctgacatagtaagtaagggtggttgcaaagggaagttctgagatgaaggaacagtggctgagaagtttacagtgggttgactaggaatagagcagaggtcttgaaaaggatggaatttcagggcatgtcttcatgagacagagtcttgctctgttgcccaggctggagtgcagtggcgcaatctcagctcactgcaagctccgcctcctgggttcacaccattctcttgcctcagcctcccgagtagcaggaactacaggcacccgccaccacac

SEQ ID NO: 6951 - DNA, 1166 bp, Homo sapiens
tggaatagccaataagcttaaagctaacttaatgtcagaaaccaatggtagtatacccctatgcagtgtattgccaaaactgattagctagtggacagagatatgcccagagatgcatatgtgtatatttttatgatcttacaaacctgcaaatggaaaaaatgcaagcccattggtggatgtttttgttagagtagactttttttaaacaagacaaaacatttttatatgattataaaagaattcttcaagggctaattacctaaccagcttgtattggccatctggaatatgcattaaatgactttttataggtcaatgcatctttgttattatcgtcagatgtatttcaactgatgtattatactattggtttaaatctctttctctcaagatagaaggtgtagcaaaagtatcccaactactcctcgcttctagtgtccctcggcatctgttctggaggggtaatttgggatgtggtgttagttgtggctgagagccagtgctaggtcccttgccccactaggccattctctaggctcattctaggtgaaagagctcacagcagactgtggggtgggggagcaccaggaagctgttggtgacctggacaactggtgtccctggttttcagtgactcgctcctcttcccttcagttctctgatgtttggtgttattattttatgttgttattttgcctctgatttgtttcctagtcactcaaagcattttacagaagccttaccactttactaaataaccctgtaaggtactgatttaaaaactgagtcatatgcatccctcctcctttcctctcccatgcccaaggaagataaaacagcttctctgccacaattgacccagagtggtaaagatagagaatcagcatgaaaactgcagttccccagctttgtggtactccacggaccagcctccttgctgcattttcatagaatctcttccttataaaagtaatcactctcggataaaccttactacagtttaaaaatgcttccctcttctctttacagctacctgccacttcaatgtgccacatttttccccccactttcacgttaagcttaatgctattccctagatctgagtgaacttcagttagaagaagaaaactaaaaatccagaaactggtgataatcaagttttc

SEQ ID NO: 6952 - DNA, 2238 bp, Homo sapiens
tggggggctctcagggaacagcagcagtgccatagccaggctctctgctgcccagcgctggggtgaggctgccgttgtcagcgtggaccactaaccagcccgtcttctctctctgctcccacccctgccgccctcaccctgcccttgttgtctctgtctctcacgtctctcttctgctgtctctcctacctgtcttctggctctctctgtacccttcctggtgctgccgtgcccccaggaggagatgaccagtgccttggccacaatgcgcgttgactacgagcagatcaagataaaaaagattgaagatgcatccaaccctctgctgctgaagaggcggaagaaagctcgggccctggaggctgcggctctggcccactgagccaccgcgccctcctgcccacgggaggacaagcaataactctctacaggaatatattttttaaacgaagagacagaactgtccacatctgcctcctctcctcctcagctgcatggagcctggaactgcatcagtgactgaattctgccttggttctggccaccccagagtgggagaggctgggaggttgggaggctgtggagagaagtgagcaaggtgctcttgaacctgtgctcattttgcaattttatcagtaatttgacttagagtttttacgaaacctcttttgttgtccttgccccactcctctccaccagacgccttcctctctggatactgcaaaggcttgtggtttgttagagggtatttgtggaaactgtcatagggattgtccctgtgttgtcccatctgccctccctgtttctccacaacagcctggggttgtccccgctggctcacgcgttctgggagctcaaggccaccttggaggaggatgccacgcacttcctctctcggagccctcagacatctccagtgtgccagacaaataggagtgagtgtatgtgtgtgtgtgtgtgtgtgtgtgtgcacacgtgtgtatgagtgcgcagatctgtgcctgggatcgtgcatttgaggggccaggggcaggcagggctgcagagggagacggccctgctggggcttaggaaccttctcccttcttgggtctgccctgcccatactgagcctgccaaagtgcctgggaagcccacccagattctgaaacaggccctctgtggcctgtctctattagctgggttccgggaggcagagaggagtgaccgggcactggcactgcgatcaggaagactggacccccagcccccagggcccccctccccccacttagtgctggtcctaggtcctctgaggcactcatctactgaatgacctctctacttccccttcttgccattattaacccatttttgtttattttccttaaatttttagccatttctccatgggccaccgcccagctcatgtaggtgagcctgggcagcttctgttggcagagcttttgcatttcctgtgtttgtcctgggttctggggcatcagccagctaccccttgtgggcaaaggcagggccacttttgaagtcttccctcagatttccattgtgtggcctggtgggtcagggggagtctttgcaccaaagatgtcctgactttgcccccttgcccatcagccatttgccatcaccccaaacaactcagcttcggggccggtgaggggaggggcctcccccagcacagatgaggagcagctggggtaggctgtctgtgccatggccccccactcccccttcccttggagggagaggtggcaggaatacttcacctttcctctccctcaggggcaggtggtggaggggcgcccagggtcgtctttgtgtatgggggaaggcgctgggtgcctgcagcgcctcccttgtctcagatggtgtgtccagcactcgattgttgtaaactgttgttttgtatgagcgaaattgtctttactaaacagatttaatagttgagagtttttctttctctttcttcctggggctcaggccttaccccccaccgcctctatgtgcagaggggttttgttgggtggtgagggtgtgggttgggggtcctgggagaggagcggagggcctcctgggcgagcaggagccagcacctcattggtgaggacctgggcaggatgtgtgtagggcatccttaaagcaggacagggaggctgcaagggctcaagcccatcttcttttgccaaatgcagaatcaggagccaagctctttttggcatatgattctttgacctacat

SEQ ID NO: 6953 - DNA, 1323 bp, Homo sapiens
tcccatctttaaccctttacattgctgagtgatgtggaacaaatcactgaattaaataattgtctctagagagcagctggggattttaagcaccctggagagaggtgcagaccctgccaggatgataaaggttgtcatcactggcaactgactcctgaccccgggtcctttactcgtatgtcccaagtaggataccataggcagcttctaaaggctgcttacctagattcttctcaaaattgtgtccaagatgttaagtaacctgctattcctgtttagtggttacataacatgtacttagtgtctttgtggagctttgggctggtaggggcagggataggggaaagctaaacagaagtagaagaaaaggtccttgtccagaggaaggttattttaagagacaggacatgtaatttataacaaatggacatttgcaatatagcaacagtctgagtctagaagtgttcaaccatcacatcgcttctcctgacttttctgttgtcctatggctatgagactacaggggttgggggatggggatgcccccaccaccaccagtgtgagaatgagatatggttggggaggcgtgtttggcacttttacaaggttgcattgtccacatttgcttggatggtggcatctgtagcccaaatgggcattcagtcttttcttctgctgtgaggtaagagtaattcagacctaatgaatgagaagagggagcactttgatccacagactttggattaacactgtacccactcttagcaaaaggggacttctctaacaagctagcattgtgttaacctgtcattaacccagcattagagacaggtcactgggatgttcattctggctctcagcctgctgttatttccccactctcacctgtgctagttcgctttctccagaagaggagctgaggtggtcttatcctcagataggacatgagaaattggaatttggcaagcaagggcttcagcatcctttagtttctaaagcaagatcccttcagagaagtctagcaggaagaagccaggagaatgtagaatggaaaagagctcttactccaaattttagagaagtttcagctctacttctcatcttttctctcctggtcttacttgaatgcatgttggtaatctgtatacattactatgactgtgtctatcacaagtcctacaaaataaaaatggacttaaaagtactctctgctgaggctgtaagttttgttttgtgagaaataggtaaagacattagcatttaatctactggaataagctggttgctgtggcttatacctgtagtcccagatacttgggaggc

SEQ ID NO: 6954 - DNA, 1329 bp, Homo sapiens
catgtagtagtattcaggggtttttatttatttttatatttttttaacatctcccacacttaggaattcattgacttttaatctgaaggtaccttaattcattctagcttagccactgttcaactcgagaaactaaaaactccacgtcacattttagttgttgctgtagctgataaaccccacctgtagaatcttgtccatattctattactcattattttttttgttttgcaccccaaattaactgattctttttggtgatttatcacatagtaactaaaaatttatatttatcactagtaaataaaatcattttgattttaacttttttttttttttttttttaattttcagggcacacgtgtttcacgttgacaggtttgcttgggacgctagtaaccatgggcttgctgacttagccaaagaagagttaagaagaaaatacacacaagtatacagactgttcctagtttcttagacttatctgcatattggataaaataaatgcaattgtgctcttcatttaggatgctttcattgtctttaagatgtgttaggaatgtcaacagagcaaggagaaaaaaggcagtcctggaatcacattcttagcacacctacacctcttgaaaatagaacaacttgcagaattgagagtgattcctttcctaaaagtgtaagaaagcatagagatttgttcgtatttagaatgggatcacgaggaaaagagaaggaaagtgatttttttccacaagatctgtaatgttatttccacttataaaggaaataaaaaatgaaaaacattatttggatatcaaaagcaaataaaaacccaattcagtctcttctaagcaaaattgctaaagagagatgaaccacattataaagtaatctttggctgtaaggcattttcatctttccttcgggttggcaaaatattttaaaggtaaaacatgctggtgaaccaggggtgttgatggtgataagggaggaatatagaatgaaagactgaatcttcctttgttgcacaaatagagtttggaaaaagcctgtgaaaggtgtcttctttgacttaatgtctttaaaagtatccagagatactacaatattaacataagaaaagattatatattatttctgaatcgagatgtccatagtcaaatttgtaaatcttattcttttgtaatatttatttatatttatttatgacagtgaacattctgattttacatgtaaaacaagaaaagttgaagaagatatgtgaagaaaaatgtatttttcctaaatagaaataaatgatcccattttttggtatcatgtagtatgtgaaat

SEQ ID NO: 6955 - DNA, 1207 bp, Homo sapiens
ggaacaatcgatggccttgcagcactcacacaggacccccttcccctaccccctcctctctgccgcaatacaggaacccccaggggaaagatgagcttttctaggctacaattttctcccaggaagctttgatttttaccgtttcttccctgtattttctttctctactttgaggaaaccaaagtaaccttttgcacctgctctcttgtaatgatatagccagaaaaacgtgttgccttgaaccacttccctcatctctcctccaagacactgtggacttggtcaccagctcctcccttgttctctaagttccactgagctccatgtgccccctctaccatttgcagagtcctgcacagttttctggctggagcctagaacaggcctcccaagttttaggacaaacagctcagttctagtctctctggggccacacagaaactctttttgggctcctttttctccctctggatcaaagtaggcaggaccatgggaccaggtcttggagctgagcctctcacctgtactcttccgaaaaatcctcttcctctgaggctggatcctagccttatcctctgatctccatggcttcctcctccctcctgccgactcctgggttgagctgttgcctcagtcccccaacagatgcttttctgtctctgcctccctcaccctgagccccttccttgctctgcacccccatatggtcatagcccagatcagctcctaacccttatcaccagctgcctcttctgtgggtgacccaggtccttgtttgctgttgatttctttccagaggggttgagcagggatcctggtttcaatgacggttggaaatagaaatttccagagaagagagtattgggtagatattttttctgaatacaaagtgatgtgtttaaatactgcaattaaagtgatactgaaacacatctgttatgtgactctgtcttagctgggtgtgtctgcatgcaagagtgacaccctccattagacctagctagactgtgcagtgatgtggtggggaggaccagccagggaagagggagcacctcagcagacacaggcaccagccaggatgctaaggacctttagccaagtctgccaactattctcctccatggggagaggaaacatccatttccagtggtagaaaggcagacccgaatgtaccagggagcttccaaatggagggtggtatgttggg

SEQ ID NO: 6956 - DNA, 1149 bp, Homo sapiens
gtgtgaccaggagaccttatgctacctgtaaaaaagttcagcccaccccatctaacttctgagctctgtttgggtgaagattttctggccgcatggctgctcagactggcatccaggctttgctccaccaagaagttaaaggcagtcggacatctcagtagcatctctaccagcccttaactcaatgcatctacctggcatctcccagcagttacttttggagacgattcactgcccctggggcgtttccttgaaggtttgtggagagcgtggagaatgatggggcaatggccaattggagggtggagagtgaagagccggagctggctgtgagtggtttggccacatttctcaggattccatgagagacttggggaacttgggctgacaaaggaagtagcctggggcatccttaaggaaggaattaagaaaagggaaaaagctggactcaagccacgccatgagggtgaaaggttataaggccctgccccctttccagctgcccacctgttcctcctccacacctcttcgctttgggccaccaagaaccaatgaagtccacaccctttggatgagaaaaagagggagttggttggcctctcttctccctgttatccaatttgaggatattttgaccttgggtaaggatgaagtgttaaagccacagctcctctccacaagaagccattcatcttgggggaggcagagagggaagtctctctccaaagtctatccagcttcgcttcgtttcattgatctgcacaagagacaatgctctggaaaaggaagaggaccccagaagggtgcttggcaagacagaggatgctaatgggcaatggagagcactccctccagctggcccctgctgctgcctcccgtcctctgcatggggtcaggtgcttctgtgcttgctgtcctacctctctccacagcagggctctcaaaaccattttgatcccccattggcagagggttcccctctttacagagttcagtcattaaaagcatggatcagctgttaatctcattggaggagggaactgtttcctgcattcattcatctgggaaccttcttgagtagccactgtctgccagccactgctctagagatgggaaaacagcacggaacaaaaccaaggtctttcttcc

SEQ ID NO: 6957 - DNA, 1210 bp, Homo sapiens
ctcccgcttccctcctgggtccctcctggctgtttacccttttcccggcttctctctcacaccccattcatcatccagggccagattctcactcagggagcacttttcatctcctgccctaggtcctccctccccggcctgccattcccaccctgctccccatcagcacattcttccccctgtctcaacctctcagaaaactgcgcccgtcactctccctcacagtgggctgagggatccaagaggtccggggctgggctgatagcgcctcaagggtctcaaatgtctactaactgtgctccttcaccaagggactgatgccactccaggtgcttaagggtccttcaggccgagtgtctctacatcttggcacagaaaagacctttaagtggtcagacctctgcccagagttccagccacccctcagtttctgcatgcccctttaatccagctccatggcactccccttgcttggtgtgtgtaattgtgagcgtgcctgttacttaggagaggctgtctgacagctaaggatctctactgcaagagctgggagtctcagacaaagagagaaaaataatagaaactgcaggtaggaagatacagggtggggacatagcctgcttaagaagcttcctcctgaaaaggagttaaagcttttttattggaaggctggctgttggttcagaaaagcactagagagaaagaaaggcagggaaagacaaggaagggagaggaacttcagcctgtgtactgaggcagacctgtatgggaagggcccagagaatgcgaggccccagcctaaggagctggtatctcagcatcttctcctcctcctcaggaccggttttcctctttcctcctccacacccttctgtgctgccacaggtgcctggacaacccagcaagagcaacacaagtggtcctaaatcacccaagggccatgagaggagggtggcctgaaatcatgggaccactgatagaaatggtgggaatgacaactcaagacctcaggtcagcacggggagaaggtgggactagcagcaccctgtttgtttcttccgagaggactgggtctggggaggcaggtgctgggtcaccaggttctgctgcacaatgatcaccaatctctcgagctaaaacagaaccctcggagtttgtcaccatcatacaaggcagccaaggagatgatgtccttgtacagtgtttctcc

SEQ ID NO: 6958 - DNA, 1228 bp, Homo sapiens
attttttcataatctaaataactatgtggcataatgtatctccctggtttaaataaacagtgcagacatttctctcctgtgatttgcaatgccttgtgggaatttagttaaaaatatgaagacagagagagatttatatgtgattatcatctggaggacaaaaagagaaaagagagaactagctcaaagtactaagcttaagggttctcctgaaatactttacaatctgtttaaaaagggtggaaagtctaatgaggccagatttattttgaaattttaaaataatttcacagaagttctggaaacatatccagtcgggacctagggagcggtatatatattctgtaagggcaaatcctttctgccatacagcaaataacatatggggctgatacttcttaatgtattgcctagttttaacctggaaaaaaaataataaattctataaggagtttggatgacttcataatcaaacatttaataaatgttcaacaacaacaacaaaaaacatgtaaaaccctgggccaaaactctgtgaaggataaaataaaagacataaatcacaaattatcttcaagggcaacttttttaggtaagaaaaagtatatctatctatccagggcttagatatttttgtaaaggcatgattactatgtaaaaaaatagactgacaaacttgttggcttgattaaagatttttaaaattgtgcatactataaaccatgaacataaactgtattcaggccatttgatgagatactcacagaatgattgtaagaaggttccaatatcacaggcaatgacattttcccttgaagattcaattttgttaaataaaaaatcttttcccccacaatcttttcttttttcatgcgatgtacaccatacagtctaaaccgaactgcataatttccaatcatctcagattcaacatgattaaatttaaatgtttctgtgaagacagggcatggtcctctctggatgctggtttttgctctctgtttctttataggtagaagaacaaggtgtacttgccatgagttgccacctgtcctgttatatgttgggatgtctgtgacagctgtcactgttaccagaagcttctgttcttgtgagtcatagtcaaaagtcacatccagtgtgccatatttagcttctggctcaggatcaaaaggtttaggaagctgcgaagatgatccttgagctgacatatcctaagaaaagaaaa

SEQ ID NO: 6959 - DNA, 1717 bp, Homo sapiens
tttttatttctaattttgtttccattcactgtcctcagttcctctgtggcctacattgaaggtagctgtcagtattattattgtcaaccatatttaatattgaatacaagtttaagcatgctgcaaagcattttctaacgttaattttaaaacattgtctctgccctccaaagtgatggttaacagctataatttactaagatctagcacaataatttattacttgcttgattctcaaaacaatactgtgaggtaagtaatgttatcaacattttattgataaagaaactgcagcatgaagaggttaagcagactttcccaaggtcattcggtaagtaagtagtagaactgggattggaacccaggtgtaaattactctaaaacccatgctatgcatgttgcatttgcctccctgtttgaaaaaaaaactacttaggacattatatttatcaataatcccactcaccttgattgaatggcagaactaagggggaaaaaacagctggggaaagagaaaagactagaaaagaagatcagaaattttttttcttctcaggacacaagtggtggtacttttgtgtcattttgtagatgactttgatttgcaaagatttggaattgatttattctaccagtttagcctatacttatattccaaaagcatattaatcagttctgctccttgaccacttttaggaatccaaggtgttttaattgttacatgacccccttactactctatgaagggcataacctgtgtctagcccatatctcactcatatcagtggtgagacaaaagatttgtcttcctctgtcctctcattgcaatttatttatgttttattctcaattttattaagatttgtcaggaattacagctagtttattacatatgtctctcttccccctaggtaagtagtcaatgccttgttagtatctttctgtacccctttgcttatagtaggcagacagtaaatattgaattgaactaaattccctgtggaagaagccagtcacactattacatgagtcttagtttttatgaatcttgtgttatgtatggatttatttattccttcagttaatatatatttaagagtactagatatgtgccatgtgttgttgttccaagtgctacagatgcagagataataaattggtcgaagtctttgccctcatggggcctacattctaaggtaggaagatggccacagaatgggataatttcaggctagtataatgaagcattaagataggggcatgcatagagtaccgtgggatttagtagaagagtgcaacatggaattcaaaaaaatcttcctggaaaagataatccctgagttgggtcttaaagaacaaatacatgttagactcccatcaaacttgaggacacacgttctttccaagaacaaaatgtaaaataatggtttctaaactgtagtatccttaagaattattttgaaaatttaacttgggccaggcgtggtggcttacgcctgtaatcccaacactttgggaggctgaggtaggcagattacttgagctcaggagtttaagaccagcctgggcaacatagcaaaaccccatctctaccaaaaatttaaaaattagctgagcacggtggtgcatgcctgtggtcccagctactcaggaggcttagatgggagaatcgctggagcctggcaagtcaaggctgcagtgagccaagatagcgcca

SEQ ID NO: 6960 - DNA, 1245 bp, Homo sapiens
tccttgttgctggcctccaaggcaaatagtgcttcaccctgacctctcactccaggacagcctctaagggatttgatctgctcatcttcagttgaatgccctcactccaagactggatgctggatctcatagaaaattcacagccagacaatcttctaatctggagtctttgagatcttctaccccaactcatcattttcctattgaggaaacgggtccagggcagtcgtgtgtcttacccagctacacagggtgacattttggtctagaacctagtctcatgagccctttgcattctttccccttaagcaagaatagaatgtagtggaaatttattgattgagacacagaaatcctgattagtgataggcctgtcttctgggcaatatttctaaaatatttgagtgacattgatgtttaagtgacctccttcatcacatcctgcagtatctccagaagcagcactagggtttgagtttcatacttcagcccctctgtaggaatgagaccaagccacagctgtcttttgaattacgtagtcgaagaagacggtagcagccctgtagcattctaaggcatctatacccaaggagtcctgtgatttgagcttcagcagggtgatctacatttgggtgcttgtttctgagatttgcagagaagtataacatggtagttcctctaccttacagttaatcgtttcttaataaagaagcagaatttagaaaccacaggatagtgtacccacagatgggtgttatcaaggccagtcatgaggatggtgtcctggagtcttgtccaccctctccatacaagtctcaaaagtcatcctcctactcagtgattcacgtttagtggtttatattattaaggtttgattcaaacagagccttttctgtcctgtagataatctacatgtttgtagaattattttgaatatgtttgaggaaaatgtttaaaatctaaatatactcacataacttgattattcactcctctgaaaagatgctggataggctaccaaagttcccaagtggtagataattcagaagacttgtttgaatttggattttttttttttttggagtggggaagggtataaaggaggcttaaaatttgaatccataatatatctaattacaggagaatttacaacatctcaagtacgtaaattaagttgtcattgagtgaaaggttcacttggacctagtgctgcctcctgtttattacatagcatggcccttatgt

SEQ ID NO: 6961 - DNA, 1522 bp, Homo sapiens
taaaacctaaaaaacagaatcctcaaaaactttgctgtatgtgttttaacattttagagaacagtatgttgaataactaaggtatgtaacttgaataggaaaaatgtccatcaaatgcaccttggaaaatcacagtaggtagaaggctgtgttaaccgtttgtgtcttattaacatccttaagttaattttgaatttttgacagttttgagggaaaagacctatggaacctaatgtgaagtatttcgtatgttaactggtgttgagttgaagatttttactgtgtataagcagatatcatttgaatgataaaaatgtcattaacctgctgtcttaagatgttcacacaaatatggagagtaattctacaatataaaaatatttattttaatactgagtttcagttaagtcataaacagtgttaaaactcttgggaaggtgtaggggttttttgtttgtcatttttaaaattgaaactgtgtcatacagtgtttcacgtctctgaaattgggattataatagcactattttgatgtagctctaccgatactatgtggtaatgctattttgttttactaacaagctctggaatatttagcagtcattttcactggcacaagagccttttgtatgttattcaatttaaacttttaaaccaaaaattttatggtccagtgtctttggcaaaaagatgctggagggaatgtaacatacaattaatatgtggttatatatatatataaaaagacacaaattgccatgttatggttctgccttgaaacagcacaatgaagtgtatcagtatattctgtgattatgaaacttatatgttgtgttgttttgtgtcttctgttgcctgtcctttgggccagatgtgggccagttaaatgcagttatcatctcattaaatacagatgcagataaaatatctttagtgctgcaacattttacctaactttttgtatgttttcatgactgtgtgttattttccaaagctgttcctacctcaccatgaggctttatggattgttatgtattataaatgttctatatgagacagactactgtgtttcttctcatttattaaaagttaagtagaaaaataaactaattttaatatctacttcatttgtgcatatggcctcccctccgatactaggcttagttacacagagagttggatttcagataattgaaagagaaatttcagtttaacacaaatgttgcaagtgtacagagtgactaggttacaagatgggtgtggaagaaaatgtaagcaaaaattgcaattaaaaattgaaagggtaacactgcaaaggctcactaatatgaaatactcagtggctttgaattttattataagcattaagcttatagattatatagttgtggttaacctgctgcttttggcacttgctatttttttatttataagcatagttactaataaggtttattaaatattttacacctgtaaatcatctaaaattcttaacgcaatagtatattattgtggttctatg

SEQ ID NO: 6962 - DNA, 1206 bp, Homo sapiens
ccaaaattctaaggctctatgatttaacatttatttatagactacacacggtggaatcttgtgctggttgctatggggaggtggaggggcagtaagaatacaaaggaacgagtttctgtccaggtggaggtaaaatataaacacgacattttaaaattacgatggaatactcttgataaattgtgctattttagactgaatacataagcactgtgttgtgggtggagatgagttgatctggaaaggaacagcttgcccatctaaggtggggtggtggctggaatcagagtggcttaagctggacctgaaaggcctcaccacagcccctgcgcagcagaaggacctccccacccactgccctagattactactggacaaatgcagtgccagctattgcctggagatgtgtatacaaggcttgtttggagctgttattttgcattgttttggtattcttgtaattcctatgaaatttttttcacttgtatgtagtgtgtttctagtctccccatccagactggagagctggatcctcaccttctgtttctgttttgctggaatataaagaatggaggaaaattttcaagacattattaaggaaaaaatgatagaatttgatgattaattgggtattgggaaggaggaagctaggtaggagaacaaagatagttataatgtttctaacctgacaaggaaaatactgccttaaacaggtgaggaagttgggaagggaggccaagaagctgatttttaggagaaaatatgaactccatttttaatgtgcttaatttgaagtgaagtctgggtttgggcagtgctaaagggtggattaatgggtttaggacttccataacttcctctcctttgatatggatgagtgacagttttctgatcatctgtaaacacagcttcaaacatcctatcaactagcccctcatatacagaaattcggaagccacttatgggtcaagatatcctcatggaaatggcctagaggcagtttgaagaccattttgctttctactaagggctgctgtgcctcgctttatttaaaaaatacattcctccaaatgcgaagatttgatacccaaagaagaaccaataagaagatgtaaaagtcagtgatgcttgcaaacacaatagcaatccttcaataactaaacagactaaattgggagatttttagacccatataaaaacaggttc

SEQ ID NO: 6963 - DNA, 1194 bp, Homo sapiens
tactttattgtaaatcccatatagccagttgattctcacagtatacttagttgctcaggaaagaactaaaatgcttttttaaaaggatacttaattgctttttgctcaactcctacagtcaacctatgattgattgtctttcaactgtgatttgaaaaatggcagactgtccaaatctaactcatttcccaataaatttattatcattcaatctgatacgtgatctactgttaaaactgtttcttaccatggtacatattagactcattaagccgaaaccacttttagctttaacattaattgtaaatttatatgattcaattttcataaccaatgcttaacaactgcaggcaaaattctaaaatgtgaccactgggtcttgggaatcagtaggggctgtatccagcacaccactgccccatcctttttttcttaactattagtgttgaataaacttctcatagttaatctacttgctgaactcaggaaattcctatcactgaccctggccagggctttaaagggtaggaaaagcattaatgtcagtcctacacagcgaacttttgatttagaagaatgtgacagaaagaaaacatttactgaaatacatgggaagcttgcatatttctaaagttgtctttatacttttcatttctcaaagctaagtaaactgtggtataggcatctctaagatgttagcatttaaaacatcaattgttttattgatgtttaaacaattgtttaaatcccactgaaaaatttaaatattaaaatatcttgcacagtctaccaaatgagttaaatcgttacagtcgtgtctacctcttatttttctatctgtatttaggctgctgttttggtgagattctaatttctttttcccctggaactactttctgtggaagacaaggaacagactggggacagaggcctgaaaacaaattggaagcactcagagatctattgctgaccagccctattcctcatgagttggcggggggaaagccattgtttttaatttccacttaatatgaaaatgcttgtttttaaaatgttttttcctgctgaacaaatgtatttttaaaaggaaaaaaattctcttttggctctaagaagtcagctgtatgagcaggcgtgaccatatcataacatgctgatatgatagaaatcaataaatttttacctctcaggatc

SEQ ID NO: 6964 - DNA, 2673 bp, Homo sapiens
ggcccagcaagcaccactaaattactggatgaaatgaaattgttcacttgagggattagtcaaccatctgggggagaagttgctcactgtcaaatacagcatgcacggtcctagctgatagaccttttcctcattgctacagcaagccacagggtagagtgaccagttctcctatccaaaaataaatgcgaacatgcatacataaatgtggctgagggccacttttgccatcactgtgctccaaaggaacatgatattgttaaatatactgtacacattaaactattctataagatgctttacttttcaagtacggtgtcattttcacagtctccagggtgacaaatgccaatagatatgtgagttaatttttttaaatatctccgtgagttgtaaatagatgtgtatttgatctgccctatccttctttgattctttaacatgttctctctcttctgtttgcaaaatatgtttgaaagcattggtagtgctttccttatcagtaactggagttctcctgcttgcactagagaaggtaaagagagaatcagtattcttatatggcaatctggggaagcagcaatatgccactgtacaaaactgaagaaaagttcctaatttgtactttgtgaagggagatgaaaggacgtttaaagtatatatattttgtcaagaggaaagaagataaaactatgccagttttatatcaatagcttgtagaagctcagctcttcttggtcttggctagactgcctagattcccacagcagacaaggttgagaatccattgctggaatcttggtattgatgagttacagtgatggaacatgtgcttggccacaggcaggtccagtcactgcaaaagtgaccaagccagcaggtcacccttaacttcagaaacaattattggtggtgaactgtacttaaattgcagagaaacctgtaagtaatggaaggtaaagaaaaattacagaatggaaaataatattttgggcaagcaaacaaattcactgagaattccaaaagtatattaaaaaagaagatagctatgagttcagatctatcttattggtctttaatattacaaccaatccttaactttccactataaaggaaggattactagattgattactttctggatagataatctggtaataaatgataggtaaatcaaaaattacttttatttaggagtttgaattcttactctcatcagacattttttttctagggacgcttactaattaaatgatttaagttgtttcttaggggttttttgcctatatatttatgactgtgttaatgagtagtgaaatgatgcggaaagacagctatcaggaagaggaaatacagaagcctgaataatctatgggttagaaaagcatccctgaataatcaaaaattggcagtattggcattgttctcaagcctttttatgaaaatgaaatctgaaatcaccaaatgtaaacctgggaacattattctagtgttgctgtcttggattcatgttaagaagcgtcttcattctttgctcatgttgcccacttcttgtggatttgtctgagtgttttttgacaatcacttccttaaagactcttctgaactagttggacctggttaatcatagagagtagcctttaatcatggatagtcttcttggattatttttatatttgaaaagaaaatgttttatttgcactactgagtaggaagagttaattgttttctttgttctttttttgaagtcattacacaggacttcactccagagttaccattatgagtgtgttcagctctggtccacagaggatggataaaaatggtttgttatgtttttttgctctgcagtgctatgagccttatatctgttaatatgaaggacaaagtcaaaagcagcagtggatagcaggaagggtagagactaatatgtttgggaccaaaaccatctaagttagagatttccagatcacagaggggctgggcattctctggagcagtcattggttggtgctttattgtaatcattttgcgccaatccccaacaattaggaactggaccctgggaataagctgagggtgctgaactgttggggaagggtgactgtagccacatggaagataaaatatgggtttttctgcaaaatttccatctgagggtttttacatttaatatttttttaagacagtttaaagagcaaacgttttttaagtgtattctagttgcaaagtatgcacacatatcttgaatggctttatttttattgtgtaaaactgttgaacacatgactgtgatgcacaaattctttacgtgtaaggagtctatgcattttacagtaacttattttatgatcgggtgatgagacagttatactttcaactgccattatttttattaagtgctttcattttctttacagttattataaaattgtatttattttatacagatgggttttcattttcctgatgctgtaatgtttacttcagcttgttgacctttctttgtgttatctgcatgttgtaacgtgtgataagaatgaatgtaaaggctgtggcaactgtaattaatttttgtaaagggctggtcacacgtggatctggtttatgaatgcatttgggatgattttggtaaccagatcaccttttcagaaatttagatgtgaacaccaa

SEQ ID NO: 6965 - DNA, 1460 bp, Homo sapiens
gaaaagcagtgtccactggaccccttctggtactggatgtgttctttacaaaggctagctcagtccaacactgtgtttacatacactcgtgcttttccttatctgacttctcattttgtatcagaggcatatcataaattgataattttgcaaaatgcacttttttgagatgcagatatagcaaaggattagtaatatagcctgaaaacaaatgggagcatagcagtgtgtgaggttctcgagaactgtcttgtctctgtgtgtttatttgcctgccagtgctctccagcgccatcctgccctggacaccaccctgacgtgatgcctctattgcagctcagaggctttattttttccattttgacattggcactaaatgcatttggggatggttaaaacaaattactatagaacatttaaatgatcagtttaaggggaaataggctagtttatagaaaaataagagctagtggcttataatggtgacaggttctcatgtggcacccctaggacctgtgcagacagtagtctgttgaatcattacatcaaggagctgcccctgtcagggtgagtgtaattaggaacgataccagcacataaggctccccccaatctcttccagttgctttttcttttttcttttttttttagacaggtcttactctgtcacccaggctgtagtgcagtggcataatctcagctcactgcagtctctgcctcccgggttcgagcgattctcctgcctcagcctcccgagtagctgggactacaggcacccaccatcatgcttggctaatttttgtatttttagtagagatggggtttcaccatgttggccaggctggcctcgaactcctgacctcaggtgatctgcccacctcggcttcctaaagtgctgggattgcaggcgtgagccaccacgcccggcctccagttgcttttgaagagggtaaagtcaagtttctatttctagaaaacattttttagaaatttgttgcgatgtttgtacaatttacctcataagagaaccacacccttctccaaaagtgctggtactgcatcagtgagatgagtagggtttttgtttgggattgtaagactattaagatcctagtaagtcagtggtagtttactgtgatgtgagcattgtagattcccccgttgtcactaatcacacaacaattttgagaagtaggctataaaacaaaaaaaggttgctgttttctatttttaaataaaccaaaaaaaaacagaaaagatgtgaattttccccagttatgtgggaaaggtaaagcaacaccaaataaaagcccacagcagcttcatctttacgataactcagtgcatatgtgaaagagaatgatgcattaactgaaatacctcattgaatattatactactactggtaaaatgcagaagacagtgttaatgtgtttggtttggggactggttgttataaa

SEQ ID NO: 6966 - DNA, 1919 bp, Homo sapiens
actgcagactctcaagagatcaatcaaattgccagaaacagtttggtttttcatatggaataagtattaaagttacagtgtagttcatttattcattgatttttgtaatgtaatattctggaaaaaattttgttttcttaaaaattttgtctgacagctgggcgtggttgctcacgcctgtaatcccagcactttgggaggctgaggtgggcggctcacgaggagatcaagaccatcctggctaacacagtgaaaccccgtctccactaaaaaatacaaaaaaattagccaagcatggtggcaggcgcctgtagtcccagctacttgggaggctgaggcaggagaatggtgtgaacctgggaggcggagcttgcagtgagccgagactgtgctccagcctgggcgacagagcgagactccgtctcaaaaaaataaataaatacattttgtctgaaaaataactgggatcctggccagaaagattgttctttcttgttttattattagttttttctgttgccaagcttttttttctttcaagaatagtcacatgttgagatcactgaattggtaaatttgaccgctactcttccaaaatacatcatttgctgcctgacttagacctaggattctgagttgttcattgggaggttctgaccagtcactacaaggtttatccatggtagcagaacctgagtccttctgtagatggacttgaaagtgttccgtgcaacatccagccttctggattatgaaagcccacagtctaacagtattgaaacatcctgctgtattagttcaaccacatatttatctcttcctgtgctaaagcagtctttattattttcatatttaattgaaacaaagagcagctagcaatttcatagaaaattaatttgttttttctgatgtgtctgcaactgtgtataatacagacatttcacattgtttccaaaagtgaagaacactcatttaatatcttcaatgttttaagttagaaggggtggatcttttcctttggttggtgattggtttggtttatacttgatgagttatgctagactgattgtttagagagagcagtctctttattacacaggctcagtttgttgggatgctcagggaacagagttttctggttagccagaaaacccccttttttcctattttaattctggttgaaaaccatgataaaatagactttcttagcacagtatggtagatataacttaactgctttttgattggggatcatttagggcttcaggatcacgatttctaaacatcagggatcatatggttgcagatgccgatgctataagtaatttggccggatgcagctcctaaggtaaagcagggtactttccctggaatttcctttttaaataaatatctgtttctttgcttgtgttttgcctttttctcttcaaagtcaacattaattcaaaggagaatggagcttaagataaaaaataaaaaggggttgttgttttttttttctttcttgtcatgcggcctctgggactgagaagtgatttgcaacttgggtctctccaagattgcttgccttcatgagcacaacccattgtactgctaacagccagaacattctcataaaatgtgtacagatctacagtgtccacggttgaatgacatctcttcagatgcagcccagttgtatgaggttcacacaacctacacagtcatctcagcacctgggaacacgtgcttaggaaaaattgccagagcagtgcagaaccccttgttcttttaccaggtgtggaaacagctgaatcagaaagcctgggtttcactcttggttctggtgaattagctgtgtgaccaagcaagtcactttacctctacatcttaggggtttttttttttgtctgtcaagtgactgaattagactggttttc

SEQ ID NO: 6967 - DNA, 1494 bp, Homo sapiens
tttatactagaagtagaggattaagacaattatctcaatagatgaaatgaaaaaatactttatttcacagaacaatttgtttagattatttaaagagttatgtatggagatataaccacagggacagaacttgctacttatgatatcaaaaatatatgcagaatattaaaggcttaggaagtgtattttctaaaaacaatggaacaattactatcggcactcaaccttcatcttccttttccgttctcttagagtaaactccagtaacccatcactgggtcaaatcacatctgtttccgttctgtcagaattataagcctgatattggagacaacagtataagatactttaatttgtttcccaatgaaatatccttactgtacctagttaatgtgccagaggagttagattaaaagtcatttcacatttagtgtagttgaagttgtttggggttggaagaaggtctacaaaatatttatttgccttggtttttaggataatcaaagtatgggatttacgtaagaattatactgcttatcgacaagaacccatagcatccaagtctttcctgtacccaggtagcagcactcgaaaacttggtaagcctttaataggtcttttgggggagataagagtttttgtttaaaaaaaaaaaaaaaggctaatttccagtaacattgatatgaaaaattctaatatgtgaagttcaaaagataaaaactcagaagaatgtttttggtttgtgtatattttggggacaaagaattctgatgatgattcttatgaaatgatctatttttgtctctacattttaacctcagatctactcaccatcatcaggacgtgctaacttaagtttcctttttccaggatattcaagtctgattttggattccactggctctactttatttgctaattgcacagacgataacatctacatgtttaatatgactgggttgaagacttctccaggtaagatattagtcattcaaattctcttaccaggaaagcattatgggctttttttggtaatgataatttaatgggctttcttctaaactgaacttattaagccatatgaggactttggcatctttgattacatccagtgataatttcataagtgtacattccttgtgatgatttcataagttagctgaattgtgctttacatggtgactttattttaatagagagtatctcctgaaattatgccctttggcctatatttagaattctctcaattttttatttaataagctgtggagtagataaagtgcttctgctcagcttttttcctctttaggggctgctggttaaaattagggggctgaaattttcatacccccaaaatagtttcagcctatctcagccttctccttaatgttagaggcccttttatttctagatgttttccccagcctcaccttttttttttcctcaaaactttaaaaatagaatctgatacttaaaactaataaataaatgata

SEQ ID NO: 6968 - DNA, 1260 bp, Homo sapiens
gaaaatgataaaagggtgtggttggaatcaagtgatgtatacctacttactggcaaattgacccttagatgattaggttagctatgatttttcttgatgagaatttagggactttgtatggctttcacttctgatcttcatgatcctctcctctttttcagtaacagtaacgagtagccagagtactcctgccaaagcccccagggcaaagtgcaatccatccaattcttccccgtcatccgcagcttgtgccccaagctgtgctggagacctccctcttccttcaaatactcctacgttctctattaaaacctctcctgccaaggcccggtctcccatcaacagaagaggctctgtctcctccgtctctcccaagccaccttcatctttcaagatgtcgattagaaactgggtgacccgaacaccttcctcatcaccacccatcactccacctgcttcggagaccaagatcatgtctccgagaaaagcccttattcctgtgagccagaagtcatcccaagcagaggcttgctctgagtctagaaatagagtaaagaggaggctagactcaagctgtctggagagtgtgaaacaaaagtgtgtgaagagttgtaactgtgtgactgagcttgatggccaagttgaaaatcttcatttggatctgtgctgccttgctggtaaccaggaagaccttagtaaggactctctaggtcctaccaaatcaagcaaaattgaaggagctggtaccagtatctcagagcctccgtctcctatcagtccgtatgcttcagaaagctgtggaacgctacctcttcctttgagaccttgtggagaagggtctgaaatggtaggcaaagagaatagttccccagagaataaaaactggttgttggccatggcagccaaacggaaggctgagaatccatctccacgaagtccgtcatcccagacacccaattccaggagacagagcggaaagaaattgccaagcccggtaagtcagcagtggtgggaagatacatttcctaacttaaaaggggccagacacccagatgtctcaagtcaggatgcttttttttttttttaaagaaagaaatctatttattcctagtgctgccaaattcagcacataaatacaaaacaaattttgcatgggccatatttttagtaaaaatgttttatgctaagaaactatttttgtttgtctgaaattcaaatgtaactgaatgtgctgtattttatctggcaactctacttact

SEQ ID NO: 6969 - DNA, 1453 bp, Homo sapiens
aatcttgagtttcttttcatgtacataaaaagcaatagccttttagtatagatagccctgagccaaaaagtaatagaattttctctagatatttaatacagagagtgtatagactgactctaagttaataatgtgcaaaatatcttaaacatccctccccttattcaacaattatgtatcagtgatcttgaaccattgttttatatttttcacctttgtaacctcatggaaagaggctttacatactttctatgtactatttacttagaagggagcccccttccagtcatgaaacttcatttgttttatccatatccctgaggactgtgtagactttatgtcagtttttgtcattatttgaaaatctattctgacaactttttaattcctttgatcttataagttaaagctgtaacaactgaaattgcatggatcaagtaagcatagttttatccagggagaaaaataaaaggaagccatagaattgctctggtcaaaaccaagcacaccatagccttaactgaatatttaggaaatctgcctaatctgcttatatttggtgtttgttttttgactgttgggctttgggaagatgttatttatgaccaatatctgccagtaacgctgtttatctcacttgctttgaaagccaatgggggaaaaaaatccatgaaaaaaaaaagattgataaagtagatgattttgtttgtatccctacccatctcctggcagccctactgagtgaaattgggatacatttggctgtcagaaattataccgagtctactgggtataacatgtctcacttggaaagctagtacttttaaatgggtgccaaaggtcaactgtaatgagataattatccctgcctgtgtccatgtcagactttgagctgatcctgaataataaagccttttaccttatctgatgtccttttctgagctttttgcattacctagaagcagtctacaaaaaagaactatagtagtcaagaatcccttctacttgttcattaaaatgtttattcccaaagttataatctatttcaagctgaaagagcttttaataaaaaacatcttgcttggatcagactttgagcatttaagatggcttggattacttgataaagcagggtggagtgatgtagttctttttctaaacaagtatttccagcacaaacttttccatttgaatacattccaagcactattgctaggatcccgtattagagtttgcttttggctgtttcaacacgggcccttaattaaattttgtgaggatgactgattagtgtcttcaaatgtctcttcatctggactgcacatttaactgatgttggatcaagaccatgtgtagctactcttgtgttgagggtcagcccattatccccatccccagccctaacagcttaaaacagctttaactcccatcttgaaattagcctatggccatg

SEQ ID NO: 6970 - DNA, 1240 bp, Homo sapiens
cagttgggactggtagtgtgtgagccgagttccccacaatgccttggcgtcacctcacgccctcctccttattcaaacaggttttctgtgaagtcttggctgtttccttctaattcccacctgaactctttccatcctaggggaggccaacacccttccccacctgcgcgcttgcttaacctgcacttcctatcttgcgtcccgtgaagtagagtccttcactcctcttccaggtttgccctttcccggtcttgctttaacaaccgcacgaaccttccccgaccttcactttcccgagtgtcagctcctctgttcggccacttttagctagtcctttacttttacagttataaagccgtctgcacccaccttcttctcaacttcacttcccattgattgcccctaagagtcatcagaccaggaatccgaatgcaaacaacggttaagagttagctggcctttggatgtatttataaagaaaaagcctaaaatttgaccagtgtagtatcttattcacaggatcgttagctttaaatggtatcctttagctcaaggaatagatttaaaatattctgttgtctgagccgatacacatggtctatttggaaatacgaaggagtaggtagtgttgctttgcagtcgaatgggaacttagtttgccaggcagtgattccagggactttgtaggtttgtacaggaattcaaattggtatccgtgcctaatgccttgcaggagaacttggcactctttttggctcacttttcccactaggtttagaggattttcgatgttatttcctggtgttctagtttattctttgtgtattactcatgcttaattttataattttaatgtccttgctttttatgagatagaaatgttggaacaagatgataatgctcctacatatttagataaaatttgcaacctgacggaaatccctatcatctgatgttcagatttttcaattcatttgaaaaagctgcagcatccccttcaaggccagtctggttctcatttgtctttgggcctgtgaatccagccttagtttggcaaggagtctaaagaaaaccccagatcaaatcacagttgacctacaacagctccagaaccctattgagaccctaccttgccctgactcttggagtgcttctaaatcatgacatctcacagttagaatcaaactggcttttgaacagagattttgagatattagtctgtgctatcgaatttatcatt

SEQ ID NO: 6971 - DNA, 1236 bp, Homo sapiens
gaacacaccgattctcattttggcaagattttgaggttgtttggagggtaagtcaggagtggtaatggttatgggaccagataagaggagcaattagcatatcattgctgtagtccagatgaggcatggtgagagtctgaaatggcagcgggaatgacaagaatagatttcaaatatgttaaagacgccgaatcagtaacatttaatgattagctggatatggtggcacataatctccactactctggaggctgaggcaggaggatcacatgagcctaggagtttgagtctatcttgggcaatgtagcaagaccatatttctttaaaaaaatttttttaatgattgattgtgagtaatgagggagagagaagagtccagtataaatccctgaatgatggggttatagatgggcacatttctcactagatttttggaagaagttttacatatgtgaatagcttctacaaaattaataaatatataaaagtaacttctgagtaggttatttctaagtttttctttatttttatttatagatgccacttcaaatgaacaacaagagcttttctgtcagaagttgcagcagtgttgtatactgtttgatttcatggactctgtttcagacttgaagagcaaagaaattaaaagagcaacactgaatgaactggttgagtatgtttcaactaatcgtggtgtaattgttgaatcagcgtattctgatatagtaaaaatggtaagcctctagaattatgttcctcagatttatgtaaatttaagatctgaggtataataatgaattgagactgattttaaataaatgtacaataattaatacatcccccaaattttagaaaatagttcataccccatccattccaatgataccatcattgcatatacaagtttgggaattgagagtcatagtggctggtggcttccatattggatagtgcagatctagagcttaagagaagggtttaggcctgggattatacagattgataggtaattaatgtcatggaggtgaatagttactgagaacttttatttttatttatttatttttgagacggagtcttgctgtgtagcccaggctggagtgcagtggtgcgatcttggctcactgcaacctctgcctcccagtttcaagcagttctctgcctcagcctcccgagtagctgggattacaggtgcccacgaccacgcccagccaatttttgtatcttcagtagaga

SEQ ID NO: 6972 - DNA, 1919 bp, Homo sapiens
gcaagtagtaacgtctagctggtacaggagatgcacagactcagtacatttaggagagtgacaagaagaaattaggtgctccaggtaagtggactccaaagctttagcagagggatttaagtgaaatgtgggtaagtaatgtgttctccagtaagctgtcaaacagcacctctctttgggttctgaaataatttctgattacaaaaattttggtttatctacagagagaaaaagaaggaattggaacgtgaagaattatggaaaaaattagaggagctaaagctaaagaaagctctagaaaaacagaatagtgcttacaacatgcacagtattctcagcaatacaagtgccgaataaaaaaaaagcctcccacctctgccggataggcagagttttgtatgcttttttgaaatatgtaaaaattacaaaacaaacctcatcagtataatataattaaaaggccaattttttctggcaactgtaaatggaaaaatatatggactaaacgtagccctgtgctgtatcatggccatagtatattgtaacctttgtctaatcattggatttattgtgtcacttctgaagtttcacagaaatgaatgaattttatcatctatgatatgagtgagataattatgggagtggtaagaattatgacttgaattcttctttgattgtgttgcacatagatatggtagtctgctctgtatatttttcccttttataatgtgcttttcacactgctgcaaaccttagttacatcctaggaaaaaatacttcctaaaataaaactaaggtatcatccttacccttctctttgtctcacccagaaatatgatggggggaattacctgccctaacccctccctcaataaatacattactgtactctggaatttaggcaaaaccttaaatctccaggctttttaaagcacaaaatataaataaaagctgggaaagtaaaccaaaattcttcagattgttcctcatgaatatcccccttcctctgcaattctccagagtggtaacagatgggtagaggcagctcaggtgaattacccagcttgcctctcaattcattcctcctcttcctctcaaaggctgaaggcagggcctttccagtcctcacaacctgtccttcacctagtccctcctgacccagggatggaggctttgagtcccacagtgtggtgatacagagcactagttgtcactgcctggctttatttaaaggaactgcagtaggcttcctctgtagagctctgaaaaggttgactatatagaggtcttgtatgtttttacttggtcaagtatttctcacatcttttgttatcagagtaccattccaatctcttaacttgcagttgtgtggaaaactgttttgtaatgaaagatcttcattgggggattgagcagcatttaataaagtctatgtttgtattttgccttatgtcatctttgcttcttttagctctaagcttaggcatacaggagaagtctgcccccctttttacatacatatgtgtatttatagaaacttttaagacaaattgtgggacgaagtctaatttaaaaataggaagattgtgtgccaaggttgagtgttctagccctttaccaaaatatgttttacagaatatttgcataaaattctaagttctaggatatctttccatcatctttcatatccttgtatgttaagaggatgggtttaatttactttgaagctaatttttcataatccataataaatagcacttctagtgaagagcagggagcctgtggcacagttagaaatcaggtattattggctgggtgcggtggctcgcgcctgtaatcccagcattttgggaggccgaggcgggccgatcacctgaggtcaggagttcaagaccagcctggccaacatggtgaaactc

SEQ ID NO: 6973 - DNA, 1210 bp, Homo sapiens
cctaattggctgcctttttcactgtgctgaccagctgttcaagccacttcagtttgagtacaacataccaacatgacactactcacccacaaaggacagcattgggatcaggctttcagatgacctctaagatttttcccatttattgtactcttgttacaaagtactttttaacacatgcagtcaatggctataaaaactattctgtgtacagattctacccagactttggtcttagaattatgttctaattaaggagcctggttacaggttcattctgtcttgagttcttttctgtgctgcctttctatcatggataaatgctaacgctgtattttttcactccaacttgagatagagtagttttgtacccattgccttttttttcttttaaactctctttttttttttttcctgatgtgtaactttctagtaagataatttcatcatgtatgttactggctatttcatgatttcatgtatcacatcgtatattttgccttgaagattcctgaaataaggaaatctataataacttcagatagcctacatgtccccatttagtggagacctcttgaatgctatttgaattctgcagtatcatttttatgaccattctcctttgaggaatactatgcccaggtacatgctctatcagtgtgccgggagagtggattcttttcttcactgcagagtcatcacactgttagaatagtctgctcttttacatgctcaggtagggaaaataggaccaaatatatttccacagtgcctaccactgtgtcatgtttacagtgagagtttaaatattgttgatgtcctgactctgtgagctcatagggagtatcttcatagtaatgacatttgatcagccataaaatttacattatgttcatatgcacccaaaaaagctagtcaggtaatgaatacccttgaagtgaatagcaattttgatttaggcagtgtgttaggccatccttgcattgctataaagaaatatttaggctgggcgtggtggctcacgcctgtaatcccagcactttgggaggctgaagcgtgtggatcacctgaggtcaggagttcaagaccagcctggccaacatggtaaaaccccatctctactaaaaaaaaaaaaaaaaaaaaaaaaaaaaaaaaaggccaggcgcagtgctgtggctcatgcctgtaatctcagcactttgggaggcca

SEQ ID NO: 6974 - DNA, 1287 bp, Homo sapiens
ttcctaaactgctcccagtaggtcagagtctttgcggttttttttccccacaactagggccgagtggccttggaacggtttgaccatccacagagcccagttggcttgtaggtgcccgtggacaattttgtattagcaaatccagtaagactatggttattcttggtggcggaaacccttgccacttcttttctctttctccagcacttggaggttgggagggaactctggagggcagatctctcagctgaagtttcaaatggattgaggtgtttgaggagggaagattctctccctaattcctccgaaaccttgacttctgagttgcagggctggggaagagattgcagggtctactgtgtaggaggagagggaagagaggtgcaggacatgagaataagaagaagagctgtgagaggccacaagcactggagcgccaagccccagcttccctctctagattccagctcccgccattctgccacactagaactcaggacagctgtgttcctggaggtatgtttggagagaagcagcttctcagcttccacccatggccttcgccaagcagccttttctctaggtaatcttgcttttggcgaggaaatgagaaagtgacaaatatggtcttgacccaatcactccacaaactccgggaatcttactgtaagatggccaggactagggtttggtgactctgtccctgtgctattctgtcagcattacataaggccatcgcgtcatttctaaatgtgttgggtgtcatgaggaagcttgggaggggcccaaagggtggaaaattaccataacaggcgagaggcccatcagctgtggggtcccagtccctgtctgccatggataattttagtggcattatatccccatccacctcctccctccagctggagcgacttccagccttgaattcctctccatttttgcacttgtctaaataatccctttcgagaggaggatcagtgtcactgggttgacaagaatcagccgagggggagggcaggtgaagatgactgcgtagcatccgctgagaccaagtttcaagagggaaaccaggactcccccacccttccacccacgggtcctttctcacactgctcctctgggagtgtgtaaagcacctactacactgaattgtcaagttttttcctgtggttcgtaaagagaaagggagagggaggttgagattcatgtttcaaaggccatctgtgaacttaaaccaactccttcccagccccgggcctcagaacccttgcagctcttcactaaggg

SEQ ID NO: 6975 - DNA, 2111 bp, Homo sapiens
tggagaaaagacttgtatgattaatttacaataacccgttgacaattttactaaatatgtgtgtgcttctttaatgtaggagctgaagttgctttggttggtggcttgaaacttctagctagactgtcacttcttacagaacaagacttatggactgttaatggacttccaaacgaaaataactcttcagatcatctgcctttattggcaaagttcagacttgagctctgactctctttgatcacatactaattttctttccaatttgtattgtttttcaaagaatgtaaagttcttaagtgtatgcatgttgtttatttttgcactgtggagattctgaagcggttatgttagatgctttgaaactccatatcagaagaaataactttataacaattttttttaataatgaaaaatattttcgtgacaagtgagctctaaattctctttattgtaaaagagatgtaaaggttttatattctaaatcctagtaaaattgacagtgatttttaaatataatgcatcttcctttgtctgcttagtaaaaaatttcatttcataattttggcaagctctgtagtggatccaaagtatctttgagttcttgcaaactacaagttgtttcctttccagaaggcttgatttcattaggagacccctctattgagttctaaatagtttatcttagaaagccttgggtcattcacaggtatccaaccagccattgtttagtttgtttttgaaggggtttgataatgctttttaagttgtacagaatgcttaatccatcttattactgtcctgagccatgtaatatgcctgcatcgtgttggggaaatgtttgggaaatataagccagcataacgtgtaaagctcactctttcaccctggaacagacaagaggtgggcttaatagaggcagagactggggatatacctttgtttccctagcatttttatttatttatttttattttattttattttttgagatggagtttcactcttgttgcccaggctgggggtgcaatggcgcaatctttgctcactgcaacccctgcctcccgggctcaagcgattctcctgcctcagcctctcgagtagctgggattacaggcatgcgtcaccactcccagctaattttgtattttcagtagagacagggtttccccatgttggttaggctggtctcgaactcccaacctcaggtgatccgcccacctcagctctcaaagtgctgggattacaggcgggagccactgcacatggcagcattttttaaaaattcagttttaagatctctggtttaggggagagattttattttactgaaccagttctatagaaatttattttattaggaaatttgtctttggaacaaagtggcagctataaaattatttttgttaagcctcagaaatatgaggaagcctgtaaaactctagtggggagatattaacttggagacctaatgctctgtaaatagtcatttaaactgttggttttagtggttttgtttctaaaatgttttcttttaccgtgatgcaccagtatgagatggtgctgacactttctatgaagtggttatgagcaggtttaataaatcctctatacaagtgtttgaatcaattttaaaacataaaaagtggaaatttccttttttgtagacagtaggaacaaggaattatatgcatttttactaagtagtaattttacactgaattgtaaatgtttttacagtgagttttattaatagaatgcttcaccttaaattggaaaacaataatagtcttggactaagtctttgtactaaagcatttgctataattatttttaaaaaaacaaacagatgaaaacctcagagaaggcatgtggattataagatttgtctagtaaaaattgtaattgaatatgtttaaatatttaatttctcattttggggggtttttatttttttattttttagatggtgtctcacgctatcgcccaggctggagtgcagtggcgcgaactcggctcactgcaacctccgcctcctgggttcaagcaattctccttcctcagcctcccaagtagctgggattacaggcatgcaccaccatgcccagcta

SEQ ID NO: 6976 - DNA, 1147 bp, Homo sapiens
gtatgtacttttgtttaaaaattgcctaaattaattattttgtctttataaatacattattttgagaaaggatacatgttttgacatctaactcatttgcaggccaattgtaattggtttttgaagagatgaagtgacattttatatagtataaatcttctccatactgggttgaatatttttccagtatgaataaaaccatacttgtttaaaatgaaaatttgaaaccaaaacagaatagtttgaggaagaattgccgctttatatgtaatatatttttactttattttattttatattattttcctggtcagcaggaatctgccttatatttttaaagcaaatattattagttaatttcagtcagttaatcatattgtttaggacatgtgtttgcctttgcatgacaattttgaacactttaatgaaaggattatttgttgttcagatatctgaacctaaatggttatgagatacatgtttaatttttttctctctagataattgtatggaagagatacagtgattttaagaaactacacaaagaactatggcaaattcacaaaaacttattccgacattcagagttgtttcctccatttgctaaaggaatagtgtttggtaagtgattattttgaaattgtaatttaaaaaaataattaattttgtatatatactgaactctaacataactacactatgaagtcagaagcccttttacttattgagataattcatattgttcaacagcacttgaaattgtcttttcttgttcttgttatagttttgtgtacccagaatatatttactcttcctatctatgaaacaaaacaacttcagttccaaccaaccaaataaaaaaccctgtaggaacataagaaaaggtgatattcagttattcttatagttttaaaattctttctttttttaaattaagtctcattttgtatgtttccctgacactttgcttatagtatgaatggtgtggttttctagtatttgcttcttgcaacttctttttgataccttagtattcttttttttttttttttgcctcatcagttttcaaatacctaggtaacagtattttatattaaagtttctgtgtcaaaataattggtgtagtttctgtcccctgtctggattt

SEQ ID NO: 6977 - DNA, 1251 bp, Homo sapiens
tttttctcacaagcatgctgttatgtatgctgacagcatcacacgttgaatttagcataaaagctttttgcttcaagctgagatttttgaccccactaataatacagatgttctcataatttcctctcttcagcccctttataaatcaaaaagagtagaaaagggaaaattatatgagtaattacagtattagattactatagaaaaccatttcacttctttaaaattctcttttcatctttagtttcgaatcaccagcttcttaaatgtcaactttcttaaattgacaggctctaaattatgaatgtaccatttatttatcggttgacacctttgtctcttgttttatcagaaacattttcttttctactgagagtactgctgattctaattgtagagattagatttgacttcagaagtttgcataataagcaaagcaactaagtgataggcctgctgctgctttctgatctgtggacgtaaactatcataaaccagtgtttgatcattcttcccttaagtgttgattcttatttaattgtagggcgatttgatgaaactgttatcgaagagagaagacaatgtgctgaagacctgctacagttctctgccaatattcctgctctttacaatagtaaacagcttgaagactttttcaaggtttggtagtctttctggaatattttatatcttattaaatacttttgtaatttgtagtaaagtaaaataaaaaatgccacttttgaatttcgttattcactataaaagtagaaattaatagctctataataatgtttatggcatatttcctatttttagtatagaaatttatgctttttttttttttttaaaggaactggttctgctctgttgcttagactgttgttcagtggccattgacaggtgtgatcatggcgtactatagtcttgagttcctgggctcaagcctcctgttgcctcagactcctgagtgtttttgattcatggatcttaaaaaattgatgcaaagagcttagagattgtttaactcactctgtcataattgaaatacattaaaaaaaatgaagcatcataaaactctagtacttaccttcactttttgaagtgtctttcagtggcagattactcttggaatataagccactgtaagtctatattaaatttgttattatgttgacttgtataaagatacaacaaaaatataaaactgcacagttttagagagcaggccagtgcaaattatattactgg

SEQ ID NO: 6978 - DNA, 1149 bp, Homo sapiens
tctaccctgccacttcacctcctgggaatccttatcacatatttgtcctgaaaacattatccacctgccctgtgctttataatatcagcagtatatctttttatcttgtggatgatgtgcctttatattttgagaaaaatttccagtaacagatttgatttgcatggacagaaacttgagcaaatgccaaactagcaggggggccattattctgctctataaataagtttaaaaaagaaaaaacacacacacagaaacctgtgaatcaacatgttttggtctaattgaggggaaaagcaagacagataaattttgaaatgcaaatgatcaccttctgttatttaagtatagtttctgccaacttagtgatcctagattttaaaaagtcataattatttcaacaatgtatactcccaaggatgcccaagattcacaagtttctataacaaaactgagaacttttaaaaaagttgccacttttttatattaaagaaaacaaatccaacaacaaaaagacaaaaaccatggagctttctctggctacatctgtgaaaaagccagcgcataaatggctgcagctgcagacccatcaagagggtcttgagaatacgaattcactgatcaaacccagccctgttttcaaagtagaagccattccttttaggttcactttgtatccttagattatctaggatgattctctagaaaggttttattttaaataaacatcattcatggtaaatgggttcctttcataccacagaaacacagaatggagttcaggaagagaaaaggcaaaagaaatagtccacaaagtaggaacagattgtatagcatgacaatataaatataacactgtctggtttccacattaggagacttgtagatactttattaggatacttttacacaggttcttctgctttttttgttgtgagggattagagaataaaaactggagtaaattggttatttttctctggaggactttcttctggttactctgattttatatctgtttttacacacatacacacaaaagttttagccaaaagattttatgtgctttatcatttgatttattaacttatgataataaagaataaacctttgtttatagtgttttaagtataaaggaaaaataaaatg

SEQ ID NO: 6979 - DNA, 1201 bp, Homo sapiens
aaggttgtcaagaaaaactagatgttaggagaaaggaaaatttaattgcagttttttttcttagaattgactgctgtgagagttccatatgcctttcttcattgctgcttttgtcccccgtgagctaaaaagatggagtgacatcaaatcaaccagaaaaagtatgcctttgtgacatcccatcaccacatgccaacaggtatatattccccattaagttcttcggaataggaatcctctgtttcaacctggccaggtgttgtggtggctgtactctagttagactcggaatatctggggatggagggcttcccctgtgtcttctacttcaaggtctgaaggctcagtgaaggagtataatctgctgatctttgtagattctggagttttgttgtatgtcctggaaagaaacccattagtattacatgtattttcagtgaacagagcttataacccttattataagaagctcatcaataagcaaaaagatacttgtttcctttccttggaggtttttccatccttgggatattctgctgttagggatgttttagcaagtggtctcagttactggtttattgcgtgatgaacaacatcagtatttatcttttatctctaagccccaaggtgggcactgttagaatatgtctcatgtggacagcatatagatctggtgcgtctttgaggtcgtcagagctcatgggcttccctgaaattcatccactgtccctgccgtatgctacgggaatattcattagtgtacaaaatgcagggaggaagtaggtttaatattcaactttctagccaaagtttatattgaaacccaaaagaaaacatttaagagttgttccacatatttcacttttaaaaacaaatgcctttggttctttagcacattttgcattccttttcacatctccagtaaatgccaacatatctcctgttaaattagcagcagccatttaaagtcctttcggtggcatctgcataataattgcccagagatgctttatatctgggaagcaagccaaggaataaaccttgaagcaaagtgtattaaattagttatctagttagagcttttggaatgatttcctgatgatgtatcaagtctgaagctggagctgtcagtgtctattgctgcagtttggatttgaagggagaaaatgtaaaatggaggaaaaaaaagttaccatctcac

SEQ ID NO: 6980 - DNA, 1869 bp, Homo sapiens
gtggaagctgagcattttgttagcctcttatttaataattacaaagagatttcatatttaggctacctgaatattcttagcaagggaaaaatatgaaatttaaatacattacaaattgtaattgagccgaagggtttgtcttcaagataaatgcctaaccccagtgtcttgcccataggggccacttactgaacgtataagtatgttgaacatttgaatgaagagagaaagatgtagtgggaaattcaccactttaagagatgtgtttagcagaggccacgcatcagtttctaaaaagtaataactaaatctattctattttgattctttttgaaaaataaaatgcatgcttgttatgtattataattacaggctattcaaggccgaaatgagagctgtgacatatcaaaagaacatacttcagaaactacagaaagaacaccaaagcatgatgttcatcagatttgtgataaagatgctcagcaggacctcaatctagacattgagaaaataactgagactggtgcagtgaaacccacaggagagtgctctggggaacagtccccagataccaattatgagcctccaggggaagataaaacccagggctcttcagaatgcatttctgaattgtcattttctggtcctaatgctttggtacctatggatttcctggggaatcaggaagatatccataatcttcaactgcgggtaaaagagacatcaaatgagaatttgagattacttcatgtgatagaggaccgtgacagaaaagttgaaagtttgctaaatgaaatgaaagaattagactcaaaactccatttacaggaggtacaactaatgaccaaaattgaagcatgcatagaattggaaaaaatagttggggaacttaagaaagaaaactcagatttaagtgaaaaattggaatatttttcttgtgatcaccaggagttactccagagagtagaaacttctgaaggcctcaattctgatttagaaatgcatgcagataaatcatcacgtgaagatattggagataatgtggccaaggtgaatgacagctggaaggagagatttcttgatgtggaaaatgagctgagtaggatcagatcggagaaagctagcattgagcatgaagccctctacctggaggctgacttagaggtagttcaaacagagaagctatgtttagaaaaagacaatgaaaataagcagaaggttattgtctgccttgaagaagaactctcagtggtcacaagtgagagaaaccagcttcgtggagaattagatactatgtcaaaaaaaaccacggcactggatcagttgtctgaaaaaatgaaggagaaaacacaagagcttgagtctcatcaaagtgagtgtctccattgcattcaggtggcagaggcagaggtgaaggaaaagacggaactccttcagactttgtcctctgatgtgagtgagctgttaaaagacaaaactcatctccaggaaaagctgcagagtttggaaaaggactcacaggcactgtctttgacaaaatgtgagctggaaaaccaaattgcacaactgaataaagagaaagaattgcttgtcaaggaatctgaaagcctgcaggccagactgagtgaatcagattatgaaaagctgaatgtctccaaggccttggaggccgcactggtggagaaaggtgagttcgcattgaggctgagctcaacacaggaggaagtgcatcagctgagaagaggcatcgagaaactgagagttcgcattgaggccgatgaaaagaagcagctgcacatcgcagagaaactgaaagaacgcgagcgggagaatgattcacttaaggataaagttgagaaccttgaaagg

SEQ ID NO: 6981 - DNA, 1142 bp, Homo sapiens
catgcagatttacttaagggtagagtggagaaccttgaaagagagctagagatagccaggacaaaccaagagcatgcagctcttgaggcagagaattccaaaggagaggtagagaccctaaaagcaaaaatagaagggatgacccaaagtctgagaggtctggaattagatgttgttactataaggtcagaaaaagaaaatctgacaaatgaattacaaaaagagcaagagcgaatatctgaattagaaataataaattcatcatttgaaaatattttgcaagaaaaagagcaagagaaagtacagatgaaagaaaaatcaagcactgccatggagatgcttcaaacacaattaaaagagctcaatgagagagtggcagccctgcataatgaccaagaagcctgtaaggccaaagagcagaatcttagtagtcaagtagagtgtcttgaacttgagaaggctcagttgctacaaggccttgatgaggccaaaaataattatattgttttgcaatcttcagtgaatggcctcattcaagaagtagaagatggcaagcagaaactggagaagaaggatgaagaaatcagtagactgaaaaatcaaattcaagaccaagagcagcttgtctctaaactgtcccaggtggaaggagagcaccaactttggaaggagcaaaacttagaactgagaaatctgacagtggaattggagcagaagatccaagtgctacaatccaaaaatgcctctttgcaggacacattagaagtgctgcagagttcttacaagaatctagagaatgagcttgaattgacaaaaatggacaaaatgtcctttgttgaaaaagtaagtggctatatctgtttatgtttaaatatgtagtcatgaggcaggaaaccatattttcttctagacactgtgaattgtatttacttctagaccgtgtctgctatattggaccaaactttgtaaaggctttatgtttactgggtcttgaattgcagaaacactgagttggctctggcagtagtcactattctggctgattctttgggacatgttcatggattggaccaggtttttaatgtggcacctacataagggcaaagctttggtttatgcacagttccttgttctagttatat

SEQ ID NO: 6982 - DNA, 2167 bp, Homo sapiens
aagttctctgttagatggggcctgttctcaaggaagaggaaatacttcaattatatataactcctagagaagaagaacttaatttaaaacttagtgacatagtgctttatttttcatgttgtggaaatgtgaatgtgattgaacctctaacagagatgtttgtgttgcaggtcaaagttgctcagcggagcccagtagattcaggcaccatcctccgagaacccaccacgaaatccgtcccagtcaataatcttcctgagagaagtccgactgacagccccagagagggcctgagggtcaagcgaggccgacttgtccccagccccaaagctggactggagtccaacggcagtgagaactgtaaggtccagtgaaggcactttgtgtgtcagtacccctgggaggtgccagtcattgaatagataaggctgtgcctacaggacttctctttagtcagggcatgctttattagtgaggagaaaacaattccttagaagtcttaaatatattgtactctttagatctcccatgtgtaggtattgaaaaagtttggaagcactgatcacctgttagcattgccattcctctactgcaatgtaaatagtataaagctatgtatataaagctttttggtaatatgttacaattaaaatgacaagcactatatcacaatctctgtttgtatgtgggttttacactaaaaaaatgcaaaacacattttattcttctaattaacagctcctaggaaaatgtagacttttgctttatgatattctatctgtagtatgaggcatggaatagttttgtatcgggaatttctcagagctgagtaaaatgaaggaaaagcatgttatgtgtttttaaggaaaatgtgcacacatatacatgtaggagtgtttatctttctcttacaatctgttttagacatctttgcttatgaaacctgtacatatgtgtgtgtgggtatgtgtttatttccagtgagggctgcaggcttcctagaggtgtgctataccatgcgtctgtcgttgtgcttttttctgtttttagaccaattttttacagttctttggtaagcattgtcgtatctggtgatggattaacatatagcctttgttttctaataaaatagtcgccttcgttttctgtaagaatgattcctaagtgtaaaggcattcgaatattggtactatttcttgctaattacaacagcctcttatacacgtgaaaatgtttgaacaaatgatacagatctttaaacaaatgatcttagcatctttagttgtattaaaagacacaatttggaatacgggtcataaggagtatatgggaatataagacgtccagcccagtgcctcctacattctgtgtccccattaaaccacatcatcaaggatacaagtatgtggtatttcccagctcacttgatgatgatatagttttgaaagcatgcaggcattataagccatgtcagatccaaaaacatttgaacaagttcttacatccttgaatcagggtaaaaaagtttcccagggcatgcgctagtaaaagatcatttgttcttggctttcagtccaaattgatgcacaaattccgataagcaccatcatttatatttaaaagttgtccttcgcaaggtggcctctgttgttggataatgcttcaataatattaagctacttaatattcatcagctgaaagtgatatcctgactttcctcttgtttcttcagttgcttggggttgaggtctggtgcaatatccttaccgtaaatcatcccagggcccccatgtgctcaagggcatgaccccgagcagacattgttgggatcaggccatcagctttattggctgtctccagtgattggaagattccactctgtaggctttgctgggtagcatcgtgggtccttgaaagcatctctttgtattttcctaggtatgccatagctgctgctcttattacttggatacttgtttttttgttctttgtttttttttatttgagagggagtcttgctctgtcgtccaggctggagtgaagtggcatgatctcggctcgctgcaacctctgcttcctagcttcaagccattctcctgcctcagcctcccaggtggctgggactacaggcatgtgccaccatgcctggcagttttttttgtatttt

SEQ ID NO: 6983 - DNA, 1193 bp, Homo sapiens
aaatttaaggaattctgcagagataagtcagtgtcacctcagccccactttagttagaagagcctgattttacctgtgttataatggacttctgagcaagatttcattttaaaaaatgttcccctgtcaaataaaaaatgtttgaaagtatggggaatttcagttctaaagcagttaaattattacatagtacctaacacataatacctgtaccataattgtaaagagtggctggcagactgaattaattacccattaattcagtaacctaaagcttatttattgtaaacagtatgacaataccagaaatctgttgacagaattttgtctttgtctttgtttttttcattttcattttattttttaattgtaattaaattatttgtaataatttgctatattggaagatgtatttcggctttaatgaaattcacatttttgtttctttgtcacaatgtgatatttttaatttttgaaaggtgaacttaggaatgtatttgttttcttcttctctttataggtattcctagtcgtaaaataaacaacacagtcagatctgctgattctaggaatggtctaaattctacagaaggtgaagcccggggaaatggtacacagcctgttctctctggaacgggagaagaaactgttaggctaggtaagcaaagattacagaaatagaaaaagaaaaatacgtatgtttttagtgctgggtgatattgagtaattacttttaaagatttttgcctcatctccttttttatccagatttatcatttatatcttggaaaggtctcatttaacacttaatttttatttaaaatgttgtgtaatcttctatcttctctgaatctttagaacagggttgccaaaatttatctggtaagagccagagattaaatattttaggctttgtgggccacgtgttctctgtcagacctactcaactttgccattgtagcatgaacacataatggacaatatgtaacaagtaagcatggctgggttctaacaaaactatttttttttttttttttgagacggagtctcgctctgtcgctcaggctggagtgcagtggtgccatcttggctcactgcaagctctgcctcctgggtttacgccattctcctgcctcagcctccggagtagctgggactacaggcggccgccaccatgccagactaattttttg

SEQ ID NO: 6984 - DNA, 1370 bp, Homo sapiens
ctttacaagataaaattggacttcatttagtatctttttaacagaattacttggaataatgagatacaataatcatatctcttttgacattttggaaatttttttaattttacaagtacatttaacagatcatttataaagcaggagtccattttaacacttaccgactttttttggtttggaaacatattaccacgtcttaataggatggtgcccatataggtgagcatccctttagatcatgggaaccagcagactgcattcctaatcttcattatgcctgagacttgtcttacaatgttacctttaagtgaatcacataattgtctttggaacttggtctcccaacacttattgtgattgcaaagtgtttaccagatatttgatgaggtgctatgtttgtgaaaaacatatcatgtaattcaaaaacactattgatattgaataccagataccactatgtagtaagtcttttaggatgattttaatttagtcgtgcgtcattttctgattctcatcattgggagatcttaaatcttagcaagcattagcaatattaaatgccaaaattccattgaaactttcaagttggagcaattgtctgtgtttgaaaagatgaaataaaaataataatcaagggcaaagctttgagtgcccagaagggaaagctgtaccagttgctaacctgtcttgtttcaggagccaccatgtttttttttcagtgttaacaacaatcatgataattaaattaaaacactagtttgttcacttgtaggactgcagttctgaattttgggttaaaggttttggctgctgtaagaatgtgaatttgaatgtattttgaattgtaagagcaaaagaacgtttttgtacaattttttttcatttaattggaatgatcttcaggtttctacaaatagggtaattgtaaatttaaagcattagcatttattggtgaataatgtatatatccccattccaagaaatataagtgagtgaagttgaaataaaatctttaaaatttactatattgccagtggtttcacaacagttctcttgtatttatttatcaattaaatcaaataaaaatgattatgtcaatgcgttttcagttatttaagtaacagttctgtttaaagtgtgctatatatgtttgttcatttctttgcttcttcccataatttaaaaaaaatggggggagggagaacttaatatatgtggaaaataagttattatcaatgaaagaaaatattaggcaaagcataatttcaaaattactaagattgtaattatcttacacccttcttcctctttatgacagttatgtgaaagttgggtgggcaagtaagaaaatgaaagaaaaaactaga

SEQ ID NO: 6985 - DNA, 1415 bp, Homo sapiens
tttttttttccttacacaaaatgattttaggactttaaaaatgatccacttacctatataacatgttaggaacattgtggcataaagtgaaatttgcgtgattgttaattgttgctgttaacaacacattaaaaatcagtttgctatttttgatgttccttttctcctcctgataactatttagataggtagagcaggtgtagtccaggtttgaaatgagggagatataactggagttcaacttcttttcagccactgtgttttagccagtttatgggagatttgagggtactgcaaagatgtctttgttgtgtcttgatgtgctgtgagcgtaggttttggatagtggaaaaacattctttcctatcttttataactgagcaaagttcctagtaggtttgcaaaggtatcatagcctgaaaaaaggttgggagacctatcctttttgcttgccagtttaatatagaactcaaatgttccttctgcagaatagaattgaaggagttataaatactgattacttttccttttcttaattagattgttcagattccattctgtggggaaattgactgtgaggactggatcaaaaagaccactgccaggtaaacctaattaactggcaaaacttttgaaaaattgcaatggaaaggaatagcaatttgcagcataaatgagtggaattcttatttgttattaatttcagggatcaagatcttgaacctggtgctccatccatgggagctaaaagcctttgcatccccttcaaaccactctgtgaactgcagcctggagccaaatgtgtctgtggcaagaaccctgccaagtactacaccttatttggtcgcagctactgagggatgaacgaaagccccctcttcaactcctctcactttttaaagcattgatattagtatcttctcagatacagaccgttttatgattttttaaaaagtaaaagttctaaaatgaagtcacacaggacaattattcttatgcctaagttaacagtggataaaagacttttctgtaaacaactccagtaataaatatcatgaactaatatggtttttgtattcatttgtttctgaaaaatgtgcattatgtactatgaggaaatttctacaaagagatgaagacaattgaaagccagatatctgttattgatctaagcactcccaacatgtctcagaccctgaaccgccagttataccctacactgataggtctcgaagcactttctttccatagctcctaatacagaatctgaaattgtcctaaatctttctgtttaaaaaacaaagcaaacccacaaatggaaaaagcaacaataataaagatttcccttgaacttctgtctttctctagttagtatcaggtctttgaaataagggttacagtttctgtctgaaaga

SEQ ID NO: 6986 - DNA, 1193 bp, Homo sapiens
ttaacaatccttataatcataatgcatgctaaagataagagtacccagaatgaggacttttcaaccagagaataccactgtatcaggaatgagtcaaaaatgtgtcatgttactgatcccctcagtggcttgtagcctcaaaaagtcttcgtttaaccccattcctatgcaaatacgttttctggatgctattttgtgagaaaagttgggaatgctggtctagaaactactctgtttctccatgaagaacttctggggcagtagattttttttttaggtttatgccttcttactggaataggtttctacagtatctcagcagtattacctgttttttttttttctcttgttttttttggctttgcctttgttttttgggttttttataatttatggtagctaaagccatgaattacatctgtatattcaactggagacattcatatatcattttaactgccttttttatcttatagggagttcccattagacttgaagttgggccacgtgatatgaagagctgtcagtttgtagccgtcagacgagatactggagaaaagctgacagttgctgaaaatgaggcagagactaaacttcaagctattttggaagacatccaggtcacccttttcacaaggtagtttcttaaaattgcttatgtctctctctccagatcttccaccacctttgagatctttaccaaggaatttttggggttgccccaattggaagcaattgttccctccctctgaacccccatgctacttaatttgccactctctgggttttttacttgtattatggttatttttctaagtgccacctgcttcctactaggtttgcaacaatgaagtttctgtcccctggactaatttgggttaatttaaatctaggcttttatgagatataaatgtgagggcttcaggcattgactgtcatctgctgggtacacattggcagcacctgggaagctttagtaaataccagtgccttcctagagatactaatttaattggactggagagggcctggaaactatactgttaaaagctcccccaggggattataatatagccaaggctgagaacctcctgactggggttgggaatgagggatagaggaaggccttagggccgccctcacctatggagagagtcatttagaatcatagatctcaaggtagtcaaggcaga

SEQ ID NO: 6987 - DNA, 1730 bp, Homo sapiens
actatgttccattatttttgttcaggttctgcaattttgttatttaaaatgtatgtaacacctgttaaaagcaaaatcaaattaattcaaatgttcatggatttaagtaactgcttattggaatgttattattaaggaaataggctcttttaaatttttaggtgaaaatacttctggactttaatgtgtagaaaaaattatttttcaggaaatttgcattttgatactgtatatctttcttaacatttattttctcttatattctaaacatatatacattttaaaaagttatttgacttctttttacattgcttcattgaatatctttcttaataagttcacactggctgctttaaccttttcataaaaagaggtttttattgttcagattgcttttcccacacaattagtcttaagtagtgcagttttatagatcttaatgaataaatgtaccctaaatttgaacacatttacatttaaaatgttacaggtcttgcagatacttgacttatatgctcaggtatatgaagaactcctggcaattcctgttgttaaaggaagaaagacggaaaaggaaaaatttgcaggaggagactatacaactacaatagaagcatttatatctgctagtggaagagctatccaggtatcaaactgccacacaggattcgtaggtcactgtaagcacagtccatggacagatccaataatttcttctgtcatcacagaagtagactcttaaaaaataagtgtttcatgtactttcgtataataatttcaaacaaatctatcccattcctctgtctccatggttcgttaagtcatagtatgtatcctgaattactactaaaatatgaattcctttttaactgttgtaggtaaaattactgctataaaaggggctgcccagagcaaaatgcttgtaaatagtattttttgactaatcttaatctcttattatggtaattatgcttataattaaaaaccttatttaatgtaaaaaaagggagaaaaaaagtgtagtgccattttaaagcatgtgatcttatagtaatcattttcaagggcataataggttattaaaaatgaagcttatttttctctctctattttagggaggaacatcacatcatttagggcagaatttttccaaaatgtttgaaatcgtttttgaagatccaaagataccaggagagaagcaatttgcctatcaaaactcctggggcctgacaactcgaactattggtgttatgaccatggttcatggggacaacatgggtttagtattaccaccccgtgtagcatgtgttcaggtaaggaaaatattcctgtttatcactcattttataaaatacaagccatatttactaaaggaaatttgaaagggtgattttctgaatatcattcaggcagatttctctgataataaaaacaacgtggaatgcagtctggaccctagtgttttgtgactgtgtgtattatttatttattgtttcttactcttttaatttttaagctacttatataaacatttttagaagtcattttttaaaaacggtttatagtatgttaaatgagctgggcatgcaggctcacgcctgtaatcccagcactgtgggacgccaaggcgggcagattgcttgagcccaggagtttgagactaagcctgggcaacatggcaaaatctagtctacaaaaaattagccaggtgtggtggcatgcactgatag

SEQ ID NO: 6988 - DNA, 1175 bp, Homo sapiens
cacttaggaatatgatcttcagattctataaatgaaacatagtatgcttaagactgatttatgcaaactctgaaatcttaattgcgtagttattacatatgattgcaagtaactgccaaatgtttttaaacatagtaattcaaattttataatgcttgatgcaggtgactttaagttaataaatatatacatgttcctcatcaattgtatgtgaatctgttctctagttgattattagtatctcgatgtcagtgattatgttgtatttattaaccaatatatgtctggcatgttagaagctcaaataaatgtttgatttggaatttttccaaagaaaatttcttatccatttattacaaaataaaacaataaattattttataataatataaaattattatagaacaaaataatgaatttatggcagctgtggttaatatttctttgaatacttttaatcttatatctagaaatgcagatggaaaaatcatatctcttgatgcaaagttgaatttggaaaacaaagactacaagaaaaccactaaggtcacttggcttgcagagactacacatgctcttcctattccagtaatctgtgtcacttatgagcacttgatcacaaagccagtgctaggaaaagacgaggactttaagcagtatgtcaacaagaacagtaaggtaaccttccaaagaaaccatatttcaccttttaaattttcctttagaattaaaaaaattaattttatatatttcggatcctcagataaaatggataagatgtgtagaattttatttaaatcaaatgatgtaagttggccgagcatggtggctcatgcctgtaatcctagctctttgggaagccaagatgggtggatcgcttgagctcaggagttcaagaccagcctgggcaacatggtgaaaccccgtctctacaaaaaaaaacaaaaaaaaaaacaaaaaaaaaaacgatgtaagtaatgtttccattttatagatgataggaagtgaaacacagtgaagttgagtaacttacctgaggacaaacagtaaatagtagagttgggattcaaatctgaccctcgtatttaagccttacgccagcatgcctttcacctaagtctattacatgcttcttgcatcatatttcatatttatagcagggaaattatttcttc

SEQ ID NO: 6989 - DNA, 1257 bp, Homo sapiens
cctttccccagttatagagtttacctgaatgatatgttttcctataataccaatttattaaatggtcactggaggcaggttttttggtcatataatcttaagtttatgaatgaaataaacactaagtaggtattggaaaatgtgaaggtttcctagcctcttatctttattcagaagtatggcagtgtattcaaagagagggcaaatgattgtcagttctcccagtaatgaccagcttttccaaagtaaatggaaaactccatcgtgagatcagctttctcagctggaaatttggaggctaatataatgagtatctatctgttttttcttttttgatctaatatcatgtaacttccacaaccattttcaggctaaataagactgatggtctatgttacatttgcttaaatgcagtatcaagggttgaaaatgcacgaaaaaatgcaaaagatatactgatggttattttggtttcttactacaggttatcttggaagatgttgcaatgttgcatatcaaaccagatcaatttacttatacttcggatcattttgaaactataatgaagtatgcagagaagctaattcaagaagggaaggcttatgtggatgatactcctgctgaacagatgaaagcagaacgtgagcagaggatagactctaaacatagaaaaaaccgtaagccacattgttttatattttaattgatattcttatattgtgcttctttagtagaacgtgatttcttttttgtgaaagctgctagtttttttgtttgtttgtttgttttgagaaggagtctcgctctgttgcctgggctggagtacaatggcgcgatctcggctcactgcaacctccgcctcccaggttcaagtgattcttctgcctcagcctcccaagtagctgggatgacaggcgtgcaccaccacaccttgctaatttttgtatttttagtagagacggggtttcaccatattggccaagctggtctcgaattcctgaccttgtgatctgcctgccttggcctcccaaagtgccgggattacaggcatgagccaccgtatctggcaaaagctgctagtttaaatacatttgggtatatgactcatttgtcttagaaatcttttttcttcctctatctttatgttcttgttattttattaacatcacaactgcatgtgaatatgcccttagtatctcacttattatgtgtagtcttttgcattgtattcattcaatttgaaggattccttctgca

SEQ ID NO: 6990 - DNA, 1203 bp, Homo sapiens
gagtcaccacacttggccagccttgatttatattaaatcactgttattctcaacatcccagttatattttcatatttgcacctctgaatagacatgtaaagaacaaattagcagactgggcgtggtggctcatgcctctaatcccagcactttgggaggctgaggcaggtggatcacctgaggtcaggaactcgagaccagcctggccaacattgtgaaaccccgtctctactaaaaatacaaaaaattagcctgtcgtggtggcagccacctataatcacagctacttgggaggctgaggcaggagaattgcttgaaccctggaggcagaggttgcagtgaaccaagatcacaccattgcactccagcttgggcaacaagagtgaaactgcatctgaaacaaacaaacaattaacagatctattttttactatagtagaaaatacatggtaaatataataaagtttccatttttacatttcttcataagtctcatgacttactgatttgctagagcagcagtaatattttatctcgtgcttatattctagaaatgtgatattcacagatgtgaattctatacttcgctacttggctagagttgcaactacagctgggttatatggctctaatctgatggaacatactgaggtaagcaatgaacattttgttgtgtgtgttttgtcttatgcttctgtttttttatgggaacctcatcatttattgttggcttatgaactattctacttaaggatattaacagagtgttaattatatagaccaaggtacagaatgctcatcttgtttttttgtcacaaaaaaattctttttttgtaattcctaagtttgaacctttagtcccctaccagctgtacttttgggagcatttagtgccatcttggccttcacagattcctagcatttcatagccagatggggctgtatagatcatctcatccaactttcttactttacggataaggcagcaggcctagaaaagttaagtttgaacagggtaacacgcatagtttggatcccattttcttttctttctaagtgtatgccttgtttaattaattatttcagtagtaaattagctttatatacaatcatgtgcctcttaacaatgggatgcgttctgagaaatgtgttattaggcagtttcatcattctgtcaacatcatagagtgtacctacaaaaac

SEQ ID NO: 6991 - DNA, 1107 bp, Homo sapiens
aggttcaagcgattctcctgcctcagcctcccgagtagctggggttacaggcatgcgccaccatgaccggctaattttgtatttttagtagagacggggtttctccatgtcggtcaggctggtcttgaactcctgtcctcaggtgatccgcctgccttggcctcccaaagtgctgggattataggcatgagccaccatgcctggctggcactatactaatttctttttgtctccgaagggagaagcagattaatttcagtgtctctaactgaaagctgaacaaattcaaaaccagttggatatgctagtgaatggattctggattctgatttgttgctgctctgagacaaaagactacattttctgtctacagactactgagaaaaaagttcactccttgtaggacttaatattggtttgttgactcatcctgattgctttatgattcaagttataaatactgcattgcttttaaagataaaaaatcttttcatattatttataggagctttgctggcagtagaacacgtgaaagacgatgtcagcatttccgttgaagaagggaaagagaatattcttcatgtttctgagtaagtgttttcatctttttattttcagtactgattggctttttcttttttttagagtttttttagagacagagtctccctcttttgcccaggctggcatgatcatagctcactgtacctagaactcgtggactcaggatcctgccatcccagcctcccgagtagctaggactgcaggcacatgcctccacacctggctaattaaaaaatgttttttgtagagatggggtatcactgtgttgcccagcccagtttcgaacccctggcctcaagccatcctccggcctcagcatcccaaagcactagggttaaagacgtgagccaccacgtttggcctctgaatggcatttaaagaaatattcggcatcgccgggcgcggtggctcacacctgtaatcccggcactttgggaggctgaggcaggcggatcatgaggtcaggagatcgagaccatcctgggtaacacagtgaaaccctgtctctactaaaaatacaaaaaattatccaggtgttgtggc

SEQ ID NO: 6992 - DNA, 1175 bp, Homo sapiens
tgcagccataaaaaatgatgagttcatgtcctttgtaaggacgtggatgaaattggaaatcatcattctcagtaaactatcgcaaggacaaaaaaccaaacaccgcatgttctcactcataaatgggaattgaacaatgagaacacatggacacaggaaggggaatgtcacactctggggactgttgtggggtggggggaggggggagggatagcattgggagatatacctaatgctagatgacgagttaatgggtgcagcacaccagcatggcacatgtatacatatgtaactaacctgcacattgtgcacatgtaccctaaaacttaaagtataataataaaaaaaaaagaaataagcgtttaaagagatgggagtaaagactataatttgtacatttcagcagcatttaaattttaaaaataaatttaagaatcaagttttttttttttttatctgagagagttcaatgttaatgaaagtcatcaggatgactccatgcttcttgccaaagaccttattttcccaaggaccctcttagattatttcctagcccttctacagactctaagatctggcctgcctgcccacttcctatctatttcccccattctttcatccaggtttccaacctgctgagagaattatgaaatgggacacaatttgatctacatccctagccctgatctcttctcatctgattgtcccctagatatcattatgatgacatccctcaggtatctcaaatttagcgtgtccaatttgagttcatcctctttctacccacctctggatgtgtttctctccctgttttactatcccactaatggcaccaccatttttctaactgatccagccaaacacctgaaagtcatcctagactccttccttcctcacagcctatcactctggtcctacttatgtatcttctgaatagttttttgttttttttttttttttgagacggagtcttactctgttgcccaggctggagtgcaatggcacaatctcggctcactgcaacctccacctcccgggttcaagcgattctcctgcctcagcttcctgagtagctgggattacaggcgcctgccaccacacctggctaatttttgtatttctagaagagtctgagttttataataataattattttacactataaccaaaaaaag

SEQ ID NO: 6993 - DNA, 1166 bp, Homo sapiens
tagagaccactcaaagatgttttaatatattttgttacttttgttattaaagtttatggatatgcttcaataacacattttggctttggtgatttaaatgtataaaattcacaaattcctatttccttttcttttcttttctttttttttttttttgagagggagtcttgctctgtcgcccaggctggagtgcagtggtgtggtatgatctcggctcactgcaacctctacctccagggttcaagcgattctcctgcctcagcctcccgagtagctgggactacaggtgcacaccaccatgcctggctaatttttgtatttttagtggaagtgggtttcaccatgttggccaggctagtctcaaattcctgacctcaagtgatctgcccacctcgacctcccaaagtgctgggattataggcctgagtgccgcgcccggccaagtacctagaatttcaatgtagaaaaagaccaggctatactgagatgtttttatatatattgttttgccagatattgtcataagagaaaatgtcttgatattttaattgttcaaaatgatactttataggattgtctagtggacgaagatggagttttcacagatgttgcaggtcctgaacttcaaaacaaggctgtccttgaagagggaactgatgtgggtgagcatcatatctgttgatatcatacatgttttctgaaaagtaggtagcagtaacctttgctacctattttccctccttatactttaacagaaacaaaaaaataaattatgtcttgttttgccatatgttttaaaatggagtttgggactttttcatcttttgctttgaagctgctttatttaagcaagtcagggcagtcaacagggagtgaagttattttagggctatggagataataatcagcagtattacttttgtggaaggatacaatcaagatcagggctggatgttgactgtaaattacacattccctactcactttttaacccttgtaaataactgacctatatggcatgatttatgtattagaatcttgggaatcctccagccttgaattgtctttctgtcttcctttacagattcagagaccaagtgctatgaaaacctttctttgcccacactaagactaaggctatttagacctgatatattacttttcta

SEQ ID NO: 6994 - DNA, 1190 bp, Homo sapiens
ccaggctggtcttgaattcctgacctcaagtgatcctctcgtctctgcctcccaaactgttgggattacaggcgtgagcaaccacgcccagccaagttgactactcttttattttttgagacggagtctcgctctgtcacccaggctggagtgcagtggcacgatctcggctcactgcaacctctgcctcccaggttcaagcgattctcctgcctcagcctcctgagtagctgggattatgggcacacaccaccatgcccggctgatttttgcatttttagtagagacgaggtttcaccatgttggtcaggctggtctcgaactcctgacctcgtgatttgcctgcctcagcctcgcaaagtgctgggattacaggtgtgagccactgtggctggcaaggtgactactcttattgccacctgttgctgcagatttagtattttctggaagtttagagcatttttaggattttcacagtactttttaattatgtctaatttggtgtttttttttttaaagttataaagatgcttcagactgcaaagaatttgttgaaagaggagaaattggtgcatagctatccgtatgactggaggaccaagaaacctgtggttattcgtgccagcaagcagtggtttataaacatcacggatattaagactgcagccaaggtataaaaagcatcctgttttaacaggtcgggcatatcattccctcagtataaaggggctgcatgtgaggttgaggtggggtttcaggagtaatagggattgctgctattatgatttagtttcataacattgtagaattttagatctggaaggaccttggacttccattttttcattatacatgtgtgagaaatgaggcataaagaggttgagtgatttgtccacatcacactgttagtagatagactttcttgcccagtgtagtcaaagttgcatagaatttggacagaactgtgttacctagtttaacctcccactgcctctgtttcctcatctatataaagtggtaataatgcgtatctcatggagtaaggaaattcgagtttccagaatatggtctgatacataataagcagtcagtaaaacttttttaaaccctttgcttccttaagattgaaattacaatcaattaaaaaagttactgttctgcttacaaaggaagcatattaaaaagaaaaa

SEQ ID NO: 6995 - DNA, 1601 bp, Homo sapiens
taaaagtatatacaacttttaaaaagtgcaaccctggctaaattccactcctttggttaatactgaagataaaatataaacaaatgtcaactctgttataattaatacagatgttttactgtttatttctaattcaaacacttaagtagctttattgttaaactttgctatttaaaattggttataatttagattatgttcttataagattctatatttcctatctaaaatgttgttgtaattcaatttaaatgtgttcatgtacagtccccatcagtagcgtatagaacaccccactctcctttagtaaatgttgagaaaatgcctttgttgtcatgctccaaatcccacactgggctgccacctgggagttctggataccgaaaggttcctttcccagaggttctgctgttgccatcagaggaggatgaccgtgcttgaggaggaagaatgggttcaagatcatcatattcatcagaaggggacactaaatagaacccttaacctgttgtacttgccaaaattgagaatcagagatgtgtaaaatgcagcaaattaattataatgtaagttaagatttgctttttgccaagttgcaaagttgtatccacatcaggtcactgtaaaaatgtattatcttgtaaaacttatgtaaaaaaaaaaaaaaaaaaaaggcaaagatactaaaaattttaagtccgactttatttttcctacaagtgtttagaaatgcttctgggatttgctaatattatctgtccttgggaacagtattgaaaaaactgcttagtggtattacagctttagcaaacctacctcacagctgggatgagaggataaaatacaactaattttgtaccctatagtgcctagagcagtccaagtgctaaataaatatttactgattaaaaccaaactatagctactcgggaggctggaggaggatcgcttgagcccaggagtttgaggccattctgggcaatatagcaagaccctgtctcgaaaaaaaaaaaaaaaagaaaaaaccaaactaaccaaaactctgtaaaagagtgctttgagctctacaaataccaagtatttattgtggtatatttttagaatgtagccatacagtgtaattatgggtatctgtcatggatcacaattattattcatagtaagtcattgtgatacagaagtttgtttcttcacttccccttaagaagccaactatagtaatcatgcaaagttgaggagtatgtccttcagggatataaaaagaaaaacaaatctgttttttgagctaaaagagcacatccaaacaagaatttaactggctaaaatttagtaattactgttaagtaactatcaaacttgaaatcttacaagataaatggttaagatgtcttgagtatttgggatgggggcctgtgagtctgattgagacatacattttacagagtagcagcactggaaagggctagtccaacctcccagcctctgcttgggtctccgctgccccagccacacacatcctagaattcttgtaaacatatctggctctgtgttaacagtcacttgttatatgttttctaagagattagttcttcctgtgattt

SEQ ID NO: 6996 - DNA, 1099 bp, Homo sapiens
ggtacccagctactctataaatttgagagaccacagtatgccgaaattcttgcagatcatcccgatgcacccatgtcccaggtgtatggagcgccacatctcctgagattatttgtacgaattggagcaatgttggcctatacacctctggatgagaagagccttgctttattactcaattatcttcacgatttcctaaagtacctggcaaagaattctgcaactttgtttagtgccagcgattatgaagtggctcctcctgagtaccatcggaaagctgtgtgagaggcactctcactcacttatgtttggatctccgtaaacacatttttgttcttagtctatctcttgtacaaacaatgtgctttgaagatgttagtgtataacaattgatgtttgttttctgtttgattttaaacagagaaaataaaaggggtaatagctccttttttcttttctttttttttttcatttcaaagttgctgccagtgttttcaatgatggacaacagagggatatgctgtagagtgttttattgcctagttgacaaagctgcttttgaatgctggtggttctattcctttgacactatgcacttttataatacatgttaatgctatatgacaaaatgctctgattcctagtgccaaaggttcaattcagtgtatataactgaacacactcatccatttgtgcttttttttttttttttatggtgcttaaagtaaagagcccatcctttgcaaggcatccatgttgttacttaggcattttatcttggctcaaattgttgaagaatggtggcttgtttcatggtttttgtatttgtgtctaatgcacgttttaacatgatagatgcaatgcactgtgtagctagttttctggaaaagtcaatcttttaggaattgtttttcagatcttcaataaattttttctttaaatttcaaagaaaaaaaaaagaaaaccagaaaacaacaacaacaacatgaacaaaaaagaccccacaaaaacctcattcagaggtcagcaacctcaaagactgaagatagatagcccccaaagatgagaaagaatcaatacaaaagcactgaaaactcaa

SEQ ID NO: 6997 - DNA, 1137 bp, Homo sapiens
aagagagtcaaaacaggatggaaaagagaaagacctagatgagaagagcaaagtcacagaagaggagaaaaccaaggaggagaagccagaagccaaaggggtcaaggaggaggtcaggttggcctgagcagacctctccagctctggcttcttgccaagtcccctgcctttctccaccaacacctcagattttatgctttctatttctctgtgtatttataggaaagtttattaaatataaatatccccagggactagacagaaaccaaggccctgagcccagggcagctatgctgggtgaactcttctaggagctgccttgccacccatccttccatccttccccagttcttaactttgaaccataaagagtaccaggtttgggtgaaagggatactttcatgcaaccataagacaaaatcctgaaaatgccaaatgcctgcttagtagctttggaaaggtacccttattgaacattctagaaggggtggccaggtcttcaagggtctcccgttcttttcaggctgctaatgtaacatcagccatttttagattggctctgtcctcataccttcccagtggcctcaggtgagccaagaaactcacactgcctgccctttgtcttcccctaattctgcaggtggaggttggtggtctagtttcctttttgagataccgttttcatttttgagacctttgtaataaaatggtacatttctatacaaaaaaaaataactgtttagaccccatctctccccactgcttgtcacagtggaaagatgtcttttgttgaagacttcactcactcatctgtttgctgtatctggtgactaccttccttctcagtatctcaccccttcaaaaaggctctctcctgtaaccaactgaaccttatctctatcgactccttttcctcagcttttatacatacgtgaatctcttccactaaaaaaggcatccttcaacctggcaatcccctttcagtgctgccatcttgctcctcctttgtagtgagcccttttgaagagtatctacacttaaaccatcacccattcctcaccaatccatttactttctggttcctagtgccaccactccactgaaacttcccccagcaaagtcccccatctctgttgc

SEQ ID NO: 6998 - DNA, 1996 bp, Homo sapiens
gtaatgcctaatgtggtctgcctgtgaatctccccatgtagaatttgcccttaatgcaataaggttatacatagttatgaactgtaaaattaaagtcagtatgaactataataaatatctgtagcttaaaaagtaggttcacatgtacaggtaagtatattgtgtatttctgttcattttctgttcatagagttgtataataaaacatgattgcttaaaaacttgtatagttgtctagatttctgcacctgaatgtatgtttgatgctttgatttgaaaatgttcttccctgttatttacattctggtgggtttttaaaattcttacctccatcatgcaattttgaaaattgtgtccagaattaaaagtgcatagaaatagcctttacaattgtagcatggacctttaaaaattgttttaaaatcttatttaaatttaaaccagaagctgaaaaatagatcagctttattatacacaaaattattactgcttatctttgctcttttccttgttatcccgcaaggtttagttgagaagatacaaaatgtttacagtgttggcacttagagtttttaaattcaagtacatgaaattcagtaatagcattgccttgagctaactaggaagtaccgggaaaaaagttaaatctacatcaagtttcttttgaactttgaagtgttttctgacccactgctaactgtagcaacaaaatttaaaagaaaaaaaacatactttatctggctattataacataaactgtcacgtaggtttgctgccttcagaataccgcaatttaattgcgggaatataataatattgggactgtttcacagcacaaactcatctttacagtgttgatcaatgcatcagttaagaaataatgccacctcaggaattaactggcattgggaacatttgcctcattctcctgctatcctcttcattcacccctgccactgtaatatctataagtacttaagagacttgtgagcaaaacatactatttataacagtatatgattgatttatgcttatgtggttgttcagtttgttcccatgtaactcgtttgttttaaatattttgccagatttcttgtatttattccacatcattatgcctataatgtgccgctttgtgattgggcatttgcctacttttctttcataattagtgatatatgcgatgtaaaaccactagtaaaggtacattttaatacttgttattttatactgaattagccttggaggttgactgtgcaatgttatttactgttgtaattactgtaataccaacatatgggccccatctgcacactcctgaaaaacagaaagtgtattcaaattttatcagtttaaagaaaataaagctgtgataaatactgtaattccaacctacattagaaggtctaagtgtaggtgatgtgccattccataatggcttccagactagggtgaattttatgttctgtactgtactgtgatgtagctttcttctgtaacagttatgttttaaaattaagtgagttttttttttgccttagcaaagggtggtgtttgaaaaaaaaaatgtgtagcccctttttaacctagtgttcattcaaaaaaaaattgatgcaaatctttattcactttcactggtgcacactgaaattttacttgaacagttctcataataaagcacttgtcttttgctctttatcagaatgtgaattacctgttttctggtacaaaagtattctgtatgaggagtttattgtatgtgttctaaatttagttggcaaagggtgaagctgtgaaggttttcaagattattgaaactatgaaggtttcttgtcattatgacaagaaagtttaatctttttataggaattcctgtcactgaaatacgtttttaaaaaaatagactcatgtgttttccacggtagaaactgatatttttttacattttctcactgtggccaactcttctgtgtttgtagaaaggaatttgacttca

SEQ ID NO: 6999 - DNA, 2064 bp, Homo sapiens
aataagatcataattgtttcctggcaaagaacaattgttacagaaagatgttgtataggaggttgatttatttggttattaactggtatgtggaacttaacattttcttctcctcactgatttgagaaactgtagatattttaatgaggcatataattccagatcgtcatggtgttttctggttatgttaagctaataaccgtctcttcttttacagagattcctctaatggaagaagatccctaatatgggtcaagatccagatgactctcctgctccttcggggaaaggaccttgtatcttggagtgaggtcacagaaggatagagcctgggggcaaaatgtctaacttgtctacatggggaccacagttcacattatgcatctcaggctccacagtgaggctgacaaactgcaatggcagtgcttttaaatgagatttgaggattcaccaagacccatggggaaccggggcagcagggaagccctcgcgtggtcttggatgaggggtgttaaatgtgtatcgtgctgtggaacatgggacaattccacgcacatcccaccgaatcatcacgcatcccattgactggcaagtactccccgccccctctgaaagcatgtcacatcatgtaaatttgcttctaacatctgcttcaaactgtctctggactccaaatttggatgggtcagcctctgcagaaagtttgtgttgagatgctggaagaacagcagagcctcctgcaccctcagcaagggaccagctcccaaaggaaaggtccttgtgtgacatttggagaatcttccttcatccagacaactctactcgaagcaagacgaaagcaggatgtggcagttgcagtgagaaaggaaaggaaagatgggcagactctgctttctggaaatttcttcacaaagtagagctcatgaactctgtgctgtcttctggtaacatatcatcagtgtttgtattcatggtgtggcacatggatccatggcattgggtaaatctggtggtttttacacatggtcagaatgtgttcaaatacatctcatgatggagacagtaaccaaggtaatgttttgtttcagcattttaaaaagactccacttaacatttatctcagaatcatgagcctctctctagttgacaattgtcattgttcccccagccccaaattgaaccatacatttattttccaaaacagaaattgtttctgtaaacatatccgaccttcaaaagaagtgtgaggttggatttttcccccttttatttgtcctaagattccaggaggctggcctcccagcccagatagctcagccacctcacctgcctatcattcctgcattcctactttgagggtctcatcatgcccactgggtgttgttcctaagaaactgattgattaaaaaatttcccaaagtgtcctgaagtgtctcttcaaatacatgttgatctgtggagttgattcctttccttctcttggttttagacaaatgtaaacaaagctctgatccttaaaattgctatgctgatagagtggtgagggctggaagcttgatcaagtcctgtttcttcttgacacagactgattaaaaattaaaagaaaatgacagtttgaagcgtgactttaatagtgcagtagagtcgggtgggcaggagtggggtggtgacagtgatcatggatgatgggattcaatgtaagattaagaacaagagatggaaggagataacacacaggcaatgctcaccttctaaatggaggttgtctcagagaccactgggcaagtgcctcattttctactaggcagttcagaagaggcatgaggggctatctctgatattctcccctacaaagtagacagcagcaacatcaagctgcctgactggcagaccaagtacagggttgcctctccagcccgcagcacttgtgaagacaggtagcacagtgtcttagtccacttgtgttgctatatagaatatctgagactgggtaatgcataaagaaaaaaggtgtatctggctcacagctctgcaggctgtacaggaagcatggcaccagcatct

SEQ ID NO: 7000 - DNA, 1145 bp, Homo sapiens
tgctgtcagaggaaatcacgggtttgcacctgctccctcacctgtgtgctcctctgtggcttccttgtggcttcgaaactaggcacacttcagatttcttatgtgaagccatttttttttttcagtgaagtttcacagttgtcatcacatgcattttgtattccttcagggacatcctaacgtagtgactcagagatggaaagcaggtgagagcccctccctcagcgctgctgggtactattgatcttaaatttgatctgtcagcacatctctgagtaggtaaacaccatgctccatcctgctcacaaacaagcaaagccccagcctcatgatcattggcttccttcagtagacacatgtgttggccttctgtgttgttacaacaaaacacaagtggaaaatgtaatgtgctgtataatgtttattgattttccctgagctaaaagcaaagtttcagacgtagtcatggagatggccaggactttggtacagagggttccgtgcaacttcctggaatcattacccaaatttagatcagactggggatggctggtgcaatggcagttttgatgattagaattcagcagaactcctgcaggcagaggttgggtggttctgtacaatatgggagcagagtccctgtcttcctgttccctctcagagccacatagacaacatgctgggctgtcttgatgcgatgcctttgcactcagtatacaggctcactggctttcctgccacttctccacgctcctcaaggccaacttgagacttgagaccgtagcattaagagtcagctttactactgagctcagctacagagtttcctcatgatctggaacagcacttcacttcccaaactgcactgtgcatgtgaatcacctgggaatcttgctgaaataaagtttctgattgagtaggtgttgctagagagtaccaatttctaataagcacttagttgatcccaaaatggacagtccatggactgcaattcatatagcaagagtccggtgaaaggtgaagacccagaccagataccatgacaatttaatttgcatactggctccactgaatgttgtaaaccatccatccttagcacgtaggggatggagggggtctcctgaccattgcaactgtggggacgg

SEQ ID NO: 7001 - DNA, 1317 bp, Homo sapiens
tgtatctggacctcaaaattatgggaacatttacttaaacggatgatcatagctgaaaataatgatactgtcaatttgagatagcagaagtttcacacatcaaagtaaaagatttgcatatcattatactaaatgcaaatgagtcgcttaacccttgacaaggtcaaagaaagctttaaatctgtaaatagtatacactttttacttttacacactttcctgttcatagcaatattaaatcaggaaaaaaaaatgcagggaggtatttaacagctgagcaaaaacattgagtcgctctcaaaggacacgaggcccttggcagggaatatttaaagcaacttcaagtttaaaatgcagctgttgattctaccaaacaacagtccaagattaccatttcccatgagccaactgggaaacatggtatatcatgaagtaatcttgtcaaggcatctggagagtccaggagagaagactcacctctgtcgcttgggttaaacaagagacaggttttgtagaatattgattggtaatagtaaatcgttctccttacaatcaagttcttgaccctattcggccttatacatctggtcttacaaagaccaaagggatcctgcgcttgatcaactgaaccagtatgccaaaaccaggcatccaatttgtaaaccaattatgataaaggacaaaataagctgtttgccacctcaaaactttatgaacttcaccaccactagtgtctgtccatggagttagaggggacatcacttagaagttcttatagaaaggacacaagtttgtttcctggctttaccttgggaaaatgctagcaacattatagaaattttgccttgttgccttatcttcttccaaatgtactgttaaataaaaataaagggttaccccatgcaatcacaccatgccatgttttccttcctggagggcagccccacaggacggtttatgagcacacaattatagcttgtttctactttaacaaggtatgctgcctctgtaaattcatgtattcaaaggaaaagacaccttgcctataattaaaatgtggaactataaaattttttaaaatccaattcagaaactttgataatctgaccataacataagggaagctctaatttctactgcttgctgatctgctgttaggcagcacagagacgtatgtgcctctcaggaagttccctgctcgaccttggccagctcctcctggggtaggtacaagcaagggagctgagaaaacatgcagatgaagtcactggtctggtgcttgtggttcttgatgaatcatttcctcaagatgacttg

SEQ ID NO: 7002 - DNA, 1185 bp, Homo sapiens
taggtatttaggtgtgcccttctttttgtttccagaaaaattctgacactggtattctcactggaagaggggcaaatatagatacattttacagcagtaaatagacttttatttggaaatggatgggtctgatttttttaaatattgtttgtaaaattataatttaaaaatagcctgtattgaaaactacaattaaaaaaaaaagactaggctatttagaaagttgctttttaatattttctttgtatattcggagaatcatgaatattagtgttagaagggactatgtgatctaatatagattttacagaaacttttggaaccacagaagttaaatggtgcacctgtggccagcgtggagcccactggatttagactgctgagctcctgacagctggctgagatgcattgccttttgtagtattccaccctggcttgactctgtgtgtgtggaaaatctgtgtgacttcagtttctaagacgtgttttaatgaaaaaaatttacctgagatactaagcatttgttgtatccataatgtataatttgcatgaaggatagatggtgaatgatatatttatctttcttttacctgaaaataatgtggtttctactcatttgctttagaacgtccagttgcggataatgagcgaatgtttgatgttcttcaacgatttggaagtcagaggaacgaagttcgcttcttccttcgtcatgaacgcccccctggcagggacattggtaggtagtgctctgtgaatcgtgacagatatttaagcttttattttgtgctgggagtagtaggtggcacatgatgagaagccaggtaatttgagaggtgaaggagaggttaggaagtggaaacagtggagataggctgtcgaggggagaagtttgactatagttgtttaatgcaggtgggaaggagtcattagagcagggggttgaaactataagaaaggaaatacttgttaggcagggtccctgattaggtccttccacagccctgaggcagaaagtcctcttagacaagaggaaggatccctcttccataataacaggacagaaataaaactgtggcagatgtggctaaatttgtgcattttgtgggagtaagttgagggatttctcatctaaaaacatttgttttctctgaggtaggagtgatgatggaggtgggtgggaag

SEQ ID NO: 7003 - DNA, 1222 bp, Homo sapiens
tttccccatttcccccagcctctggcgaccactaatctactttttatctctatggatttgcctatttaagacatcctatataaatgcaatcatacaatatgtggtcctttgtgtctaacttatttcacttaatatgttctcacggttcattcatgttgtagttcttattgatatttcatacctttttatttgcctaaatcaatcatttctatgattcctaaaaaatggtgctagtctaactacattatttccatctacacttactaggcaacatctttatcatccattgtcaggaagccctttaagaaaactgcacagtgaagttcattttaataaatagggtttccttgctctcaagtagttactaatcttagacaaaagggtctaggatgaccacctttcttgaggtttacatgatcttccctgacttccacttgaaaggcaccctgtgagtctctctccgcctgttatcccacaggctcctccccactcctccaggtaccccttccccggcggctgcaggaggaggaagtgacgcaccggaagtgtccctgttccccttgctgtgggggtaaggaatcaagcccccaagatggcggcagcggcggaggagcggatggcagaggaaggaggcggcggccaaggcgacggcggttcctctttggcctccggctctacccagcgacagcctccaccgcccgcgccacagcacccgcagccggggtcccaggcgctcccagcccccgcgctggctccggaccagctgcctcaaaacaacacgcttgtggcgctgcccatcgtagccatcgagaacatcctcagctttatgtcctacgacgaaattagccagctccgcctggtgaggcccccgcagaactcctgcctccctctccccccggccgaggtctgggagatgagaagggagcgcgttccccgggaagggagccccccgcgagccccagccggctacagatctgggagggagccgctcccgtcccgaactctcccttggcgtcagtcagcaggagtgggctggttcccgattgcgtcctagctgcggagctggggttacttcctgaggggacttcgccttgggggctccttgccccccgcccggaagcgggccctctacgggaggggtagcggagttggtcttcccaccttccgcctggcccgagagtagacccggagaggtcatgtcgcctgccttttgtatgccgct

SEQ ID NO: 7004 - DNA, 2301 bp, Homo sapiens
ttaaaataaggtgttaaattatgatgattaacccaactgaccaaatggattgcaaagaagaagaaattatcagaagtgacatagtaagggtattccatttttaaataagtgtaagtattactggtagagagacattttaagtgactgacccttttgaattattcctccacagttccaggaccgtctgcagccctaacaacaatgcagctcttctccaagcaaaatccttcaagacaagaggttaccaaactccagcagcaggttaaaacaaatggtgctggcgtgactgttctcaggcgtgaaatttctgagcttcgcaccaaagtgcaagaacagcaaaaacagcttcaagaccaggaccagaaactgctagagcagacccagatcataggtgaacaaaatgcacggttggcagagctagaacgcaaactacgagaagtaatggaaagtgctgtaggaaattcctcagggtccgggcagaatgaggagtctcctcggaaacgaaaaaaggccacggaagccatagactctcttaggaaatctaaacgtcttcggaatagaaagtaaattggaatgtggttctagttccagaggaagacacagcttagtagcttaagcagttatgcatatcaggatactgtgagcaacatggtgtcccttaagcttctaggctttcagaacacaacttaaacttgaactcttatggttgggacattcttttcctgcttctcctgattgaactgatgcacagaatctttttactttgcaatagatttgtactaaccagacctgttctatcatgttttgaggagttaacttttttctgtgcagataatgttgaaagtaagttaatttgtttctgcatatatgcacatacatacgtaaggatcttaaacccagtcttgacagactagaagttaagtttaatacagaaaatgtcctgttcacttgaaagaaaagacctactttttaaatggacactatcttggttcttttttttttaagtcatctttttgttataagtgacctttgtctggaatgtctgaaaagtagttaatgctttttggtattgaagtaatgggtaactaaaatggacttccatagtattgactgtagaaggagcctctacaatattgactatatatttttataaactactggcaaggaacttacccagctgttatacatgttttcagttctctttgggggccatgtcctacatttgcatggatggatgcatgcattgcctagtcaactcacttaaaaagctcttgcactggtattgatcttgaacctctatacttctccactttttagagcggcgtcttagtttatttaaacgcttaacatcttccaccgcaacagcttgcctctagagggggaattgttcatccatttgtcctccagttttataggaacaagagactattaaagcccattgctttatctgctctctgtagggttcaggtacactggctaaggcagaaccccaaatttcaaggctctttctatcaatattggacctctgggagctaatactcctctttgctcaccaccatgtgatcattgatcagatgtggtgagtgagtaggggactcgacttgcgggatgcagttttgccattgcagcaaagttcattgaggaaaattgtaccatgaaaaagcattttgattatttcatttctggaggatgaccttgagggaagctttttaatattagtttcaagctttccttaccctacaactttaaacaaaagctttaattttgtttgcactcctattttgagcttgtaactggaaaagcatgtcttgcactgttcaacctcctgagtggtcgctttaacaacctccaaattgtgtacagtggttattttccccagttgtatagttttgagacattcaattatcactgtcttagttgtattttaatttactaaattatgtagctatttgactgttaagttcttttaaacaactgtttccttgggcttcagttatttaaagtaaatttaggtgtaatatagaaaactgtccctttccaggtgggagcttaacacctgtataaaacctaaggttttggtaagtaccttagttgaataaaagcacaaggttatcaccttttttatccgtccaccgtgacatggttatgcatcctttagattaacctcaccaaatgaagctttttctatccatttttaatattgtccttacataatattgtccttagattttgatcaattctatgtctgactttgaaattccatttacaatgtagtatgttttcaatgaaaaaccataaagt

SEQ ID NO: 7005 - DNA, 1109 bp, Homo sapiens
taatttctatctaattagcatgccacaatttattagtatttgtaagttcctggatggcagggatcagatgttgcctttatattctatggcgtcatccatgcagtacattctttaataatatcaagttaatctaattgtatgtatttgttgttaattttacaaataagccagatatttagtcccttggaatgtgatgggagagagacctagagggtcgagtgtattcaactgctgctgaaatgtagactgctttttgtttagaattcccacagctgctgctgctgctgcttttttttttttttaagagagaggagggaggcaggtctcatggtttcccttctcagtgtttgtgtcaaccattcatcagtcatctttgaaagaacctagtaacactcatttttcatcttgctgtattttttcccttctaggtgaggaaaatagcagctgaatactatgacaacctccctcactacaattcctggataaaagtactgtatgattttgtgatggatgatacaataagtccctactcaagaatgaagaggcaccaaaaaggagagatggtgctggagtaaatatcattagtgccaaagggattcttctccaaaactttagatgataaaatggaatttttgcattattaaacttgagaccagtgatgctcagaagctcccctggcacaatttcagagtaagagctcggtgataccaagaagtgaatctggcttttaaacagtcagcctgactctgtactgctcagtttcactcacaggaaacttgtgacttgtgtattatcgtcattgaggatgtttcactcatgtctgtcattttataagcatatcatttaaaaagcttctaaaaagctatttcgccaggcacggtggctcatgcctataatcccagcactttgggaggccaaggtgggtggatcacctgaggtcaggagttcgagaccagcctggccaacacggtgaaaccccatctctactaaaaatgcaaaaattagccgggcgtggcggcacatgcctgtaatcccagctacatgggaggctgaggtgggagaattgcttgaacccaggaggcggaggcagaggctgcagtgacccaaga
